United States Patent Application Publication US 2013/0096032 A1 - sequence listing, part 32

SEQ ID NO: 1121 - DNA, 99547 bp, Arabidopsis thaliana
gaattcgattaatttattgtttgttaatgctattaggtcatgcctgggtttgatagaattagcgaattgccggaatctttgattagtcaaatactgttacaccttccgactaaagcttctgtgaagacgagtgttttatcgactagatggaagaatctatggcttaatgttcccggacttgatttgaactgccgtgatttcccctttcagaacaacaacgaaaaactgttgattgatttcattgacagatttctccagtttaacaatgagtcacgtcttcaaaaattcaaggtagattacagtagagataagatcattaagttctcggatcggattggtgacgcgattagccgcgggattcgagttttagatgttgagagcaatacctattatcgagatgctgatgattgcattgactatccttgtatcgagttcatgcctctgaatctttattcgtgtaagacattggtttctttgaagctttcgtattcgggtcttgaggatccagggtttgtctatttgccttgtctcaaattcatgcatcttcgagaagttcgatgggatagtagtggtactatgaatctggagaagcttgtttcaggttgtcctgttcttgaagaactgatttatcttcatgatgataaattggtggttacgcgtgtgagatctcgaagcttgaagaggttttctattccgtttaggcataaactttctttgtttaggagagtgacacagacatttgagattgatgctcctggactagagtatatgagtcttaaagcagaccatttcgatagaatcgtggtaaagaaccttacttctttattcatgattgaccttgatatcaaattcattgtcgggtttggctggatgtttgatccggaggacttaccaaagagaaatgaaatccgtgattttctcaccgggatatctagtgtaagacatatggtcatctctcataatacagtgaaggtatatatttttgtacaacaaattttggtctttttctacttgggaaactctcactagcatccattttttcctttccttcttgttgcaggcccttgatctttactcaaaagtaggactgattcccaaattcaataacttatcccgtgtagaggctgcgttcccgagctccttgttacagtttttgccagcctttcttgagagcttcccgaatctgaaacacttaatcttggtaaaaaaacttaaatgattttggcgtaacaacattgtggctcttgtggatgtttataattgaatacctagctttacttttgttggtgttttcaggaaactgaatgtccagtggaggtgatggagaagtttgaactcgtaaatgtgcctcggtgtttcgtatcgactcttgaacatgttgagataaaaggattgtttgactggggggaacaggatatgaaaatagcgagttactttctcgaaaactcagcagtcctcaagaaactgattctgagtttcatgggttgtcctcaacattattcggaatcagatatctacgaggaacttaataaactcacaaaacgttctccgagatgtcaaattatcattagatgctgaatgaggccatgagtatcatgtgtagaaagtctgttttctcatgaaacactgattttttaaagatcattttgttcttcttcttagttttggttggattccttgaccataaaactcggtcatagaacgaaaacattgttgtttttttaattttttcttaatctcaatctcagtttcttatgatctattggattctctgaagaaagtgatattattacactggacactggtagtaggaacattggactaaaggatctactctcatctgaaactctttgcgcttcctcctagtatattgaaaatttcggttaactcggtaatgaaaaatccaaaccaatcaaagctactgtataaacaaaatttcaattgaattccggttaaattaataattttgattggtttaattcggtttaaaatgaattgaagacgccaatcgatcgtcgtcatcttcactctttctttccagtcacggtttacgcgtctctctatctcccacctgcgattcttctccattatctttgctaattcagaaggtttcgcttcagcttcctcatctacattcttcgcttgtttcttatttacagacattttacgacatttttctgatactgtttcggtgaaattctctaatttcgtttagttttgctttacaatgttcttcattttgtgtctctcttcgttcggtttttgctctgtagagacgcaatttccattttattcttctgatcttctcttttttttttttccggttggccatatacagttagggttttcagttttcactggttttgttctcatcttcctctttaacggaaatttgtcttcttgtaattactgggtcttgttcttactcatcttcttcgtctagtttttgaaaagttgtgatttttagtaggtttctgcaattgggttagtcaatcttcaggtttagggtttaagaataagggtttatgctatgatgatcattgggactagatgaatataactcaaattttgcaatgccactctgcataactatgaaaactatctcattctctcttatttgtcctgttttttttaagctgattggatttctaaccagcttctttttgttttactatgggatgtttatgtgttgtaggttgcaatgtattccagaagagagctggaagatttggagtacagatactacagtgaaatgaaagatggtacaaggaaagtcaaaatctcagagtctctgttcaggtgtcccttttgttacatagatcgaaagcgtgattaccagtttgatgacttgcttcgacatgcttctggtattggcggtagttcccgcactaaggatgggagagataaagctagacatcttgctctggagagatatatgaggaagtatctccgccctcgagaaagaccacgtccttctccaacttcagatgtctcttctcttcctaaagaggagtttactggaaagtggaaatctactttgtcaactactgaagaaggagaattcataactactgaaaattctagttcacctcatattgtcaaagctgaaccaaagtttgtctccggagatgattctggacgtagtggtgaggaaagactaaagttttctgataaacccgaccccttttttagcaacgaagacaaatcataccctgccaaaagaccttgcctagtttctggtgcgaaagagggagatgaacctgttcaacggattggtctcagccatggtgctagctttgctccaacatatccccagaagctagtttctttgggtgctggtaatggggatcagatgtatgtgcatccctggaaaggtatcctggcgaatatgaaaagaacgtttaatgaaaaaacaaggaagtatgctggtgagagtggaagcaagataagagaagatttgatcaagaaagggtttaatccccataaagtcacgccactgtggaacggaagacttgggtttactggttttgctattgttgactttggtaaagagtgggaaggattcagaaacgcgaccatgtttgataaacactttgaagtgagtcagtgtgggaaaagagaccatgatctcacacgtgatccaggtgataagctttatggttgggtagcaaaacaagatgactactattcaagaactgctattggtgaccacctcagaaagcaaggggacttgaagagtgtttctggtaaagaggcagaagatcaaagaaagacattcacgcttgtctccaacttggaaaacacactggtaaccaaatctgataatcttcaacaaatggagagcatctacaaacaaaccagttcagtgcttgagaaaagaatgaaagagaaggatgaaatgatcaacacacataatgaaagtatgttctcttactacgaaactaatttttgcttgattgaggtgcttggtctagtatttggaaactgataagtttgcttttccatgtttagaaatgagtattatgcagcaaactgcacgtgattatttggccagtatttatgaagaacatgaaaaggcctctcagcatctggaagctcaaaggaaagaatatgaagaccgggagaattatctagataagtgtcaagctaagaataagactgagcggagaaagcttcaatggcaaaagcataaggtaacattcacatgcttcgtacaaccttacccttaaactatcttgttcttagcaatgattcgtggaatcttataatatctgccagaacttaatggcaacgcaagagcaaaacaaagctgatgaagacatgatgagattggcagaacagcaacaggtaagctttattgttaaaaaaaaacaaaacactttgaaagttaatgttcaagttgctgtttgatttttggtcgtacttagaaaactggctattgttttacagagggaaaaagatgaattacgtaagcaagttcgtgagctcgaggagaagatcgatgctgagcaggcattagagctagagatagagcgtatgagaggtgacttgcaggtcatgggacacatgcaagaaggtgaaggtgaagattcaaaaatcaaggagatgatagaaaagacaaaggaagaactgaaggagaaagaagaggattgggaatatcaagagtcgctctatcaaactcttgttgtaaaacatggctacactaacgatgagctacaggatgcgcgcaaggctttgattcgtgtaagcaattctcagcctctctccatctcgtcccttcttcctttgatgggttgttatttggattttctgattgatgaacatttatggtgttgacctagtgagactccatgttcttacctggtaactcatggtagaaatctcagatggtagtggaagtgatttgccatttgtgttctgatatttgcaactaaccatgcttaagctatgtgcagtcaatgcgagagttgaccacacgagcttacattggtgtgaagagaatgggagcattggatgagacaccattcaaaaaagtagctaaagagaaatatccagcagtagaagctgataaaaaagccgaagagctctgttccttgtgggaagagcacctgggagactcggcttggcatccgattaaggtcgtcgaaaaagatggaatcgcaaaggtaaacacgcttttctctcaaacaatgtttctagatgatatcttagctcctgtaatataagaacatgagagtgactataacgattttgcaggaagaactgaatgaagaagatgagaagctacaagagctgaggaaagagttgggtgaggaagtgtatgcagctgtgacacaagcgcttaaagaaaggaacgagtataatggcagtggaaggtacatagtgcctgagctttggaatttcaaacaaaacagaaaagcgagcatcaaggaaggagttgtttatctggtcaactcgtggaaacagaagaaaccaaagccgaagcgtagataaaaattaattctagaaacctctattgttgataattattaagactagatgagatttcatgattatccccactaagaatagttataaacttgagaaaaaaataaaaatagttatgaacttatgatgctgaaatcttggactgggttattcgttttgaaaagaggatttgggttttgttatttatgaatatgtttcattgaagatcttctacaattaacagtttagcttcttaagaacaggtttacaaggcttgtgtgggttactaaattacactttacattttttacgtattacaaatacaatcaatagggcttcctgttagtttatattctcgtgatccttcctggagatcactcatgtgtcaagatgccgcaaagagcattgaaaatcccctgtttcagagcttatgaatcctgatccttcttctcgacgttattgccacaatccgatctttgtgctttacctgtattcctgcagtgacattgttgtgaattaggtgagtttattccttgaaccggataactttctaagaaatggtttgcgataagcaaagtttctacctttatggttcctctgttctcaagctccacaagacaagcttcggtcccgcccttgtctttttccgtccctcactctaccagtttcgttctcaaaaactggagccctgaagatacttctgtcactgaggataatactgagctcacatcctcatactcatatacgccgatacaggtactaaatttctcgttaactgacaaagaattttgttctcaagaccgataactgtgctttcatatcctcagctgaccatttagatatagactcttaatcatcggagtcccttggcctttaatttagcatagtgtactgcagacagagaagctttagtcggcttaatccccttttccaacatctctttcacaagtttgactgccttaagtacaaatccattcctacaacaaccagctattaacgctgtgtaaggcacaacatcaggctttaccccactttcaatcattcgatcaaagatcatttttgcctctttaagatatcccatcttacagcaacaagctattagtgctgtgtaaggcgcagcatcaggatccaccccactctcgatcatttgatcaaaaattcttttcgcctctccaagatccccaatcttgcactgccaatcaatcaaaaccgtgtagtagaaaacgtctggtttaacatcaaaggctttcatttcccttgaaagattccgttctggtttgtttttgagtaaaactgtgtatgttaccacatcaggtacgatttctctcctcttcatgtctttaaaaagagcatagactttcttcaggtcgtttaaatggcaatatctgttaatcatgattgtgtagtagacgacgtctggaataacatcaaaggcttccatttccctcttcatatccaactctggatcgctattgagtaaaactgagtatgttaccacatcaggtttgacatctctcctcttcatgtcttcaaaaagagcataggcttgcttcggctcgtttaaccggcaataggtgttaatcatgattgtataagtgaacaaatcagggacaatctttttagtaactaaaatttcaaaaaactcccgggcttttctcacattattaactcgacaccaagcaccaattaactttccatacatgctcttctcaggttcgactccaagtttccacattctatccagtaagtcttgagctttgctgatataatctttctcggcgcaaagactagtgaatagagtaaaatacacactcttgggcagaggaaattccagtctaatgaatcgttcaaaggcatgatcaagacagccagcggcacaaaaacccttcaccatacttgcatcgttttcccgagatttatgttccaaactctcatagaaagcttcagccttgtctagttcacctgcatcaatcaggccttcaatgaccatgttgtgtgtaacataagtgggttttacaccccgattttccatcattttcagagtttcgaatgcctcttgtgcaagaccattcgtagccaatccaccagcaagtacgttatatataacaatatcaggtgttttacctgttccgtccatttcaatcatcaaatcaaaggcatcagaacatttaccttgtagacagcaaccccctatcaaagtcgtgtagttgatgacatcaggagctattcctttacccgtcatttctctgaacaactcaatagcttcttctactttgccaagctttcccaaagcatcaaatgcaacattgtagcaaactctatcaagagaaatgttcgtctctctaaactctttaaatagatcataagcttccgagaaatttcccatctgacaatagcattgaaggattgagcttacaatcacacagtttattctttttcttttcttcaacattttgttaaaaacatccacagctttaggtatattcatattcttgcgatgtccctcaattatcgccgagtaaacatagacatccggatcaatcccatgtttctccatgtcaagaacaacactttcagcgtcttctattctcatctcataacataaaccacgcaccactttgcgatatgcaattccaagatcactcttatccaccagaatatttgcatccctcaatggttggagtagaaaataagctatatctgtcatctgattcaaacacagtccttcaataaaattcaaataaaatacgcaagggttcctagtctctgagattaacagtctactaagaagcttctctaattcttccttatcatcattcctccacaatgcttgaaccacaagaacataagtatgtgcatctgcatccaacccgagacgctctatttcccagaaaaaaccaaccaccatatcacttctcccagatgcaatcatacggctgatcaaaaaattcaatgcctttatatccggagcacgtcctagagaatagtaagctcggaagaaaatatcaatagcttcgtcaaacatatcaagattagcataggctttaaccaatgcagtggagactcgaatcaacaacaccaatgactgttccatttctccaatggcctttaacaaatccattacactgaaaccgcgtccctcatctcctcttctaacgagttcaaatagaaaagtatccaatttcttatccaaaccccaaccacaaacgattctgataacagttgcataagcttggacactaggcaaagtcacatttccttcaattcgtttgagaaacgataaagcaagataaggatcatctttcatactattcaacacacgaagaaccccaatgtcatttaactccaatgctttataatcaaaagtaccttcttttacttgctcagagtgtgagattgtaaggtttgtccgggcaagtgcaggaaccacgtagaatcgcgaagagggtccttgtcgaatcaatcctctcacatgtgagagtaatggaatcggaaaaacccgcatgaaatattttccgatcttgtggcagccggaaaaaaaaaaactagcagagactaattgagaagagattttccgaccaagagagaactgaagattcagggttttactttacagagaaggacatagaaatcgacccgaaccaattccaaattagaactcgaaccgaaaataacattgtaattaaattataccgaatctaaccgaaatattcgaaccggataacggaagtaaaatgattttaatggtacggccgtaaaatgtttgggccaatacggcccattcgttatgactttttttattattattacagaatcgtttccattaaacccttaaaagtttcagaatcgaactcgtctattctccgccggtgtgccgtcgccgatatgcttcgtcgtgtcttttacaagcgtgcacggtcagttggtgtctctgtctgattttatgttgtatatatcatagattcgttagaactatcgaccaaatacacattcaattttgtaattatctgcagccaaaatcgattttcgactagaagtaatttatgtaataatcttacctgtgtttcgattttcattggcagtgatgatttatcttactgtcatcgtctgttgcacattccgtataacgaaccagagcctgactcaaaggcaatttctgaaatcgttggtatagtttcaaagaaagaagaagctgtagtagttacggaaccaactcatcattggcgtaagaattgggaagatttgagaaagaataggttaacagctagtaatttcgcgcgtgctatcggattttcgcctgacggtagacgaaatctttggttagagaaaatcggggcagcgaaaccgtttgctggaaaccgagctacgttttgggacattgagaatgaggtcgaagcactcgagaggtacaacgagttaacgggaaatgaaatcctcatacctgagtttgttgtttataagaatggtgaaagccctgaagaaaactggttaggagcttctcctgatggagtgatcaatgtagttaaggacggtgttacttcgtgtggtgtgttagaagtgaaatgcccgtttgataaccgggataactcgaaagtttatccgtggaagaaggttccttataattgtgttccacaacttcagggtttaatggagattgtggatacagattggttggatttgtattgttggactcgcaatggaagcagtctctttagagtttggcgtgataccgcgttttgggaggatatgaaaccggcactgtttgatttttggcagaatcatgttttacctgcaagagagatatacaataactttgatataaaggatcctcaagtgaagctgagagagtttaaaccgaagcattggcatgaagattgcaagaagattatgcgtggagctgagagaatcagcgcaaacgcaaaccgtttgttctatgagatcgatgggaatcttgtagactgaggtttttgtaactgattatgtgaaatttgcaagcaagcaagccaggttcccttatttcatttgaatgttatttgcttagtgtggaatgtagaaaacactaaatgaagctcttgtgttgagctaaagtacatatttcatattgtatactctgtttcttattgtctcatcagcttttgttacatcagaatattggtcagtttttatgaatgcttctcaagttttcacttttggccattgtttttcttagttctgaaattgcaattgtgtatattggacggttggatttagaggctcaattagccgcattaactaaatatgtggctgtgattcatcttactcaagacgacagcgttttaaactcctttggacattggtcttacttgccacgtgtcacatcttctctatcgagtacaaaccgcaagtgaaacagagtaacagagacgcgtcgtcttcaacgatgctctcaacggtgacggcgacggcggtttctcgaccgattctgaaggtggaatgtacaatcaaaaggacgtttaaagtgacggcggagaagtttccgacgtttctgccgaccgatgtcgagaaaattaaagacacgtttgctctaaagctcgccgccagaatagagaggcttcctgtatctgtaagtggcttgagattccacgttttatcattctgaaatttcaaataatccaaggtctgatcctttcatgactgagaatttgagcttatatacaactacattttactgtcttagctgcaacttggccatgtcacaattcaagtttttgtgattctgtatttcttacattcaaagtttcaagtgagtagaaacatttaaagcaatgtaagaatcatgaacctgtagagattttgctcattgtcttgttaggtgagcttcagggaagatagtattatgagcagttgcgtgacaccgctgatgcggaacgagacaactcctgttgtgcttcttcacggatttgataggtactaatcaaaatgttttggtttgttgaattagtgtcttgagttttaaaactcttgtaaaacagttcttgtttagagtggagatacacttatccgttgcttgaagaagccggtttagaaacatgggcatttgatatccttggttggggtttttctgatttaggttttgtccctctcttatcatttactacttcctttccctttttgttttctgttattctccaaacttgccaatgtttttatactcttgcacacttctcttttcagacaaacttccaccttgtgatgtagcgtcgaaaagagagcacttttacaaggtttgtagacattttctttacttgtgtgcttagtttagttgttgagaattgatttggctctcttgtatgatccatagttttggaagtctcatattaaaaggcctgtggttttggttggtccgagcctcggtgctgctgtcgcaattgacattgcggtcaaccatccagaagcggtacttatagaattcttgaggagctttcattatttctcataaagaagtttttagtcaacatgtcagaagatattgactaggagaagaaactcatgaatattcaggttgagtccttggttttaatggacgcaagcgtttacgcagaaggtactggaaacttggcaacgttacctaaagcagcagcttatgctggggtaagttctcatcaagttctatacataaaagtccctttattgtattggaggatgatcctcttgagtaaaactcttcacaattctgttaacactatggttttttgggtatatgaatttgggattttaggtgtatcttctaaagagtattccattacggttatacgttaacttcatatgtttcaatggtatctcattggaaactagttgggactggacaaaggtaaacaagccttactaagtaattcttattggtaaacaagaaactagctctcatcagtctgatttttttcgtcaatctagattggtcgcttgcattgtctatatccttggtgggaagatgcaactgttagttttatgactagcggaggatacaacgtaacttctcttataaaaaaggtactttcatcttttctctaaatcacttttcatttatgtagatttcggagtaaggtgaaatcaagaagagattctgtctgcaggtttcacagaagacattgatactatggggagaggatgaccaaatcattagcaacaagctcgcttgggttagttagatttttctatctctatttagactattatcatgtttcaaatggtctctcaagtcctagatcatatcttcttcaatgcagagactgcacggagaattatcgaatgcacgtgtcaaacaaatatctaactgtggacatcttccccatgtcgaaaagccggctgctgtcactaaacttatagcagagtttgttagagagacttgccggtgtaaagaggttgaaagtatatcttagacccttgggggccattattgaagctgtgtttcataccaataccaaaatcttacttgttaaatcgtatatagttgatacttcacttctttcatggtttggttggtctttttttgaataaataaaccacaccaaacatctctctgttttgtaacttgtatgattgatttgttgtatgtaacttaaaaacaaaaacagagtgtgaaaacagaggagatgaccaaacttgaagccccactggatttggaatgtcaatcatcgatatgtctttaatgaaaatgtttttgtcaacctaatcaattgaatcgtatacggctcagaatggtggcagaaaatgattattgagattacgcttaacatccaaaaattgggtaaataataaaggcagaatacgtttattgagcttgctgtgaacatcaaagagcttgcattgtatcacaagtcaaaaacccaaataacttggtcgagctttctactccctagtctcttcttcatcgagagctttcgacttcataggttgagaatgacctaaaaagaaaccacggaaactaatgagacaatttagaatttgttaccaagaaaccaagaatcagagcaaatgttatgtacatgatgatgaccgattcctttttgggccgaggtgagtaacaccaacaacattaatatcccatcctttcacgtgattattggtaattatttaggtttaaaaaaagttatacacagtgtaaaaacaatacaaatttcttagttagaaagtattagaaagatattagttttagacttttagataaggtatattttggggaacaaaaatagtgtttttaccaatatgtgttcttcaccacttagaagatagaaacaaaatcttaatatttcccaattcatattcaagttatgccctagtttaatatgatcaaacctacgagtcgagattacaaaaaagaccctcaaactaaaagggttgaatatatcctcgaccaaacccaaaggattactacagtttagagcttcctcaaccgaaagaccaagaagtcaccactagagtttagaatatttccaatcaaaaccaagtgtaactatagttttgaacttcctcaacggctcaacctaaaccattttaccacaagtgcactcagatctgcaagaagaatacaccaacatatatcaaattttcaacttttcaacttgagaaaactttttttcagactacatatttacttaccttaagttcaacaaactctgtcacaaggttgacctgacggcggacacgaacgaatccctcatcaccccaagtgtcgcccttcgtgtcctgaaactccatgaaagggatgttgctctcctcatcaatcccatgcccggtgagtaacatgaagtgaccatctactcttctattcgcttctctgatctttagggtaggtttataaagctgtccctatcacaaaacataaccacatcaagggaatgcaatgttcaaggtaatttgattgtgattctcgcaaatcaataaacacaagaaagaacatataaatcaaaatacttacattctctgtatgcttatgagaactccaacatattggtatcttagtcgccaggagtgattttttaagcagacggtctatattttcctcgaagattacctccccaaaatgtacgtgttcatccataaagtcatccaagcggtgaacaatcatttcatcaatccagtagttcacaacaacaaaattattaatgagctaactctatatgtcaaaaaagattcatattatttacctgaggagtagatccgtcgatgttgagggcgatccataaaataaaactagaatttttttttgtactagtatttcacatgttagagcatttccatcgatgagtttttaaaaaatttagaagaaatttaaaatattatattaaaaatacaatatgaattaaaaaaaaaggagaaaaatggtgcttatataagagattttagattttaagagtctttataacatttaatcattattttttatagcacatttatttagaactctaagtaagagttttaaatccgaaagaaaacaaattgtcacaccaaacttctccatttttagtctatgattgaacaaaagaaattattgttgtaataattaaaaaagaatttaagtattttttacacaacgaatgagttggtaagaaggatgttgttgagaagtcttcatcataaactatagtcgtttgtatccattctcattcactaaagattggtgtcctgttttatctttctttactcaagattctttctattagagcaacctttacatagacgaaagctcaacaaacgcctaagcttcttgttccacccaaaatagaatcaaagactaacacaagtggatgtcttttagtctctacacgtggctaaatccgaaccttacatcagagccccatagaaaggctagtaatgaaaaacagagtgtgaaaacagaggaggtgcccaaacttgaagcaccactgcctgggttgcttgggttgaagactccggttggaccaaacaccggaggagttcccgggaacggtgttcctggaaatggagttcccggaaatggagtggttccgtttgtgggagttgttcccgttggtggtgttgttgatggaggagacctagtagagctgttacaagataaggaacaaagtaaaataatgtgaatgaagcagttttaggttaatgaaagtgatcagcaaacatacctagggcttgacggatagatgcaaccattagccaaatctgcacccacagaaaaaaacatcatcaagatcacaaactttttctcatcaaaaggttttagacttttaggagttattgactttactggaaggtgggtttggattggtagtggcagtgccagagaaattgcagcttccagggacttgagctgcgttttggaagtagctattcacagcccaatcacagtggcttttgatggtgtctggttgataacaagtacccttatcatgtataggattacaatcagctaaggttccacatgcatagtctattgatgtttgaagctctgtgtctcctatcccatctttacagagacagtaaattgcacctaaatagaaagatatagctttagattgaaccataaaaccagagcactgtgatcggttggttgtgcttagattgaaaagatcattcctttgcataaagcttcttgatcatttaggggaataggaaaataagaattaatcaaaaaaaaaaaaagggaagaagaaagctttacttgaagaattggtcaaggacaagagaagcaaaagaccgagaagcactttcatgatcgctctttacgagaagcacaaaagagactttgactttaaaaaccaagaacctgcaggtactaaccaaaactaattaagatgatggctttggagagagaagttaaagagtattggaaaatgaaaggtggatgaataaatagggtaatattgaaaaagaaacccttgtaagttagtgttttggttccaatgttccaactacgactatgcttaaaaacatatttttttgaagttttataataggttgatttataacgtacaatagaaaaagagaagagttgaaaattgacatgtattgacgaactagcacttacgtatggaagatatgcggggccctctctcgttgttgttgcaactaatacaattttggtaattatatttaaccgatttcagtttgataacttatgtcttcctcaatagtcaatatcatatgattcatactagtatactactattgttaactttaaaattcttcgaattttttattttttttatctctatatttttgtacttcaaaaaagcgcaacggttcgatcattcttattatatagatttctattttgctgtgatcaatatcatttcttgtttgacagaaaaaaaatcattttttgatgtgagtcatatctgtatgagcaaaatcaaacagttttgaaatttacatcttgttgagtcacatattagaaattggatatgagtcacatattttgatgaaacgtttctaaatttaataatataatactgttattttagaaaagggtacttgtcttgtgcacacgactgaaacggtaatagttttggggttgaacacaaaattttgtttgctaatggtttgaactttgaacttaatttaagaatggttttgactagtaagtgcctaagtaaagctttatttaattaattaatgcattattttttatgaataccattacacactttttatcatcatctcatatatatgagtcatacatttactaaaactacgatttttctttcccaaatgcaatttgtgtttggagtgggccaacgcttgctataatagttatatgtttaatacagttcaaattcagcaaatggggatgtagctcaaatggtagagcgctcgctttgcatgcgagaggcacggggttcgatcccccgcatctccaattttgaaactttttttttgattaaaggtttttcagacatctgcactccaggtttcgctgttgtgtctttggattcacgtcttgacattgcctccatgcatatgcgagatcattaggttttgcagatgtcactttactcaatgtttttgtgcagttttcttcgacttaaagactttttttatagctcccatttctatttcctatgtaggcttctggcggacattaattagggtataacataaccaagtcttttctaagtcataatcctaataataaagcatatcaagttttaggttaacaaattaaagcattggaaaacataaccagttgagctgacatatacaggtggtggatttggctttgcgtttcttcttccctaaagacttgcgcttgtagtggaggaatcgcaaatttgaactacttgatcggagctgagtgaagtgaaaaacattcattcaacatctatacactaatacacatatatatgagcaataacaaccatcaccatccatataaagagattatcaagaagagaaatggacacctacccaagatgtgtggaggtagtagtaacatcgtcaggcttggacaatgttttcagcagagtaaggcctaaaaggcttagggattcttctagaaggtgcatattatagtagtcacatctaagagaacctgaataatgctccatacaccatttacacacaccgatacgatacgccgatggaagtctccaaaattgacgacacctcgttcgacgcttccccatgattcttgtcttgtgaacttttggtgtgcgtgcctcttgaacaatttggggaggccagaaacccaagtttgggcctcttatattaattcaaggttttacatctgactcactctatcgagaagatcgactctgctagtgctagggtttccgagaggcagtgaaaatcatatgattagatagagtgggcaataagtttatgtaaatacatattattatatacttgctacaacatctaaataagcaataaacaagcaataggggatgtagctcaaatggtagagcgctcgctttgcatgcgagaggcacggggttcgatcccccgcatctccaattgttatccttctttttttaataacggtattattattatcattctataatttatattaccagccgaaatatctttacaactttttaagttatgttctgtcatttctgttctctacagaaacaattttgttttgattcattagaggaatgaatgaatatacgagagagatgattcttaatgaataattacgaaacgaacaaaaaataaaactgagaacaattcttgtttgcaaacagaaaaaatgtaaagaatgtcgtaatttgaataaccgttgcactgctaagaaagtcgcagaagtctcccattttcatcgtcttgatttctctccagaatctgcaagcatcagtacttggatctgtaaactaaagtgaaactctgattcaatctaatgaattacgcagagataccctcaatgtataaagattaagatatttgtgtgttctttaagttttcaaagctcagagaaaagagaaagagaaagagagagagagagagattacctattaaaaaaactgtacttagtgtcgatggtgcagagaagcaaactcgttgacagtttgctaattttgcttcttttcttttgagttatttttttaataatggtttttgacaaacaaggagccgttggtcactaccgtcttgaatatcgatgactcttgcttcccagcgtacacgagcagcaagtgtacgcgccatctctatcactccaagcttatcacttagcacaacccatccctatcaatcaaccagaaaacgctaagtctctctcagcttatgatttacccctaattaggatcatatgacaaatggtcggagtgtataaaaaaagaacctcagggcggagaatccggtccatttccaagaacaagtccattaggctgcaccgttctgagctaagatgtgtgagaagttcattggcatgaagcatgtcatatgttcgaggataggtagggaatggttcacacctgcacatcaattaatggacaagaaacaattcttttttggagctcaaatgttttaagcgaaatgaagataaatgtgatgcacaacaccttcaaactcttttatggaatctaagggaaacacactcaccagtcatgtagagcgccggtaaaacctcgatcaagtattataggaagagtattacgtgctttgactgggacaacattcatcacccaaactgatttcccttggttaagtaaggcctgattcagattcccataacgagcattcatgtccatagcattgcgtatcatgtaaaaaggtgggacaggatcttcatcgccaggtctttttgggtggtctgagaaaatcaaaggtgtaagcaaggaccaatagtttttaagggctgatctccatacttgtatatcctcatcgaattcttcaggtttaatacctgttgaaagatatttatcggagaagaacattaatcgccagaaaagtatgagcagtgaaaacagaacatgacacaccaaaataactagttaccatgaatttcaagctcagacaaacttgttcctgaagctctagacctattctgaataggaatccagcgtttactcttggttccacttatacatggaacaagaggatggtaatatggaacactatcatcatctttgcaaacaggtatagaagcttgcgagctacaacaagcaggaaaaagaaagaacggcatcagtgtgactgtgagttaaaaaccaagcttcaggactctgttcttttacttaccgagatgagtagcaatttgggtctgctgttttctgccaaagaaacgtctcatcttgctgacctgagagactccagcagattttcttagataactcatccactcgtgttgagatacttgttttcttagtatcaggagaatttccctgtgctttgcttgtaggagaggtcaaaacaaaataacccccaggcttgagaacacgatccacttctaaaagtagcattgcatctgctcaacgtcagaaaattgagagcataacactgtcagtcttaagaagatcatttcaaaaagatcttaaccaaaataagtgaaagactatgaatcataccatataaataccttttatatcccaagtaatcccacattgagcacagtggaccatgtcaaatgataaagctggatatggaagctgtttcgaaaagaaatttccaatcattgcaggaaggcctctctctagagctaattggacttggcttccacttgtctcatactctgctatacatataggcatcacgttcaaagacactagatgtgcaccaaagctaccaaatccgcaaccgatgtccaacacagtccgtatctgcaagaaacggtagacaacttaaggaggtttcagtgaaaacagaactaacaatcaaatgataagaggaattagcaaaagaaggaaaaacgacttacaccagcttgaggaaactcagtatcgcttcctaatccaatcatctcagcaatttgaaaagcgtaatctttaaccccatcaaagatcaagccatcatccgagtgaaacgtaatttgattctcttcaagcaacattagcctgatgataaatattaacaatagattaagatggcacaacactagctgctgaaactgcataacaaaaggtgatctcagttaccttttagtcatagttcctgatgaaagaaactgatctttagtaatcttcacattcccagtccatatgatatctctaccaacaggccatctaagtggtatcttataatcccttggaggacgaactagacatctttcctcttctcttgcaaactcacaattccgatcactctctgttacgttataacaaggaacataattgtctctttctttaccacataaaggaaactcttttaaccgattaacccctaaggagaaaaaccttagatctagataatcaacagctgcttgttccttaaccctcccatagttactataaatgttgcttggcggtactcgcgtagttgaagttgtagaagaagaatctgaatttggtactaaaatggtaatgagagcaataacaccgagggttaagaaaagtaaaccactgatccttggtctaagaccaataactgaggcaaccttcatggtcccaggttcaaaacaagagcttttattgtaagcaaatctctacactatacaacaaccaactcctctttctgtccctaaaaggcttctcatttacctaaaactccaactaacatttacctaatcaagccatttattctcatgtataggcaacatttgtttcacattgaatcattacccaaaacttcaagaatattccaaatcaggaaagaccattagtcactgaacgccaaatccataactaactcgtaattgccaattacggtacaccaaatcaacaaaacctgcaaccaaatttctcagatcaaaaatcaaaactttttacacttttcagtattttgaacaatgaaatgcaaaaaggaaaattacttttctctacgtcaacgtatagttatcgtaagagaatcgagccaagaacgaacctcgtgattctgtggacaaaactcaatctcaaaatcctattagtgagatctcgaagaagatcagagatcagatgattcagatcgaaaggaaagagattgaagcaatgatcgacaacgaaaacaaaaaccaacaaaagggttttgagaagcagtaattatatttcgaaacaacaatggcgattggcgaagccaaagcagctcagtgatatgagtgtaagctttttctgctctgtgtctcttacttcgtcgttttatgattttatattatttgtatgaataaaagtaagctgcattcattaattattaaatgaacgaatgtcgacaaaaataaagcattagcgattaatgaagctgtttaaaataattaagaatatgattagcaaagataagaactgttgctgtatgttttcttttaattaccgtagtggttattttcaaatcaaagcatatttgttgtaaatgaataattttttatttgccgacatatttattataaattaatatacatccaaaaatgtcaaacgtgtcgttgtcttttgaaatttcaatgttagaaaaacaagaaaatacgacaaccaaaaaagaagaacaagaaaatatactatagccccaaaatatgtttgcattattataacgggcctattataacacatcaatttagccccaaaaaagaatttcgatgaagaagaacaagtcttgagttaagaaaatacataaccaaacctttaagaaataagatgtttttcacccaacaaatttcaagcgttattacctccaaactctctgttcaagtaatccacaaaacgtctctttgcactgtctgcatcagttggtaacggtggaccgcttagactcgattgacccatcaatttaacaaacgttcttcgaagcctccttagctccggtagcccaatcggtctgcagatttcaatcggaggtagttcattgccaagagtaactctgcttatagccgcgcccagtgattgttgttccacaatcgcgttgatgatttcttgtgtcgctctgtccaactcgtaaagagaatttgcttctgaaaatctagcagcctgagtggcaatacttggttggagaattctcacatcttgggttttggagtcaacagtcttggttagataagtcacagcctctaaaatcacaggagaggatttgtctataacttcacgagaagggtatagctcaaagagaggtgaatcccatcggtttcttctctcaggtttctcaaatcttctaaccagatcttcgaatataccatcgtcatatccatcttcacctctatcactccgttccttattccattgcctacaatgagcttcatctacatcacaataaacaacacaatacctaatcccagcagcacgagcgatacaccatagctcatatctgtaacctttgatactattcaaggaatctacaataacaatctcgcctgtcgaaactgatctatcaacatctgacctaagctttcctctcagattcttctcagcaggcatgttagcatagttttggttgcggtctagatgaaacgaagcctcatcgatgatcctaacactctgtttcgtttcagactctttcaatgtttcagctaaagttactgcagctattgacttaccactacaaggttgcccacaaatcacaactagcgccattggtttttaaacacactgcctacaaaaatggaatcaatacaagactatttcaattcaagctttaggtgcataagaacatcaacacataacaaacgaataagctttagattcacatataaaaactaaaattccagaaattcatatcataacggattcaatccccagaacaagttaaagtatcaaactttattagtacatacttccacaattatcaattccgacgaaaaatcaagctaataaaaacattaccagagaaaaattcgggagtgttgtcgacaggttgaagaaagcaaaagtgaaaatttgatttgggaatctagggcttatagattagaaccggtttaattcgcttggtccggtttgttcatatgaatatcaatttgtgtccggtttagaagatagatacgagccggatatgccaacacaagttgctaggcacgttgatggtatacggtgaggataatttggtaaattcaagtaattcaaagaatttaaataaagtacagctcattcgatgttgtctcggtatccgagttaaatccgggtttcaaaatcgggtctttcccctaatcgaaaagcacgaattttcaaccctagccgctttcgaaaattcccccaattttatttttttcccctaccaaattttcttcgaatttcagctcagatcccttccttcttccagatcgatcttcagatctattgtaattttcttcttcctcttgatttgatcttccaattgatacctgttttgttatcatccctttgttttggtcaaatctagggtttgagtcagatctggatctgataacaacagatctgatcaattgtttgtttttgatgttgatttccttcaaaagtatgaacggatccgttcttaatttcagtttcccccaattttattatccgatctgggctcgtaggttgggatgttctagggttcgtcagatctgtcaattaatcgagggcttttgtctgtattcatgataattaaccgattcattgattttcgattcttgatttcgcgatttaatccgtgaattgaaatctagggttagggttttcaaatttggggatttttttttttaatttacttaaattaattggggttaaatattttttctttatactctaatttaattactgaactggttaaatagacttatagttgtcacttgtcagtgtgagtgtggttcacacagataaccttcacgccaagtaactaatggctttggttctccttttacaggttttttaagaatgggtttcaagcgaacgtttgacgctgaagatgttcaagagctcaacgttaagaatggaagacagattagttactgtaataagctggccaaactagatgaaggagttccatatcgtctttcactggagaagccaggtgtcgtaggtaataataacaccttgtttcttgcagaggggttcacatgataaacttaagcagttcgcttaatgattatctgtctttatcatttagcaggatatgatataagtgatctctacgggtataaatgtgaggataacgttgacaaggggtttgagaccaatgcgcctttctcttggatcacaactggtttgtctgaggaggattctcagtctggagctacgattcagtctaccatttctcatgaatctcctgagtcagatataccttggagaccggtttgctctggggaagaagatggctattggtgtccgatttctcctagaaaaacggttccaatcgggtcagattaccaggctgatattcctgaatgtgtcaaggaagaggcaaatgatcagtcgggtcaaggtgttggttacgatgaagaacaagtgacagggaagtgcgtaattccaatgcctgactgtgaaaccgaggtctgcaagattggtaaaggaagaaaggaatgcatttgcctggataaaggttccatcagatgtgtacagcagcatattatggaaaacagggaagatttgtttgcaactattgggtacgacaggtgtctggatataggtctttgtgaaatgggggaggaagttgctgctagactaactgaagacgaggaagatctgtttcatgagattgtttactccaatccggtttcaatggaccgggatttctggaaacacctaaagtctgcgtttccttcacgaaccatgaaggaaattgtgagctattatttcaatgtctttatcctgcgaagacgagctatccagaaccgttctaaaagcctggatgttgatagtgatgatgatgagtggcaagtagagtatgacaacaccttttatggtgctgaaactccatcagatgacaaagccgaaaaaagcctctcaagagacgaaggagaagaggttaatgctaatgaagattcgtacatgtcctttgagaatcagtccaacgcaatctactctcgatgtccagttagaaatagagaagaatccaacattgggaattactggcgccactgcaatgatcttgtggatcagtcgtattcatttgatccttgtgattcaatactgccagatcattgttggactaagaacattgatctgcttccaacttcaaacattatcgacgaaatctttggtcaagaccacccatgggatgatttctccagagggaagtaaatgaagaattgtctcccatgtccattgctactctgctccaagttctgaatcttctgtatgtaaatgcattatttaagaaaatctcaagttggaagttttgagggaggcatgtcgtgtatagttttatggccgtggaaacttatgtgtttttgatactttaggttatttttatttactatttttagattttgttgtaagaagataaaaaaaattcttcaactgtttaataaactaacttttgttcatatcttttagtatacatatctcacttcctatatgcacaagcaaaacgaaattaatatgggtcttgacatttctccattaaacatgttaagacataagccttctctctgaaacagtgtttggttattacactcttaacggtcccaaaatagggagaagcataggacgttattacatatctctgtcacaggtttctatttttggataaccattttcttttttctaatccctgaagttttcttgattataatctttttttttctaatctttgagatttcacaggtaaccaacccatcaaattctatttcttcctgattcaatcttttttatcagtttaatcgataatcatcatcacctcattgttacatagatgtttgggtttttcaaatctccggggaacaataaacttcccaatgaatcatcaaacaacaaaggaggaacaatcactgcaggaagaaggacttcttcagaaccaatcctgataacaccagatttcgacgatgacgacaaatacaagaacggtttcaacgattctggtggtctgcagagccaaacgacagaagaattagaaaaatatgcagtttataaagctgaagaaacaaccaaaggtgttaataattgtcttaagatcgctgaagatataagatcagatggtgcaagaacgctcgaaatgttgcatcagcaaggtgaacaaatcaacaggactcatgaaatggctgttgatatggataaagatctcagtcgggtaaaactttttttaatttttcttactttcttcgatacgaaaatgtgaaattatatgttctgttttatggagcgttgataagaaaaaatgtttgtgagatcagggggagaagcttttgaacaacttaggaggaatgttttcaaagccatggaaaccaaagaagactaaaaatatcacaggacctatgatcacaccaggttttaaagcttccgagctcttgatattgattggataaaataatgttatgatgatcatgtatcttataatatcttagagaagggttgattcatacctagcccgttaataactcatataatctcaatccttattgtattcacgttgttaggactcttgatcatgtgtatggtggtcatgtttaatatagttatcgaaattttagataaaccgtcgaagaagagcgagaatcacaaggaagagcgggagaaacttggtttgggtgcaaaaggacgatcgagcagtcaaccagcattagatcaaccaacaaatgcgttgcagaaagttgaggtttgtgttctttttacaagtttttgcatcttatatgctttctttattaagaatacgtattaaaaggtgtatgtttaatgcagcaagagaaggcaaagcaagacgatggactttcagatttaagtgacatattgggtgatcttaagagcatggccgttgatatgggatctgagatcgacaagtcagataacacaaatacatactttcatacattttatgcttatgtttgtagaatacttactattgttgggggcaaatttgcaggcaaaacaaagctcttgatcatctcggcgacgatgttgatgagcttaactctcgtgttcaaggagctaatcaacgggcacgtcacttgctttccaaataagaaaacaccttccacaaaataccattgttcttatatgtatattatattgtatcattctctcttcttttttttacgtttgaacagttgtgattttcttctttattcattctttgctatgaaaattgtcaatattaacgcatttgattcaattttttttctcaagcttaaattttccagacaatattccatgagtgtttaatcctaatatattgaattgatccaatctaaatcaaaccgatccaaataaattaatctaatttaccttttgatattcaaaaagcatataaccaaacaaaaatagaaaacatcaaatccatactataattggttacacttatgctttggcataatcaacattccaatgctcgattgattagcctctacaattgttgaatgtatatatactctcatacactacataatgtaattacagcaaaacttcttcaatctgtaattacagcaaattcttcaaaaaaaaacacatgaatcatactatgtaacaagaatcactattattatagtgcacaaaaacttatgttatatatcttcccagctgtagttgtaaagaaacatggttcttaccgtgggaaaaaaaggatactatacaaatcgtgcctctaaataatagactcagttcaacattatgtgattatgtctcctcgttcttgactgggatccaacggtttccagacgaagatttctttccccgggtaaaaaacccgataatgaaccctaaaagcacacccacaaccatcaagcctgctcctttggcataccacaaagcattagattctgattttcccataagtgtagcagaagcaggaacggttttcagatttgggattttagtactctctttgctcccactgattactaccccagatgctaacatctcaacagtatcatgaacttcgccatcgtgattacccacaaaagaaacagtgagcttttctttgtttgcaactaaacgagtgtaaccaaactcacctgtacgatacattgattgttcaggctgagggaatataggaagatctggatggtttggtctaggctgccaaatcggttgccaatcttgaccagccataccgatcacaagatgaaccggatttccttgccactgtgtgccgcaagtgttgttgcttatgggacaaaacctttcgtatctatgaacatgtccccatagagcaagtgtgacattgtttttcacaaacaaaggttctagatgctcaaccatcttttgtcgaatcatagtgtctctaacctcgttgctcgtagtgtacattggtctatgtccttgcacaacaacaaacggtgttttcttcctgtctacagactctagatctcgctttatgaattcatattgactacctcctttaagaaaattcgtctctgtggagatataaacgaaatggaccgttcccatatcataagaataatataaattccttgtcggaggagctttcattcctgtagactctgaagaattcccaggcatgttaaacttcaagctatacggcacaccacattcgccaccaccatcgtttccataaatagaagctgcccaatcaggtttccacggctgagtagagaaatcatactcatggttaccaatgcaaacatggtaaggaactgtcgaggcaataggctcaacctgagcaaagaactcatcccatacccacgagtaaccacgagcataacttatatctccaatgtgtgaaatcatagctggcttatcaccaagagcttcaatgtcacggaggatccacttcactgtagatatgctctcatcttgtgtgcggataaatgtcgtgtatggtgtagcacaacccatatctccaaacatgaaagctacggtttcttctgcagtcacatctcgagcaatgtagctatggatctcactccatcccttagaatcactcccaacctaattcatagaatcataaatttgatcaatcaaaacatatttctcccaaatctatcatgcataagcttcaaaatcgagactttatattacctgataatagtatctaacgccatcattcaaattcttcatgacggtatcaaaaatccaaccaggatctctccaaccaatagtggaattcgccggcgaatcacacatgtgctctctctcgtacctcatcccacgcgccgccgcggaattacctaacaaatccttcgattcaccgtatctaacaaaacgttcttcaccatctccagctacaaacataacacgcatcgtgttaaccatatttgtgaacgacaaatggatctgctccggcataccaacaccggatccgaaagtcagctgctccgattcagctagaagatgtttagttcctggtaaaggattctgatcatgatccttatgtttcggatcaatctcggattcgctccaacggaagatccggaatgtgtaatttgatcggagattggttaaaggaagagaaatcgaaccgaaaccatctttccaagtggacgattcattgaggaatttgtaaccaataaagtgatcattaggagactccggcggcgagtagagtcctaaccaatcgagatctgacggagaatcgacaccggaccattgtatcacaacggaatcgccagatcgattgagagcattaggggaaattgaaatggtcgctttagaatcagcagaggaaacgaagacggagacgaagagaaggaggaagaaagagaaattaacgatcatggcgacggaggaacgtaagaataaatgttgccggaacaccggagatggaagatatataaacagttgtttaaacgacgacgtttctaccgttcgttatgattggttagctatttttaaaaccaatattgatttatgacgtatcaccttcttatatatgggcctatctaagcccaatattatgggccttactcggtctatttaatatattaaaatattgttggaatttgaactgtttttggttagtttagtttccactgagcttgctttcttccatggcgatgataaataattcttcttcttcctcacacacaatttcactttccgattttataaaattgattcttctcttcttcttaaacccatgaagagttcatgatttcttaagctcgcagcataatcgatggcgaatttgagtttgagcttgtatctaatcctccggatttacgctcttttgttgctgttcaatgtctccttcgctaaaacacttaaacgagacagtaagctcttccaaatttgtgatttttagtcgggtttttgctttttctgatttgagtttttggttttggcagtgaaagctttgaatgagataaagaaattggtgggatggagattggtatactcttgggttggagatgatccttgtggcgatggagttttgcctccgtggtctggagttacttgctctaaagttggcgattatcgtgtcgtcgtcaagctgtaatcttttgactctcattctcttaaagtttgaggctttgaattgatttttcacttaaaaatggtttgtgatcttttttgcagagaagtgtattcaatgtcgatagttgggaatttcccaaaggctataacgaagctcttagatctcactgttttgtaagtttcactgactttgcaatgttgttgaaaagttgaaaacttttgggttcttgttaattttgatggaaacaattttattgctgagtgtatgattgattgtttaaatgaatttggattatggttggcagggatatgcataataacaaattaacaggtcctattcctccagaaattgggcggcttaagcggcttatcacactgtaatactcttcaacttgaggaattcagtttggctacttgctttgtcttgatcttgtttggtttcgtaggaatttgaggtggaacaaacttcaacaggcactgcctcctgaaattggtggattgaagagtctaacttatctgtgagtaatcctagctcatttcaggatggttgaaggggttttcttgtggctctgtaacatgctcttaatattgcaggtacctgagttttaacaatttcaaaggagaaatccccaaagaacttgcaaatctccatgagctccagtacttacatattcaggagaatcattttactgggcgaattccagcagagctgggaacattacaaaaacttcgccacttgtaatctttgacattcagtgctctttattgtagatcatgatcaagcaactgacttcagatatgcttaatatctctgtcatgaatctgtagggatgctggcaacaataacttagtggggagtataagcgatctttttcgcattgaaggatgctttccagctcttagaaacctgtaagtgagtttaagagttagccatcaaaagtagtattttgtctaagctcacttttggctgtaggtttttaaacaataattacttgactggaggactcccaaacaagcttgcaaatctaacaaacctggagatcttgtgagtacttgatcacttcttttgatttattaacatcatttacatgttttttctctccctatcttatcttttttatgtttaggtacttatctttcaacaaaatgactggagcaatacccgctgcacttgccagtataccaagactaactaacttgtaggcctctctcctctactaaatacataactaagaactgatctgaaaaacgacctatatgttcttctgcatccttagagcatgttttgatttaacttcaggcacttggaccacaatctattcaatggaagtatacctgaagccttctacaagcatccaaacctaaaagatatgtatgttcataagctctctaaggtctcattgtgtaagacgatatataacacacatgttctaatttaattcttgatgggatgtatcatgtatgtggcaggtacatagaagggaatgctttcaaatcagacgtgaaggcgattggtgcacataaggtcctcgaactttctgacacagacttccttgtttagttatgtatagcacaactttgtttcatttacagataggaatttggcagtgttaactggttatttaagattcattttctctgttaaagcgagattgtagttgatgtgttttctgaatgtaaaagattccttatccatgtatgaaaattgaatataaaaggaatctggtttgttcttttcactgtcgttttgagaaagcaaagaaccaaaaagctgaagagggagaagaatagaaaaagtgttctttactttacctgcacatctttatgatccaaatatgaaacttgcatgcaaagcaataatctcaaaaacccttaaaaaaccaaaaccctcaaacacatcttctcaagtcctcccaccatattttagtttgaaaatggataccttaatcaagcagacaaggtaattcactaaatctccaaattcagattttctattcagccacatatacatatattgatgtaaaatgttgttatctttgtctcaggaggaagcatccagcttcccaggaaaaaattagagaggttggtagctcaactagagagaaaaaagtgtcagcaaggaagtctgtttcattcaaagaaggtgccacaaaattctgctctgttgttcttaatagcctatcaatctttgatgcttgattaatttcacattatcatatcatgtgtgttggtagataagaagaagccttcaaactggttacagaagcagttctcgaggcaaatgagtggccaaagttatgatcccatcggagaaatggatcatgcagctgcagttgcagccactgcctatgccatagccacttttgaagaaacttggctagagaactatcatgtaacggtttttaaaaacagagtttttgttagagtaaacattttctcgtaatttgagtttgttgtggtttgaaattgtaaaacaaaacagagtggccttgaacttggaccttcttcgtcaaggagcaagagcagaagtgaagaactgttgcctttagaggaaccaagaagcttatcaagaagattctcaggtgaggttacagaataactcaagatcagattttgttattcaactgaaaatgttttctgaaatcagtttacgtttttgtgttgacacagggcaactttcgtttatagattcagagacgaaagatcataaacctcctacactaaagtccccaatgagaaagtcatcttcggtaaaaaagactttctccatgaacttgatgggagaccacaccaaacagaatcaagattcagaggagaaacatgaaagacaaagaaaaccggtttctgaaccaccacggatacaaccaccgcttaggacacgatcagaacctcgtgctccaccgccacctcctcctcctcttctatcaccttcgcctctgcggcttccacctagggaaaccaaaaggcagagttctgagcatactagtcgaaaggatgattctacagctgatgcttgggaaaaagctgaactatctaagatcaaagcaaggtaagtagtctcaattcacaaaaacttatttatgtgtgttatttacactcacatatgtattacacaagcaggtatgagaagttaaacagaaagatagatttgtgggaagcgaagaaaagggaaaaagctcgaaggaagctggacatatctgaggttgataatataatgactttgtataatctaatctcataatcattatattataactggatgataacttgagttcattattctctaacatgttggtacatgaacagcagagcgaactagaacagaggagaaagagaggtttgcagagatttagagaagacacagaatacattgaacagattgctgctggagccagagctcaggcggagaaagacagacagagcaaagagttcaaggtgaaggagaaggccggtgttatccgtagtaccggtaaactccctggaaatgcatgctgtttctgacactaaaacaaaggatttctgataactgtagctagctatatgtatgtatgtgtgtgcgtgagagatgatatgggttttcattaaaaagaaagaagatcttgaaagccaaaagtgtatgttacagagagctctcaaagatactttcttaaaccaaaatcaacacaacactcaaaagacagcaaatatagcagcttcaatcacaacgtaaatagtaaaaaacatgatgcagttaatatggacttctcagtcactagatcaacagaaaaggtttcataatcacaatcattccattcttctagtgttaatttgatggacctcttgatttgttcctagaggcgttactgaaaggtatcataatcatcagcagatgtttcttttccagtaatttaagtgattaacagattccatagtttccaccaaaacttccagtgaaacacttgctaactagtgaagctattctaagaacataaataatgtcaaaattgggccactaatgttgtgagctcaataacttgcttttagtacactgtatcgagcttagttttcaagccccatctagtgttattttggttttgtctttataaaaagcttgtaatatacactaccgacaaaatcaagtgattggatttatcattatcacccatcaaagcttcgaccgacagtctttaatggaacacgataattccatggaagatatttatgtgatatttcgtatgaatcataatgaccacgtaagaaaatttgtgatcgagaagagaacaccacattggtcacactgtatgacaataactgatcactaataaatgtctttttcggcaacgacagaatgatatcaactttagttagcctatcatcaacgtccaaatataaacttttctaacatagagcaacattattaagacaaataatatgagtattaaactccataaactaaagtggtgctgtcaaaaaaaagaaaaacttaaaagtgattagagttttatttatttattaatattcatagtgataaagagatttttatctctttcaatttatgaaatgttttcataatattttgttgtcaaatatggagtattattttattttcaataacaaaaaattataaataaatgagtcgttttcacatttacgtctacaatcacaatgtatgttatttagaacaataattatagtggcttaaaaatcattaatgaaagtagataatagtatactttttctttttctttgtgtggccaacatatccattttctagtctatatatacacatatccatctcttaactcttccatccaaaaaaaacaaaacaaaaaattatattcaagagaaaaaggaaaaaatgaatttcatctccgatcaggtaaagaaactctcaagctcaacaccagaggagccagaccacaacaagccagtcgaaggaaccgaaacagctacaagaccagctaccaacgccgagctcatggcaagtgccaaggttgtagctgaagctgctcaagccgcagctcgtaacgaatcagacaaactcgacaagggtaaagtcgccggagcctctgctgatatcttagacgctgccgagaaatacggtaagttcgatgaaaagagtagcactggtcagtacctcgacaaggctgagaagtatctcaacgactacgagtcgtcacactccaccggtgctggtggtcctcctcctccgacgagtcaggctgagccagcaagtcagcctgagccggcggctaagaaagacgatgaagagtctggtggtgggcttggaggttatgccaagatggctcaaggtttcttgaagtgatttgatctttaattgttgttcatcattttcgtaataataaattaaataactagtatcgtttgtgactagtttatgttgcttcgtttatgtttatggggagtgacgagtgagtgtaataacttctggtgatcatgaatctaatccatctttgttgtgattatgcttaacttattggtgtttacaaaaccaaatcaaaaaatgatcatcctttggattcgaactcgttagattctatatcattaggtttctatgtaaaactagtgtttcatttcttaattcactcatttaatagtgaggtttctggtattgcaagtatgcaactacactactttaaaaatgtgtcaaaatacttaatcatacaacaacaagaaatggacttacagaaacagagagaatacatatatagaaattagttgcaattacaggacattggtgtatactaatcaagaatctgtcataaaacaaacgcttagagttatgaacaatcctctcagtcccacacaaaatctgattacaccgttcatgtctatattcaggcacaaaaccactcagttccacaagtgtcactcttatatctccccaaaacacagaatgacagaatctctttcaaccctaaacactgagttgtggaacataatatcagggaatcttcttccatagataagcctgtctttaaggaccattcacttcaggcacaccacttgaacacaacctatctttaaccacatgaatgtctccatctggtgaacctcctaaccaatcctcttcttcttactagtgagtgcttcaaactctttgatattgttccctcatgtagctgcattgcctgaaaatggctctgttgctccaattttcccttaccaaacatcaccaaagtttcaaagatgatgacgtgtcgtgacatgagatgattttaagtgttttaggcaaaaataaatataaaaagaggtcaaaggggataaaatatctttcttcatgtattcaccaagctaaaaaaaataaaattagtcgatgaaaaatctctatcacaaacggttctcttatattatatctctctctatacgaaaaagttttgaaaagaatcgtactagtacagtaatcatctcatggtcacaacaaacattcccaaagttcaatatcattgtcacgtgaaaggcgcgtgtgatgatgaacgttggttacttgtagttgcagttgtagttgaagctgaaggacatcgttgtcttctaggccttcttgtcatcttaccccaacctgcaaagcttctatcttctaaacacatttcagtttcaccattgttgctttgattgctcacatgttgttgaactgagggaggaggaggagctggagctggaaccggacaatagaccggttcagcagggattgttatggctcgtcgtggtcttcctcttgaaccggttttcttccttgttaaaccggttggagtccaagatcttcctgttgctctcatgaacccatcaaacatttgaatgtcttctgttacttcgtgtttcgaaagagacagaagtccagggagaatgtctctttggaagtctcgtctctgtttcccttttctcgcgtttcctcttctcggtctttggcttgtgaccagagcggttcctgtagtttcctccaatttgaggttttcaggaaccaatggcttaggcatatactcttgttctgagatatcaggtagttgcagggtcattgactcaaagtaatcaatatcttcgatagaacgcgattgattccttgaaaaagtatcgagctttttgtccagattctctttgtgagtatttactgtttctgcaaaccagtgaaggatgatggtttcagaaacttctgacgaagcaacaacttcaacctctctatctaggcaagctgaatagatggcaactattgtttctgctgctaatttttcaaactcaggcggtttctctagagttttttcctcaattgattttacttctgatcgcttttctccagagatattaccatcttcttcttcatcatcagactcaggaacagtttccaaatctatcataggagcctttgaattcagtcttgaactggcaggaacagagcaattttcgccttcatcatcactgcccaaaatgttcaaatcaatctgacacctattactagctgaaacccttgtctcagtctgttcctctgtttgctgatcttcatcccaaagaggatcacacggttcgttcatgtctagcatcctaacgtaatggactttacctttctctacattggattgatctttataagccaatccaggaatttccttgttagcatcgatcttctcagtcaccggattattggaacaagaaccagactttaacctctctagccacataatattctgaactttgtctcctgcctcatctctgatatccaatggtttcaaagaagaacttggaacagcatcattactcttcagactccatttcccatcagctaactcagagttacaaacagacttgggtttattaagccatggtaaagtagccaggtgttcttcatcctttctgacttcaacaacagaagtgtttgaaagtgtcacatttaagttcaaatccctcacaaacttcctctccgagctgtaatcacttcttcctccgttaggataattatagccagtcccagcgactttcgattttgatgaagtggaacactcattgtaaaacatattgtggtttaaccgactggaattcccgcaccctgagtcaaatctagaattgctttcaaactgcaatctatctccaagatacccttgcttctgagcattaccaatcagtgtatcagacatgtttagaaccggatatctctgagctgaagcaactttctgagggaatccaaagctaggattttgccaagaagagtgcaaatggttccaggagacagcagaatctggacgaatatatggatacaaggggcgctgttggtgagaagttaaacttgaatccaagtgattttgatgaatgacggcttcatgactactattggtatcagtatcagcctctaggtcaataaacgttctttctctccagacgactgccttacttggtggacctgaattaggtaaactcataactctttgtgaactgttcatcaaaacttgcataggctgagacaaagaatccagtggtttagccggttgaaaaaatggagcagcagacttgtgtgtgccattataatgatctgcagatggtagatttcaaatgataacatccgaaaaaaaagtaagaaacatgtgtgaccatataagaaaatccaagaatggcattcacaagttaatagatcatcttaccagttcttaggggttggtgtgaccaaacttttggtttgccgttcaaatctggctgcagagggataacaggaatatgctcccttacactacctgagtttagagattttccgtagtcacgaatatggccttgaaactccccattacgcaagtcacgggagtggccataagcaaattcgtttgcttcttgagcatcaactggttcatttaagtcagccaaaccattgcttctactagacccatagccaattctcacaccatctatgcgagattcagtcttcacatctccattaggaagctgactcgatgtactgcagaccctgtgatcctttaactcaacaacttcttcattgtcatcaatgtactcatcagctggaaggcaaagatctatcatctttcttctgattttcgtcggtctaacctcggacacttcaacacttttggaactagctccattttgccatgaaactggaccttgagaattgcttcctttcatgggagaatggccattatcctcaacaaccgacatggatggtctatcgtaaaccgagttcgccaaagggaagctagggattttccatttacgaacatcatcattcgtagcttgagaagaaagtgatgcctcaatctgaacccattctttattaaactgtttccttttcaattcatccatcatatccttctgtgtcctatatacccggtgaagttccaaaacctggttaaaaggatcaaaattcacaaaatacaatcaaccaaaagccagaggaactgataaaaaggtcacagagaaaatcttccactaagttaacctgtgtcttaaaaacagcttcgtgttcgagcattgtccttctcaccacatctttgtcaaacccaaatgtagtctgagacgtgaacccattattgtagcattgatcgttgtttgatgcagaggttttattgtcaccgtagaacaatggccatctacaaccgttattagattctttgttgagatctcccatagaatgatgatatccaccaaataagctttcacagtgcacctttgttcccattcctgcgcacaaatatccaaactttagtaccaaagactaactaacacaaatctgattcaatgacattgaaattggcaacaaaaaacaagcattaatcacatttcctccataaaaacaagaactttagctccatgagctctatctagttaaaacccattttgagagtagcttcaaattcatcaaaaagtcaaacacaaagcaattgtaaaagtgataacactatctatatataaagctaagggttttgactcaaaacagatgagttctaacgccgacgagtcaaaataggatcttgagtaatcaaagttggaaatctaaagttagataacaaagaatctgcaaaaatcttaggacaagattgtaccaaatagaaattaacaaaaaaaaaccaagctttaatctagggaaaattaagcagatgaaattgaaattaaaacagagtttataaaaatgagatttttatttttgttacctcaaacccacatcttcttatcgccaaccttgtctcaaaactttctcagaagaagaagcaatttataaaaaaaatctatgaatcaaaaggaaaaaagtaagaatttttttcgaatctctctactaaagggaagattgagaaacaaaaaaaataaaataaagtgttggggggagggtataagagttatagcgtaaacaccattaatggaaataattagatcgtcatcttcgatctagctgggccactcttctctctcaccaaactaacaaaaagaaaaattgaggagaggaaaaagaaatctgctttatatttagcttcttcttcttcttcttgtatgtgagggggacgatgatgataaagaaggtttatattataggagaagagaagagaagatccgaaaatcagaagaagagagaaaataaaaacaaaaaacgagggctttggcttttgtacagtgacatgaaataatttgtcaacatccggtcttctcttcccttttattctctgctttttcttcaccttttttagttctctcttcttcttcttttttttttaccatcttgtaataactaatactaatattcttccatttttattattaagtacatattattataggataaaaaacaggatttatcaattagtttgactcataaaattcttggttctattttttagggattaaatgatttttcaagataaattttattttatgcttaatttgttatatttatttaaatattttatgttacctttttagtttttagttttcattccatttgaaataaaataatctactacattgagcagtagaagtaaataattggtgaaatgtggaaatgggtatcttctaggttctcttcatctttctttcttgctttttaatgcttttaagagattatataattactatatttttggcaaatctagaagggataaaaaaaaaaaaaactatgatgatgtgtcatctttaaatgaaaaataatgaagcaatttaaaccaagatcatttaaataattacattttagtggttatcgacttatcgtaatgttggtgaatggtgatgctaccaattaaatatcgaaacgtgttagtttttgtaaataaattagatattttaaaaaggaaattacaaagtctttaaaagagtatttattaaaaaagtttattctagatggagtgttcttgagggttttcagattttgaaaagtatacaaataccatttttatataaaaagcaattaatgatatgagtcaaatgttgtttacaacgagtaatactctgtacatggtaacatcactatatcacatataataataacaataaaatacgaaaaaactgaaaatccaaaacgaacatgtcgtcactcgtcaaggataaatatggtaaatccttgccccattaattacgcatccttttgtttaacacattttttcggttaggcttaggcctcatttttttttttataattaggtctcatttagttcaaatatataaatttaaataaagttgtaactaaataaactattgacagcaaacaaaacgtgggtcccgccaaaaaatcttttctttttctatagctctatctcgttggctactgttaatgtggaatatttttgcgttttgatactgaggaattagaagtttagatttctattaaatattggattggtgattaaagttgatagctcggatattgatcggatccatgaggaataacaactatgaagttataaaattataagatcctataaaaaaattttaaaaagatctagtcattctacttctggtaatttgtaccacactaaatgcccaaaaaccttgtgatttttttctactttagacgtttaatatttatgaaagatgaatgtaatttaatccaagggtccaacacacatatattatataaatattaatgagaaatttggcccttaaaagtgtataattaccaccttttttccatcgacgtgaccaaaagtctttgcaaaactgacctgtaaatatatatgcacgaaaaaaaagtttaaataatttcggtattagacatatagaaaaaaggtttggtattcggtaaaaaaaaaaactaacatacggtcttcggctgttgtgtggcatagcatcattatgttttgtctcttatgtcacaaacccacatggttaattccgtattggtatattttttttaggtaccatcggaaattttctgaccatgtctcatttcttactgttcatttccaaaagcaatagtaaaatgcaagaaaaataaatccaactatactatatatgtcgtaaatctacattcattatctgatatcgtgatataatgtcagtacaactcttttccaacagagtttttacctattttaaaacgtttattaaaaaaattgtacgaaaatgaatctgaattataccaatcaataaagaaaataacttcatagaaatgttcgtatatttttataataaattgaacggtctgtattattatatacatgcatgtatcaatagttatattatgcttttatagggatcaagataagttgggataatagaccttaaaagtggtccaaagtatactttcggaaatgtcactctcatcagaaaaaaaaaaaaaaatcatcgagatttataaaactgagtattagtcaagggtcctatcatacttcttatggtatgtcccaccaaattgatttcattgcgaatcaaatagcaaaaataataattctattaaatatatttattttattttattttattttttttctatttttttttctattaaatatacacatgcaacttatgcaactatcaatttcctttagtattctacgaaacaaaattatatatttgttgtcacaaagtttaaaaattccaacgtattttaaatgaaaattatgatggtaaaaaaaatagaattattactctcacattagtcatttacgtaaattatcaatgaaaaatatctatcacttaatattaaaaaaaattgttattgaaattgaaaaagtaaactatttgccactcgtctcccactagctctcctccattctccttttaccaacaaaaaaaaaactgttttaaaataccctctcgtctttaacgtccatttattaaatctatatactagtagtattattttattgaatgcgaattaaataatttctcatgagttatgcataaagatagtccctttcgaaaagtttacatcaatttttgaaaagcatcaaaaacgtagacaaaccacactgtccacacaaaggaatgaatttaaacacttgattatcgtattatagcctgaaaaagtagattccatgaaaatctatagctaatcgagatctgttttaattcgttttttattttttaataccgagcaatgataattatagacaaacaaatttagagaaaattaaactccgaattaatcagaatgggttgtgcatttatacaaatcttgacgaaatttaaaattcaaatgtaaatgattccatctacataagaaaagaaaaaactacatacaaatcatcaatcttggactaattatgtgtgtttgatcaaataatatctccagtgacggattaaagaaacaaaaaaatcatttaaccaatccataacggtacaatggtcaatagcttaaataattttatcaaaaaaaattacaacaagattcaaattatcttgctaggataattaaccgtagttaggttagatggtatatatacatactagattttaacccgcggtataccgcgaaaacaatttattttttaaagttaatatacataaaagtttgcaaattatatctattataaaatatttttatttgatagtttacaattgttattaagtaacatcctgccaaacccgtcccgccaacccgtcccgtaaaaaaaacatttattttattaatgttgatcttatttatgatatgtttatgaattattgtctaaatattttgtaattttgtagtaattaaatgctatcaaatatctctgcggtttgatgtttataatcgaattgttatagtcatggaaaaaagcaatatcaaaaatgataattttgaagtaattaaatgatagtaaatattttggaagttttattttagtaactaatgtggagagattcagggaagattgttaaatgtcaaatatttatttcgaagattttttttttaattatcaaaaacaaacattaaaatctagtggcagccattgtaaataagtcataactacaagatttatttcacaaaatagctgcaaaaatgtatatatagattaagtgtctttcgtatattcaaaaattaggagtttcagtttagaaactctcggtttacactcagaaaatcattcaaacctattcaaatgtagattgaattattgaataggtatgtaattgattatttaattattgactgtttctccataaaaaaatactataaatacaactatgtattataactccctttttcccctggaataagactgatgataagcccattgacaaatacagattttgggcctaaatcaccccaaaaaaaaagaaaagaaacaacctctccattgcctttgtagcaatcaaatttcctaataagggcataattataatgatacacaattagtctacacaaacgagtgagacattgatggtgtaactcgtgttctacgaagtgtgactatttacatttgttcagcttgaagcttatttaatcccttttatttttcttgtcgtgaaaatctaatcacagtatcacactacgtttttttgtttgtcccagcagttaataaacacacacaaaaaaagcttcgatatttgggaatttttgtagttactagacatttttacaaattattacttaatatgttcatattattaatttcgttatggtttctttatttaattaaatcgttcaccggcttgtgtacgaatgatacttgatgctataacttggaatctgaaagagccaatcaccgaattttgtcgacagggacgagagaaaaagggagaaaaagatgctctttttctcgaagggtaatttggtaaattaataaatggcagatgatgtaattaacgtggaagttaggtggttttatttgtctgaaaaaatgtaagttcgaaacggaatcctagattcgtggacacagatcgttatggggattagagagagaaacaaatgttttctttttgtctccagaaaataagagagccatgagttactctcatatcttataccctttttacccttctatctagttgtagattttttttaatcatttctttaattattaattgcgttaaattaattattgttggaatagaaatattattttgcaatttgcaccaaaaaaatattattgtgcaatttacaccaaattagcaaaataaaataaaattatagaccaaactaaataaattttggtgctaaggaataccaacttatgtaggttgtcctttgaatagcctgacctatggttgctggttgcctggatcctatatatgcctagtatgtatgcatgaaagcgtgtacattgtaacaaaaagatacatgtattttatttattagaatttgagaaaataaattgcaagtttagataaataaaattaactaaaacgaattataaaagcctaattaacgagcaaattattcagtgtttatgatatatgatccaaaaatcaacatgcataaaatgttttttatttactagaaattgttgtatgatgtgattggaaaatggacgtattaattgttttgtagtatctacggttctttatgaaacattttgttccaatacttttttttttttggaaaattttgttccaatggtaagtggacaccatatccagagttcaaagttccttttcaacaatctctcctcttttttttaatgttctttcaaaaaattgttttaagaattttacatgttgtaaaaaaaagataattaaagatacaatccataatttactagaatacaattacaacacgtagttatttcaattatcatcggatatctatctacacagctctatttcatagattttccataaatatcatttaatacacgtagttacattttttgtttgtcttatacacgcactttctagaatcaaacaaatgctttcagaaaactttagtgattaattgatcgtagccaaattcatctagcaaattagtaattacagttataataccattattttgaatagtcattatttgttgaaaatatctttaataaattttgttaacttggagtttataaattataatcataaacgttgtttcgatttttgttacagttttctaacaatgttaaattttccagtatgtgtgtgaccctacaaaaatgggaatcaacaagaatcaaaagggcccatcaaagtctccaccaccaatcacctgtgaccgctctcacacttaacgatgatctttgttggattaacggcgcgtgtaatcttgatcccatcacgtgaactttcacgctcatagaccccactgttccaacctcagcaccatcagtcctattcgtcaagaagatttaaggccatacgtaacaaaagcaagctgagagaaacacatcctgtcaataatccttgagctggactctaaaattaggcccatgaaacttaatgacagccaaaaatattgtttgcattatgaattaattatggatttgccactttttttatggcatttgtagactttgaatttttttgaatagtttgtggattttgttttttttcctgattacaaaagtatgatttaacatgcattttatttgttatgtttgggtttagtcggttgtggttgtggttgttcttacaatttagttttttgaataaagtacatatttttaccaaaaacaaaatcttaaatacgtacattttgaaatgttaaaaatgacatattcataaaattttagtaaaaatgatgattttaaaagatctcgatgaaaaatgacaaaaccaacattaatcgcttacattattcgtaaaatttatcatgttttcaaagacatgaaaacattgatctctatatgaccggagaaaacattgatctctcatatcagatcacgtgatcgaacggtggagaaacgctctctacaataaggctttaaagcccataaaacccttaaatatatcaaagcccaaaagaaacgccttttgcgctttcccgatcgtggtcaacttcctctgttaccaaaaaatctgtaccgcaaaatcctcgtcgaagctcgctgctgcaaccatgtccgacgaggagcatcactttgagtccagtgacgccggagcgtccaaaacctaccctcaacaagctggaaccatccgtaagaatggttacatcgtcatcaaaaatcgtccctgcaaggtttcgttctcaaacatttctccactctcttcctctgatcttattagatctgttcattacttagattcctcagattcttttttttgtcacctccacgatgttcgactgatatttgttcttgtcatcattgttaaattcacattttattgcacttttgttttagcgaaattattaaattggtcatcttcagttttgttcgattagataagttttaggattttttcttacacaagttactggatcagctgctaaatgtcattttgtgtcgcaggttgttgaggtttcaacctcgaagactggcaagcatggtcatgctaaatgtcattttgtagctattgatatcttcaccagcaagaaactcgaagatattgttccttcttcccacaattgtgatgtatgtgaaaaaagctcctttgatcactttcatttcttgtttgtttctttcaagtcccatttgagattttgtttttgttgaattgggtttcaggttcctcatgtcaaccgtactgattatcagctgattgacatttctgaagatggatatgtatgtgttcttaaatagcacttgttcctttatatggtttagttacttgttctgttttgtaatcattttgcaggtcagtttgttgactgataacggtagtaccaaggatgaccttaagctccctaatgatgacactctgctccaacaggttaagttttgcatgttcatcacattaaatgttgctagttaattaaaatcaactctatgtcgatttctgaaaatggaagaaaaagtgcagagtaatgagtgacctgattgtgttaatgaaacagatcaagagtgggtttgatgatggaaaagatctagtggtgagtgtgatgtcagctatgggagaggaacagatcaatgctcttaaggacatcggtcccaagtgagactaacaaagcctcccctttgttatgagattcttcttcttcttctgtaggcttccattactcatcggagattatcttgtttttgggtgactcctattttggatatttaaacttttgttaataatgccatcttcttcaaccttttccttctagatggtttttatacttcttctaattgattgattctttatggttgtccaagtgtcaaagtgttccacccatatgattctaaccttttgatgagcgaagtctttactcgtgcgttatgtagagacgtagaagcaataccacaaaagagtataattatagatatatgctaacaaaactcaaaagttaagatcagtttagtattcaaaattgaacagtaaaaggttaaaaaaaatatgtatacttatgaaaataactaaattcatagataatcttttaaaattcagagtttctttttcttatatcaaattcaaaatgaaaacacaaactaaaataaacaacgacacatatcataaggtcttttatattttgtattagatcaaaactattattgcaatcacatttcttgtggtaataaatgaaaggaattctactcctaaagccaacgtgtgtcccacacaaagtaagaagaatgtttatattatcttttgctcttgcaaagtcaaatgtatcttcaaaaagtcatgttgctagttttcttttattcccctcacgtcatcacggttcctcctcctattacaaatatacacacccaaaaagtccactaacatgaaatgctaaagttaattttagaaatccattgctttcacgtgaaaaaaaaaactattacagaaataacatgtatttatacagtttactaatagtcatcaactcatcatatatggtataaatatttgtcgaaaaacagctctcatgatatgtgtaggcttatattcgacagcccattaagacacaaaatgggccttttaaaaggaatgtcagttgtcaatatctgattcgtacaacgtggagtagctgtggccttgtccggttgtctctctctgcctcttcgctccaggttcaccgtacaataataacaaagaccgacgcttttgtaaaagtgaaacctaaattgataaccaaataatttgatcaatttggtacaacttttgttttgactgatgttcagattttcttttcttcttaattggtatagttttattttctttttaaaatgtttggatttgtaattcatttagcattccattctaataagatttatctttttctttttaattatctctttacatgatactactatactatttgtttaaacaaaaaatatagatatacatgcatattccatatttaattaatgggatcgaaattcaacattaaattaatgtacctgtaaaaaattaaatgtacaaaacgacagaaaaactcaaaaaagcagattttaaacgttatattttccaattttctactgcctcctgaaaaattggatttggacatgtctgaacattactcaaaataaataaatttagctagtttttgaaataagaaaacatagtaagtaccgttttgaaggagaaaaaacaaataaagtactttttacacacgaaaaaaaagaaagtaaaggaaagagcttgtttcacatatatctgcagcgtggactttctctactgcgaacccaaaaagttttttaatctttttatgtttccagatccgttttaagaccagaagtacaaaaaaaaaaaagaaactcgaaatctccattaaaagagcctatcgataataaaaagaaaaacaaaacggcaaaaaagtgaagcgaaacacgacacggattcacacaatactcagatatatacaaaaaggattttagattttgattcagaaccaaaaataaaaaaaggaacttttttatttctttgtttgattttttgggttgttggttttttttttgtttgttaattttggggatcgatgtcggaaaaggaagaagctccgtcgacatcgaagtccaccggagctccgtcgcgtccgactttatctcttcctccacggccgtttagtgagatgttctttaacggtggcgttggattcagtcctggtccgatgactctggtctctaatatgttccctgattccgatgagtttaggtctttctctcagcttctcgctggagccatgtcttctccagcgactgcagctgctgctgctgctgctgcgacggctagtgattaccagagacttggtgaagggactaatagctctagtggtgatgttgacccgagattcaagcaaaacagaccaaccggtttgatgatttctcaatctcaatcgccgtcgatgttcaccgtaccgcctggtttaagtccagctatgttgctcgattcaccaagctttttgggtcttttctctcccgttcaggtttttagattcatcaacacaaatttctatcttttttttttttggttaaaaatttgaaaatctatttatggaaactgtatgtttgtgtcttttctttgttgagctgtttcttgtttttgttttgttggctgcttagggaaaaaataacacgttgttgttaggtgttagcaaatctaggtttattccaacaaattgtagattttgtaaccattttgctggtatcatcttaggtcaaaattggagattaggattgagttagggcttattagagatttgagaatttctcctcaaggaaggaactttgcaactcaactgtgttggaaaggtaggaactttcagacagaacaaaaggagattgtggatcaaatactcgtagagatttgggtttgttcaaggtttttatagaaatcctcaggaagatttcttggtgccacatccgaaaaatcctgttcttatgaccttatatgttttgattatggaactctgttttctttagtagaaattgttcctttagacaggcctttgctatattctcttttgatagggttgtcttgtttaaggtctctggctctgctttatcttgactctgaatctgttgaatctgtctttacctattttgatgtgtgctttgatttgttttagcggttcttgacctgatatgtaacattgtgcagggatcatatggaatgacacatcagcaagctctagctcaagtcactgctcaagcagttcaagccaatgccaatatgcaaccacaaacagagtaccctcctccctctcaagttcaatcattttcatcgggtcaagcgcagatcccgacctcggctccactaccagctcaaagagaaacctcagatgtaaccatcatagagcacaggtcacaacagcctctaaatgttgacaaaccagctgatgatggctataactggcgaaaatatgggcaaaagcaagttaaaggtagcgagtttccacgaagctattacaagtgtactaatccaggatgtcctgtcaagaagaaggttgagagatctcttgatggacaagtaacggagattatctacaaaggtcagcacaatcatgaacctcctcaaaacactaagcgaggtaacaaagataacaccgcgaatataaatgggagttcgataaataacaatcgcgggagttctgaattgggggcatcacagtttcaaactaatagctccaacaagactaagagagagcaacatgaagcagtaagtcaagctacgacaacagagcacttgtctgaggcaagtgacggtgaagaagttggtaatggagaaactgatgtgagagagaaagatgagaatgagcctgatcccaagagaaggtaaagttataagctctgttgatggttgatgataatccatatttttcgttttttttgatcagagagatgtttgaatgtgcagaagtacagaagttcggatttcagaaccagctcctgctgcttcacatagaactgtgacagagcctagaattattgtccaaacgacgagtgaagttgatcttctagatgatggatataggtggcgtaaatatggacagaaagttgtcaaagggaatccttatccgaggtaaaacacgttacaacattggttggtctagctattacactctttgaatggcggattctagtgatcgatatatttttatgtattgaaacattcttgtttaatgttctctcttgatccttaggagctactacaagtgcacaacaccaggatgtggtgtgaggaaacatgtagagagagcagcaacagatccaaaagctgtagtaacaacatatgaaggaaaacataaccatgaccttcccgctgctaaatcaagcagccatgccgctgcagcggcacagttaaggccagataatcgacctggcggtttggctaacttaaatcaacagcagcagcaacagcccgttgcgcggctaaggcttaaagaagagcaaacaacttgagagaagaaaactcttgaccgtttttcattacaaaagctttcaaattccactcacacacttgtctgaaaaatctagcagtttgcaggaaagaaacagcttcaagaggttgtagttcttctatgttctggtgtaaaacttaaaagctttttagggttttcagatttctgtttactaatactgtatgtgaattcttttgtacatgaggaagaaaattacagggggatattttgtgttgtatcttttgtgttattgtttcagtaaaagataggtcttacattttgtgtatgaaaatgaaagtatttgttgtaatatcaaacttttttcttttgtttattattacactattataatacataatggcctatgacccaaattttcttgctatttgttcatctttcgtagtcagtcattggttaatgaaatatacagagcaattgttgttttgttatgggttttgaataatggagtgaagaaattatgacatttgtacaaatgaatctttttcatgagattaataaattcccgagcaaatcttgtttccaaaaaagacaattgaattttatcttcttcttttgtctctcaacaatacaaatatgtgaaaacgttctctgtttttgctttttgtctttttttgctctccccattgattgattgattgatctttgtctctctctctgtgttattatgtagtgatcacttcattgtttgttagttaaaagcgttggaatttgtccgtgattcacgaaatcaatcttgttcagcctgacacaacacagtacttgctctggaagttcctctggtgattgagcctgtgtcagaaagaaacaaaatgttttacttgagctacactctaacaaagaatgacctactactaccaaccaaaagtttgggagatttttcaagtacctgaattgttaatcccaaatcaagaatcccgttcttgatacgatccctgaaagattcgagtcctttcctcgaaatgtaactgaatctgtgtatatccaaatctatctcaaagtagtttggtccctatccaaatgatcaataacattaaccacaaggctatggaactgaattatctggtgtatcattgaaaactaaagaaagatctgtatttctaacctgaaagaaatcgtgttgcggacgagaaagaaccggtctatcgttgtaagctgtgataagttttctctcagtagaacttagctggaaatcctcaggatttaccaaacctgccatgatctttaacctctctctgaatggaactgttgattctcttgtgaatccttttactttctccatttcatcttccatgaatctctgcaaaaaccatatctctctgtaaagaaacataacaagttttttataaaagagctataggatctatcatcatcataccttgatggtttctttaaagtgagatgagatttctttgtgatagttctcattgcgtttgaagtacaatactaagctaagtccttcaccatcatagtcaccaaacatagaggttggatacattggaagctggatgttcactatcaaaagattggggatatcgcagacttgtgatgatgccggtttcaaattaggaagctcaatgtgttgagcaatgtggttgatctttttaggacatgcaaaaaggtcgactccaattggtatgtaaggactacaatttggtgcaggacacttttgcttgtctctgcagatgattttaaacaatacaattagatttgattacatacaaagaatgtttgtcttactttcttgatatgaaaatttgaatcctaacctgaagaaattcaatccacggagcttgaaactcgacggagaaacttctgaccaacttccttgactggtcatcttctctcctaaagaacgttgaatcatagaaccggcttttggacggtacaagagcttctcagctgaagctgatacacatttagagataaaatcattcagaaagaaagttataaagattcaaaacttataaagactttttgatcatttctttcttcttacagaattcagatggtgttgatttgctatcaatagatgttcttctcacagaaaccataacaacttttgatgatttctttctgtgatcttgatgatcttcacaagtagtagtcttgaaggtttcatggtgagattcatcagccacttggtttctctttatactaacctcattcttgctcgagtaagtctcacctttgtttccatctattttcaggtaactttcgtagaattcttcatactgaatcacttgtcccattgcagaagcatttgcatctacaaaaaaacaagatcatgttttcagacacaatcatgcacaaaccaatgtctctagttttatatcaagcaaaatttgtttaccttcgaagacactactatttgaaccatcatcagaatcagaatcgatgtagctaaaggaatcataccaagcctcctcatgtgaaattcctaaaacagagaaaaaaataataatgagattcaagaaaacacaatttaggaagaagaaaaaaacagaatcaagatatagagaatgttgcttacggtttccatcgatttggctgcagttccattgaagctgagttaaatggaagttagcattagacatctcagctctcttacacatcatcttggctgcacaattgtcgaaatcaagatgaacatattcgctcaccgcaaaatccctaacactcgcattactcatgcgtttcataggaacatcgggcatagaagccgatattttggaccgacatttgccagatctgccgcgtttctgcttcttctgttgaagcttgttactgagttttctctgagaagaaacacagccacccatattttgttttggagaatttctaactatttcattcaccaaacgaaatcaaatttttgtaaggaacctgtatcaagacataaaacaagaataagaccattaccaagatatacatgatcttgtctagaaatcaaaaatcagatgccaaaaaagatagactatttttaccttacaatctttcagagaggtcacctgtaaaaagttaagtttacataaaagaatgcatcaacattcataacaatgagatgttgtttcatgtatcttcaagacccttcatataagaaaaaaaatcgaatgaggtttattttcttaaatttgttgcttacttgggtctgaaattttgaatacttaaataaacaaattaaacatcgataacatcaaacgcaacaaatgcagccatttgaattttttatgaaacgtgaaagataagaaacaaaatcttgaaaacacaaccaagtattgtttttaacgaaaactctaatcatttgttaaccatgaaatcaagaaaactaaccaggagaagaagaagaacagaagaaggcgaagaaaggaggaagaaagaggattctctatgaaaatcctctgtttcgtctttcttctgctctctgcctctatttgtttctctgtcttttcgtgtcaataacaataataaaacagaaacagaaagagagagatcttcttaagagaaatattaagaaccgcaccactgttttctttagtaacccgttttcttcggatcattcccaaaagtcttctcccccgttaaattctctctctttaatttctctgtttttaattactaatattttattttgtccattttaatgattattattattacagagaaacagtaaattagtgttattggggatgtgattgacccatcaagttcgcggggtaaagaagaaacagcgttttaattacagaacagacgagttatttacttcacgtgtcgccatttatgggaaacaatcttcttattttcttaacctctttaataccttgtcttgtgtcttcttcgtcctcatcaatgttaaatccattcatttacaaaacatgtttaccctatcttccaacataaaacaaaaaaaaggtaaaaagaaaacaattttttccttctaaattagagtttttaatattcaagttcaataaatttagttagagtctataagttaacaatcagctagacgtaactcttaacaaaaaataatagttccatatagaaagaaattgatgatagaaattgacactgaattgacattaaagaaataaaaaaaaagagattcgtatctgaagttctcgaggatcacatgcttcatgtattcgttatcgtattcataatttaaccattgtatttctatattagtatcatgaatataatttaaccatcatctcaacaaaaataaaattagccaagtaatgcatggtatatacagtatactatacacaataactttttttatcaacgtaaaaattatggagggtttctgtgaatggacctagatcatagtagtgggatccttagtttcgcatagacaacatttggtacctcgtggataacaaatggtgatttatgttcaatactatcttgttatagtgatggagaagttatgttattatgtcgttgtacaatacagtttgttatttatttttaatatgtcatcattcataatagattgattgtttatttttgcatcaactaaagccgtctaagaataaaataatctacttaaaaaaaatatagctaaaaagtgaataaaagctattagttagttcaaagtccttttcgtaggagattaattagtccacggagatatattctaatcattgattctttagttttgttcaatagttttcagtattttttttatataatcttctggttgaagctatagctattgtatgaaagagacttagctgattctctatgtgtttgtggaacacaatttatttttaaaaactatatagtccaacgaaaactatttaaagtaggtgagttgctcattttaaattatgtttaggactgccaaaaatttagactaattccatgcactttgatttctatgttttcatcttatttgctattagagatttattacatgttacttctgattaaattagatggtaacaagcttttatatcttaaaattccatttgcacattttccattgcatccatttctaattatacatatagtatatattcttttagtgaaaaatgacgttatcggatggaaaaagtctcaacaattaatgggttctgtttcttttttcttttttttcaactgtgttattgacggctcatattttatagaatggatttttactttcggacaaaaaagaaatgaggatttatggccatgattttctggatttattcaaccatttccaagaaaaagagagattattcaactaatatactgatgatatttctagaattaataagaagctagctaattttaataatgcaatatgtaaagaattttatgtatcaaacgttaaattccgaaaagacctattcaaccatttccgagaaacaaaaactagtcagcacaacaaattagtcacactacacatgtcctaaacaatttgttcatgtaagaatttaaactttttaatgaaaatatttagtatcatgaaagcatgaagaaaaaaagatttttgggtaagaaaataatgaaggccgaaaaatgatcttgttctttttttttcccccaattttatggtattattttgatttccagacgtttacgaatgtttaaatttaatctcctttgaagttgattctcccgagtcccgattataagaagaaaacttgttagaagcgaggccaccatttctcacccaaacgatacaaaattaggttaggtaagataacatttgagtagatctagtttttccaagcaaaccaggtctagtttaataatcgtaattttgaaatactaaaagatcggattaaatttgacaaagtgtattgctcctttttataaatatagtatataactacgatatgttttgttaaggttgatgagaccctgataatatgagtatatgactacagtctagctacaagcctacaagtttctatatgaaagaactagtacaataataactgattaactgtactgtacgatattcaaaagaacttaattgtttttaattagaagaggaagatgagattggcgcacaaaaaaaaaagaaaaagaggaagaagatgagatagtaattggaagctttaaatcccaattaagagaggctacagctgtaatcattcgaaacgtatttacttatatgatgtcaccgtaataaaatttcttgtaataataactttctcatttatctagttggagtcacaatgtctacttgaaccactggaataaacaaaaaaacttcacttgaaaaagtaataaatttgatgacagctctttaactataccaaacggattcatactaacttcaacttctttgatcaattattccaaaccctaaattctagacctaaaatcaaactaaatttggtaacacatcaatttaatactctattagaagaaaactaaactataaatatcgattatgtatttgatcctactatattatttgggaagtacattttaaatgtaaccttaatttttgtaagtaattatatagatatgccattagaaataaaattttaaagagtaaattaatttatctctttaaggattaaaaagtcaaatactaatttaattaaaaaacaaaatacattattattttccacaaataataaccaatcaaaatcaacatataagatttgatatctaaattttaattaatttaatttaattaaaaaacaaaatacattattaatttccaaaaaagtaaccaattaaaatcaacaaattatatttgatatctaaattatcatattaattttttattaattattatagttcacttctcatctttatatgattttatttttgcggaaaaataatatcatcattataaaaaaagaattagagttattttgcatatgccacaatttgaatttttaaaaacgaatataaactgttcaatacatgaaaaaatattataacgggtgaaaaatagatttaagaaaactttctactgagtaacgggtcataatttgaaatatttatattcaatttcatacatattatattgaaaatttataatcttatatattacaataattaataacatattagatgtgattcaatttttaataaaagctggaaaatcctagaattgacggtttagatcgatattaatacaagatggaatactacaagtgaaactcttaaattaactatcaaactacaagtgtataatcttaaacactaaacaatatagataatatcaacaaaacatacacatgagatcaattaaattttaatcacataaaaattagcacaaaaaaaagtattcaacaattaaatttttatcaaatctctgtgttatataagttttgatactatattcgaataatgtaatataccttttcaatttgtattctttaactaatttaatctaactaatatatttgctaatcttatacctatcaaaaccgactatcgtttcttatctctatagtatttttgcaagacttttttggtggatttggataaaagtgtattcgggtcatatggtacattctcctattaaataaatatggtgcactccgatgttattagctaaaatgtttagaatataattcagagtcatatcattaataaaattaatattaataaaataaatgactttttggcaagacgaatttggagggacgggtttttgaatcaacattaataaaaaagtaaaatataattaatccaccgttttaatacgggttaaatctttaattaattattttttaagaccactaatattaaacatatcaaatcatcctaatttagaaaagattatataaaaccaaaaatgttatgtggtatgtataatattactatatataaaattaaacaataaaatataaatgtattagagaatgatacaatgtgcaaaacttttatatataaaaaataattcttaaattttaaaaattactactttaaaaaaaaaatcacgggacgggtaaaaaatttacagaacgggttttattttggaattgggttatatggtggatgtatttgaatcaatatttataaaattttaaaatattattaatatgctgtttaagtagggattaaaacttcagttttttaacaattatctcatgaattcgtggtatagtgttatttaataacaattataaactgtaaaataaaaatattttataaaaataaaatttgcaagttttaatatatattacttttaaaaaataaatcgtcccgcagtatatcacatgttaaaatctagtttatatatcattttgatacttttttaaaacagagaccggtgcagtttagtagttacgtggataccaaatatatcatacaagttaatatagaaattaagaatcagatacgacgttccaaacaaatacttaaacgtgtgtagaccttaggaaacattgccaactggcaactttgtattatactaccaaaatctagatatctataaatctagaggtgtgtatgataatgaatattgaatagtatatgtttgatattcaatgttatactattcagatatcaaatacctggatgtatatatgtcaactgaaaacaaatataattctcttagtatgaagactatttacatctaaatcatatgaataactaattaactttttcttcttttttttgttaattttcaaaaactatgtcatttgttatgtattacataatcacttaagatatatataaaaaaaaatgccctaacgaatttcgtccacaacatatgaatcgagctagctatttagatatttctattatgcatatgatgaatcatagattgataaacatattatatattttttgaaaaatggtagttcaatttcttttgacactaattaaacatgaaagagacatgtccttcgggtgtaagaatacctaaacagacaaagcagagagtcataaatatcttatgattataaatggaagagacatataaaaaatgtttattgtgtactaatcccttatatagtttatgttggacaactccatattaatttaggtttacttatatttcggttatgaaactctaaaaagtattgtctcccactatccattaggacaaactggcaaaggcaaccacctcaacaacatcaaagaacaagaattattcaactgttctacaaaactatactagtactattacagttgtttgtagcatatacttttccaaatagaattttatacgattttcttttccatattttttgaaaatgacaagtgatatgatttgagaaaaaacaaaaaaaaaaaacaaatttatacagtgaggcctgcaagaccataaaacaaactaaagccgttcattaaggttccattaattgggcctatatttttctcgttatattatgagcctgttataggcccattagtaataatttatcgggttatgaagtaaattttcagataattaagggtctcaagtataaatatcttaaataacagacccatctacctggaaatatgagtatttgggcagagaggggtgttttcgtaaattcaagtacatactttatttttatttttttgctttcttcgccttttgctccctcctcgagaatttccgatcgtgctttcctcaaaagcatttctgtttctcgtcgtcggagcccgacgacagatctctgaatcgctggagaaacagtaagtaaatctacagatctcgtttcttcgaacttcttcttcgtatactatttgtttgtatcgttccttcgttgtgcattgatgttcttaatgattactagaatctaagtcagaagttacctctatttgttcttcttctatatttgaactagatttcgttctagcgtcgaacaaactcctcgttttctttgattcgcattgctggtgattttcctgaatttcgagatttagcgagacgtgtctcgagttctcttgtgttgacgggatttttcttatctggagaactgataatagtttcatgacactgtcactggtctgttgaattgtagtttaaacttattccatcggatatagtgactcttaactctataagttgctgattttgtagatgggtttagtgttatcaggtttattgatgtaacaacgagtttacaaactttgctatttagggatctgtaggaattcgtttttttgggggctcaaattgttggaaatagttgcttagctattcacaatctaaatgtgatttgggaaatctgcaacatatgttattactatggaagaggttactctatatagttactaaattatcagcatggtttctgaccattatagaattctttgcttgtggtttatttgtttgaatcaaagtggtttcattcagagacagcgttgtagattttgattatctctgtaatgtatgatgtgaaaagttacgccactttctatcttattagctcttgaaatgcatctattatctgttttaaaataagattttttaaatttaatttgtttttttttgccagtaatgattgagtttggcctctatctgtgaagggtatatgctccggctgtatctactttatattctgccaggaagattgtgagcattgaagtgccttgggctctggctgaagatttgagcagattaaatgggtcgcctaaagttgcattctggaatcaaggccattgaggaagaacctgaggactttgagtgtactgattcaagtaatacaaccactttagcatgcatgattgatacggaaattgctgctgttttagcggttatgagaagaaatgtaagatggggaggtcgatacatgtctggtgatgatcaactagaacactcgttgattcagtcacttaaagctcttagaaaacaggtgttctcatggaaccagccgtggcatacaattagtcccatgttgtatcttcagccctttcttgatgtgatacggtcagatgaaactggagcaccaataaccagcattgctttgtcatcagtttacaagatcttaaacctgaatgtaattgatcaaaatactgcgaatattgaagacgctatgcacttggtagttgattctgtgacaagctgtcgatttgaggtgacagatcctgcatcagaagaggttgtgctaatgaagatacttcaggttcttctagcatgtatgaaaaataaagcatcagttatgctaagcaatcagcatgtatgcactgtcgtcaacacttgttttcgtgttgtccaccaagcaggaatgaaaggtgagttattgcaacgagtagctcgccacacgatgcatgaattagtgaggtgtatcttctcgcatctcccagatgttgaaagaacagaaactacacttgtcaacagagctggtagcatcaaacaagaggtatggtattggggtccttgttatttcctttctagttggttacaagtcagtttggtcctgtaggatgttctgagattaaataaaaacatgatactacagtagctaggttcctttacttgcaacctagaaaattgaaaaagcagagaaactatttaaatagaaatgataaagagccatagatttggcgatttgttaaatataggtctgcaacttactcttgaacttcaaaattatgtagacgcttgttttcattcagataggaaaatatatttttcctagtgcgagtcaaagatcactactagagaatttagaccagaaactctgtagatagtgaataattaatttcatacggaataattttcccaacaaatgctggattttaagccttcttcccttgattcatatatcactttattgtacaataattagtgatggtgttttgcatggtcgcagaaagctggagtagacagtgattatgccattgtgagtaaaccagtcgaggatggaaatgctaattccgagtatgatgttgaaaattctatggcaacttttgcaactggtgctcaaagtttgatggatgatggaccagttggccctggaagcagaaagccggcttctccatatgatttgcatataatgacagagccatacggagtcccaagtatggtggaaatttttcacttcttgtgctctttgttaaatgtggtcgaacatgttggtatgggatcccgatcaaacaccatagcatttgacgaagatgtgcctctgtttgcgttgaacttgatcaactcagccattgaattgggtggatcgtccatccgccatcacccaagattgttaagcctaattcaagatgagttatttcgtaacttgatgcagttcggattgtcgatgagccccctgattctttcgatggtttgcagcattgtgctcaatttgtatcaacatctacgaactgaactcaagttgcagcttgaggcattcttttcatgtgtgattctaaggcttgctcaaggaaaatatgggccctcgtatcagcagcaagaggttgctatggaggctcttgtgaatttttgtaggcagaagagttttatggttgaaatgtatgccaatctcgattgtgatataacttgcagcaacgtgtttgaggagctgtctaatcttctctcgaagagcacatttcctgtgaactgtcctttgtctgcaatgcacattcttgctctggatggcctaatcgctgttattcagggaatggccgagaggataagtaatggattgactggtttggatttgggtcctgtccatcttgatgagtacacgcctttctggatggttaagtgtgacaactatagtgatccaaatcactgggtttcatttgtccgcaggagaaaatatatcaagagaaggttaatgattggagcagatcattttaacagggatccaaagaaggggttagagtttctccaaggcacacatcttttgcctgacaaactcgatccccaaagtgttgcttgcttttttagatatactgctgggcttgataagaaccttgttggggattttcttggaaatcatgacgaattttgtgttcaagttctcaatgagtttgctgggactttcgatttccagtacatgaatctggatactgcactccgactcttcttggaaaccttcaggttgcctggagaatcccagaaaatacagagagtgcttgaggcgttctctgaaagatactatatgcaatctcctgagattctggccaacaaggatgctgctcttgtgttatcatactctattatcatgcttaacactgatcagcacaacgttcaagtaaagaaaaagatgacagaagaggatttcattcgcaataataggcatatcaatggaggaaatgatctacctcgagaattcttgtctgaactctttcactccatctgcaacaatgagatcaggactactccagaacaaggtgcaggctttcctgaaatgactcccagccgttggattgatttgatgcataaatcaaagaaaactgctccatatattctggctgattcaagggcttatcttgaccatgatatgtttgctatcatgtctggtccaaccattgctgccatatcagtcgtttttgaccatgcagaacatgaagacgtttaccagacatgcatcgatggattcttggctatagctaaaatttctgcctgtcatcatcttgaagatgtgcttgatgatctggttgtctctctctgcaaattcacaactctgttgaatccatcatctgttgatgaacccgttcttgcatttggtgatgacgcaaaagcaaggatggctactatcacaatttttaccattgcaaacaaatatggagattatatacgtacgggttggaggaacatattggactgtatcttacggctacataaacttggacttctgccagctcgtgtagccagtgatgcagctgatgaatcagaacattcatctgagcaagggcaaggaaagcccctcgcgaattccctatcttcagctcatctacagtcaatgggaactccgaggagatcttccggattgatgggaagatttagtcagcttctttcacttgatacagaagagccaagatcacagcctactgagcaacagcttgcagctcatcaacgaacacttcaaacaattcagaaatgtcacattgacagcatatttaccgaaagcaagtttctacaagctgaatctttgttgcagcttgcgcgtgctctcatttgggctgcaggtaggccacagaaaggaaccagttctccagaggatgaggatactgcggttttctgtctggaattgcttattgcaatcactctaaacaacagagacaggatcgttctcctatggcaaggcgtctatgaacatatagctacaattgctcagtcaacggtgatgccctgcaacttagtggataaagctatttttggtctacttcggatctgccagagactacttccttataaagaaagcctagctgatgagcttttgagatctcttcagcttgtgctgaaactggatgcacgtgttgcagatgcctattgtgagcaaattgcaattgaagtcagccgtcttgtgaaagccaatgctaatcacatcaggtctcaggcgggttggagaacaatcacatccttactctccatcacagcgcggcacccagaagcttctgaatcaggatttgatgccgtatcctttgttatgtctgaaggaactcacctgtatccagccaattatgtactctgtgttgatgctgcaagacagtttgctgaatcccgcgtgggacagtccgaacgctctatccgtgcccttgatctaatgggagattcattagaatttttggctaaatgggctctctcagctaaggaaaacatgggagaagaagatttcgggaagatgtcacaagatattggggaaatgtggttaaggcttgttcaaggactaagaaaagtgtgtttagaccagagggaggatgtccgaaaccacgctttacagtcattacagaagtgtttaggcggagtagacggaatcaacctagctcatagcatgtggtctcaatgctttgacaaagtaatcttcacggttttggatgacttacttgagatagctgctgggtcacagaaagactaccgaaacatggaaggcacattgcttctcgcaatcaaacttctctccaaagtgtttcttcagcaactccaagagctatctcagttatcaaccttctgcaagctatggctcggtgttctaactcgaatggagaaatacatgaaagtgaaagtaagaggcaaaaaaagcgacaagctacaagaatcagtaccagagcttctcaaaaacatattgctggtgatgaagacgaaaggcgtgctattgcaaagaagtgctcttggtggagatagcttatgggagctaacatggcttcatgtgaataacattgcaccgtctatgcgactggagctattccctgatcaagaatcctcacaacttggtgatgatgaaaccgtatcgaatggcttatcttctcctgaaaacacaactggttcgtgaccttacaagtgagatcattaggtgagtttctttcgaatatccatataagtactgtgaaagtgaaagcttcttatgtaacacctctctacgtttttttttgtaatatataagtctttctaattcagagactcgtattaattaagcaagtttcttaattacgactttgttaatcacggacctttggaacgaggtagaaggtcttgaacatgtgtggaacccaccaaaggaaaaatatcagtagattcaggagagttgttaaattttgcctccacgagtttttttcttttcttcttgttgagtcgtttacgtcacgtcgagaattttctcttttcccgagaaaattaagaaaggatcgtttgattttctaagaagggaaagataaacagtgaattagaaagagaaggaagtttcaatggaatcgctaacatctatttctccttccataattcttcctccggccaccactactacgatccccgtttcaacttcacgatcagtgttgattcgtcttccttcacgccgttcttcttaccttttcggcttgtccagctccgggagacggatttcgatttctagaagaagacacttcgttagctgtaaatcgaccggcggcggaggaggaggatcagataagcttggtggcgatgaagaagagagcgaggaagttgagaaggcgcttcacttggatggtacgatccctgggacttccgatgagtttgtaaggcaagtttcgtcgcgtgcttacgacatgcgtcggaaacttgagcagacgtttgattccactagctatgacggtataatctctatcgctctcaattcctgcgtttactttgattttggtgatgcaaaattaatactttcgttgatgcaactaacttgatcagagtttcttaaagattgtctaggaagtttgggaactgtagtagtttgaaattcccttagtgccttgtttttgttaacaggagtcaaatcgttttgttgaacaatgtcagaatttagtcactgtgtcacacacaaccggtgaagaagctctccattgatagatgtagtgttagttatgattcaaaagtttgtgttctgcataccatttctttagttccccaggagaagagtgcttcagctgaactatgatgaggaaaattgttcatttctagattccactcttacagtaagattgcaagcacggttttatcatctcatctttcacatagtgctgatgcataggaatatcaaagcaataggaacataagtgttttattcaatttaagcttgtattcatctaaagttaataaattgatgttgttcctttagtgctctgtatctttgactgagtgatttcgttgagaaccatttctctcactgtggcttctcacaatcttagtgttggagtccaacccatggagaggagattcgaagcctgtatatgtattaacacatagagaaaaccagatatgtaccatgaaaacaagaacaaaccacaggttccaactctattccactcaagtttttttttatagttttagttttcttctccctatgacattagcaatccttataaacagtgaagtagaaaaagagcttggactgttgttccctagtaggatcagcaaccagacaaagcaggctagacccaaaactaaattcgatatgctcgtagaagacattcgagatggagtactggtaagtattctcactgaatcactttcaagaccttatgaaacccagacaacgtgatatgcctagtttttatctcaaaggttttcgaagatgtgaatgaggctgttagatactgtgacctattacaagggggagggaaagggtgtgaaggtgtcgctgagattgaggcctcctctgtaagattatgagacaaagatatcatctaattctagaacttgttgcctttaaacatttgaaatgatctgcttttttttttttgaataggtttttgatctttgtcggaaaacaaggtctctggcagtgctcttccgccgtggaagaacaccacctacacctcagacgctggaacgtaatctcggatcccggaagcgttctcttgaggacttgagggataataaatagcttgtgaaacaatgtattaattttacttgcaataattgaaaatactttgtatagactaaacagtaattaaccgtgggtgatactgtgtatatatataaaatgcattttacttgtgctccataacttttttttgttccttataattctcttgaagttgcgctcttttctttgaaggctttaaagctaacactagtaggtaatgtattacttggtcaatcaacatgtgagtatttatagtatctatgattagttgacaaaaaagaccattgtatattgaacttcttaacatgaaaaatagtgacttttttttgtttagataaaaatagatatgctaaaggcatatgctagtgtattattaataaaaatcatgtgatagatgtgattccatgttatccggatcgttgacttgacttagtacccataacgtttattatataattcatatagcattttatgattgtcaaatttatatttatacatatgatagactattatgtcaaaaagacaggtaaagccactttgtttacttattctttcttaactcaaaactccaaagggtaaaatcaaggtgaccattactctttcagtttcaaaagattgtattattgtaacaaggtgaccattactcttaaaatttattcaaaaataaccaaatctaaactaaaacgtaactaaaatttgatattattcatgaaattctaagaacaaatccaacatgatcccttaataatttccctttagtagtctagccttcttagtcggtcactaataataaagagtaaagagaccaaaagagagaagtcttagataacggtgacagagttaaaaaagaactcactaaaatagacggaggaaaaagtcatcaattcaacttgacggctaagttaacggcgattatcttcgttcacacaagcaacacaaaagagaaaacatgaatcatctctctctccctctctccggttccacagtaaagaattgattcctcaatctcacgcggaagcaaaatccaaattctaaaattctaagaaaccactctaatcacatcgctctatcgatcaaaatcgaaacccttattcaaaaatctcttattttttccatttttctctcaatcatctgaatcggttttgagatgagctccgattcaccggcggctggagacggtggcgaacaagccgctgcgggaacaagcgtgccttcaccttcatacgacaaacaaaaggagaaggcacgtgtgagtagaacatctctgatactatggcacgcgcaccaaaacgacgcagctgcagttcggaaactcttggaggaagatccgactttggttcacgctagagactatgacaaacgaacgcctctccacgtggcgtcgcttcatggatggatcgatgttgttaaatgtctgcttgagtttggtgctgatgtcaatgctcaggataggtggaagaacacggtaaagcctcttcctttttattttgaattttgggttgcttcttcaagtttcttaactttgttatgattctgatctaaaacttattgttgtatttgtgggtatttgcagccactggctgatgcagaaggagctaggaagcagaaaatgattgaactgctgaaatctcatggtggtttgtcttatgtgagtttttgaattcccttttctgatctttgtatagctttaggttagacattgttccttttgtttcatttgttagggtaggtgatgattgctattgaatatgaaaatgttttttgcaaaatttagaaactttcgtatctctctgaagtagctgcttaatgcagtgttgtttgttattctttagtgtttctattagtcatttttgttgttgtgtgtggatagttgttcatatgtagctgagtaaattcactatgcagggtcaaaacggaagtcactttgaaccaaagcctgtgccaccaccaattccaaagaaatgtgactgggaaattgaacctgctgagctggatttttcaaatgctgcaatgattggaaaggtatgatttgtgcttttgcttatccgtgtttagttcaatataatggagttttgagcaaatgagtttcttttggctaatttggggttggtcacattcttttagggttcatttggtgagattgtgaaagcctattggagaggaacaccggtagctgtgaaacgtattcttccttctctttcagatgatagactggttatgtaagttcttacttctctcttatatcccaattattattgtcgaagaagtttctagcttttagctgatactttggtatcgctctcacctaagattcttgtgtttccatacttgttgtgatatacagtcaggacttcaggcatgaggttgatttgctagttaagcttcgccatccaaatatagtccaattcttaggagcggtaaccgaaagaaagccccttatgttaatcactgagtacttacgcggggtaggttttcactatccgctttctttttcttatgcaatttttcttcttggctaaataaatgattcatctttttgacagggagatcttcatcaatacctcaaggagaagggcggtcttactccaacaactgctgtcaactttgctttggatatcgcgaggtacttgaagttttaacattcgagatattatgtgagaatttgttcatcatatttagcctgagtgttttcgaaaatttgttgttacagaggaatgacatatcttcacaatgaacctaatgttatcattcaccgagatcttaaaccaaggtaatcaaaatcgcttcatatatatagctccttagtttcttacttcaaatccgctgctcataaatcgcttcttgcattttatatttcaggaacgttcttctggttaattctagtgcagaccacttgaaagttggagactttggacttagtaagctcataaaagttcaaaactctcatgatgtctacaaaatgactggagaaacaggaagctgtaagtgttgttctatagtaaaatcggaggtcctctgccttcttttcctttcatttctttaacttcaccttctttgtttctcttcttcgtgcaacaaaaccagatcgttatatggctcctgaagtattcaagcatagaagatatgacaagaaagtcgatgtcttctcctttgcaatgatactttacgaggtactaagatcttaactataaaacttcctttctctactacaaaaaacaaaaccaaagttcagaaaatcttaaccttaatttcattaccacattgtacccagatgcttgaaggagagccaccatttgcgaaccatgagccatatgaagcagccaaacatgtatctgatggacatagacctacattccgttccaaaggatgcacaccagatctaagagagtaagaaaaatacgaggccatatgcaccggtattactctaccggttatctaactaattttctcttttataggttaattgtgaaatgctgggacgcagacatgaaccagagaccgtcgtttctggacattctcaagagacttgaaaagatcaaggaaactctaccatcagatcaccattggggcttattcacttcataatacacaaaatccattatttaagcacaaaaacaaccagaaacaagaaagtatcattctctgtttgccttattaatctctgtttcatttcttttgtaaagattgtttctttttcatcttttcatttgctttaaaagagtgtgagatagaaagcttttattgttgttacatggattggattgagtttgcaggttaatgagaagttcatatcatatcagacaggataaaatgtctgtttccgaaaaattcagtaacaaaatgaaaaatgagttcagtagtgtatataaagctatagtcatagggttttcaatacaatctctgccctcaggagatggtaatggttttcagataagcttctttttctggaagaaagtcttcaagtgccaaaactgaagacctgcgaccgataaacaaactgcaagcgacacgaaactcaaccatgccatcttcgaatttgtcgctatgttcagattgtgcatttcttcttccctgtaatataccaaatgaagaagggttttgagttttgattcactctcatcctctgatcaagtgacttcaagggaagacaggttttgttgtcattacctgtcgcggagatagaacatctcatcgtggattccattcacggtttcaaataacttcttaacctcaaactccatcgtctggccaataaataaaacaagatccaaccataacaaggttaacaaaacattccttcaaaaactctgcaatctctttaagaggctatgttacatttcaagctagtcttgctctgtagtatgttaaagcctagtcctatctaccacatttcaagatagtaattttctgcgtctgttaaagcctagtcctatccaccttcatttagcagggaaagaactcctgaatgagctgaagaaatcgatggggttcaaaggtgaaactaatgaagctattttctcatatgcaagactgcagacacaggtcagtaacacacgagccctgtcagcttaattcatggccttgttctaaccaaaccaatgcaccaacataacctataaaccaagactacatagcatttctcacttcagatataactttccactttccagcactatgtcttggtgtaacttaggcagctatcaaattctcacacatccggcgcaatgctctattgttcatgtcattagaagcatcaaaatctatttcctctaaagagattagtttgactaagttaagacttcaagagtaaagaaaaagcgaaaaacttacttcgacttggctcttctttgccacattcgaccaatccttggtatgaatacccgtcctccaatcaaagtcaatgatcagcgtcgtctctggtttgtgatcgacggcggagaagcaacttatgtaatcccctgtttccacagctacaaacgagaattgtcccgattctactccgtccgattcgtgataagccgtcccttgtggcgatgtgaccttaaaaatcaaacacattgcattatactgaaatcgccggaagaagaaattgaagggaaatgcgatccgatcggatgattattaccctgacggtgactttatgggaagaaggaagaggatgatcctcgtgagggtttataatgctgtattttccgatggtcattgcgtttgcgtgaatctcctctgagatgcatttcgtgtgcccagaaagtagctcgtatcgtatagagagtgtcacgggagataaaattgagaggatcaatagtacgatcgagctccgacgatgattcatgacggctccgatatagagagaaatcgatctgacggatttcaaagtttagctatttttcttgttaaacggaaggaaggaaacaaaagaaagtcaacacgtgcattgccacgtgttagtatttcattcgttaaaacacgtggagtactaccctctggaattgggctttaaaattaaggcccattaataatgttggacctatatacttgtagtggatcacactaaagtaagttagaagtaaataaagaaacaaataacacatccagattttataattcaagcataactacatatgacttggtaatgttaattttaaacttaattgggaaattttgttgaaaagacaattgtactcgagtttttagtaaagaataaaatagtaatctttccttggaagggatgttaataatgcaacattgaggtacgtgtcatgatttcgtttcagtttttgttttgttttacaacagcttgaaaatatctgaataaaggagatgaatataaacagtggtttgaatcgtgattagtgcaataaatagatgacagtaataaaaaaagtacgggagaacaattaggtgaatccgttgacgaatgacaacgactatcaaaaaggcaaaatgtgtcatctttctttatatgtttttcaatgttgaatattcttgaaatctttatttatcatatgtttttctgatcaatcattatccttgaaacctatttttttttttttttggttatagaataatctttgacatttaatgatatatataatgaaacaagttaggaaaattgaagctttctgaattaggaaataaattgtgtaagcaatagaatgagtttcttgggaaaacaataaatagaagaagaagaagacactttgacggttaattaacttattttcccatctctcaccgttaccacctcttttttttttttttccgtctcgtgatttttttttcttcttctgaatttcgaaagaaaaaaaaactcctcgagattcaaaccatttgacacaaaggagagaagaagcatttcatttcgcgtttgtcatctaatttcaatttctgacatctcacaagatcggagaaatttaggttatagtaattttattctcatgaagcggcgacgacgatcgtcggaggagggagatggaagttagatcggagagtaatattactcaggcgcgaagcgataagcttccgcttccgccggcagttccgaagcctcgtgtacaagtatggttcgttagagtttgctccagcattttggtttggacgtgtttggttcagcttttcgccgccggtgagctttggcattcccggatcttcactggtttaaccaatcagatttctagattctcagcccctgttgagccagttccattgccacctcctctacctcctccgagtcagttttctctctatttaggggacattagggttcgttggtgcttgagagagtttaacgagattgttgattttgtgcagggaattatacaagcaatggtattctacttgtatcctgtaatggtggattgaatcaaatgcgatccgcggttggtgactttgctttaattctctttttcttcttctttcagatttgatgtttttccaaattctgatttttatgttgtgtttcagatatgtgatatggtgactgttgctcggttattgaatctcactctcgttgttccagagcttgacaaaacatctttctgggctgatcctaggtactctatctttggtgtttatagaatcactcatgtgtcttatatgcttaacattttttagcaatctaaagtatcctcatttttgtttgcagtggttttgaggatatttttgatgtgagacatttcattgattcattaagagatgaagttcggatcttaaggaggcttcctaaacggtttagtagaaagtatggatatcaaatgttcgaaatgcctcctgtgagctggtctgatgaaaaatattacttgaagcaggtttgtcttgtttatcactagttttgctgttttggttcctttgactatccttgttacaagatattacctaaccatttgcatatgtgattggttaatttcttgttcaggtattgcctctcttcagcaagcataaagttgtacacttcaataggactgatacccgcctggcaaacaatggtcttccgctctctctccagtggctcaggtgccgggtgaattttcagggactaaagttcactccacagcttgaggctttgggatctaagttagttcggattctacaacaaagagggccatttgtggctttgcatctgagatatgagatggacatgttagctttctctggctgcactcatggttgcactgaggaagaagcggaagagctaaaaaagatgaggtttctcttcaaaagatttctcctgaattggtgctctggttataggtctttttagttgttaattcataggtccattctgtgttctttaggtacacatatccctggtggagagagaaggagatagtctcagaggagaggagggcgcaagggctgtgtcctttgacgccagaggaggtggccttggtattaaaagcgttgggatttgagaaaaatacacagatatacattgcagctggtgagatttatgggagcgagcatagactatccgtgttaagggaagcattcccgagaattgtgagtctaccagtcctggtttcccttttcttgctacaaagaatgctcaactgcatcgtcattacaatgcactttttcttatcagttttactcacctgtggttataggtaaagaaggaaatgctattggagtcagcagagctgcaacagtttcagaaccattcgtctcaaatggctgctctagatttcatggtatctgtggccagcaacacttttattcctacgtatgatggaaacatggcaaaagtcgtggaaggtcatcgtaggtaaattatttgtggtgtcgaatgcattcaatttcatgacaactaaaaaggtggtgttaagaataaccaaacctgtgattctatataaccattattggtctatatctgatttgaatttgcagataccttggatataagaagacaatcctgcttgaccgtaagagactcgtggagctactagacttacatcacaacaagaccctcacgtgggatcagtttgcagtagcagtcaaggaagcccatgagagacgagcaggagcacctactcatcgaagagtaatctctgacaaacctaaggaggaagattacttctacgcaaatcctcaagaatgtctttgtgaaggtacaaattgccacgacctgtttggccatagaaatttaacacattgaagtcatgtttttagcatattatatctcattgcttccgcaagaggacggcatgtcaaacacttgaacgggagctgcatagttccttccctgagtttttccatttttgtttgtaatttttttcaattttcctgcatagttgctgatcttgatttatttagttttacgtaaattaagatgtaactaaaaagaagattatgtctcatcttatagaatttcaaaaagcctgcttttggcaatagcctaacatacaaattgtggtctctcaactctgatgtcttgaggttgattcaagtctatgtggtctgagaccaaaccagtaaagattttctttctagccttgagtttgttctgcaggataagctatacaagctaagctaattctcacttggtttcccagaagataatatccccttgttcgccaaccaacccaagatctttgagccttctctcttggtaatactctaaaatgtcaagttcaagctctctatccttgaagatttggtcgatttgctgaagcactctcttctcaccaatccttatcttgagagccatttccaacctaggctcaagctttcctttgtccagaagcttctcatcctacaacagacgatgaagacgagtaagaaatgagtgttaagctgcaaagacagtacaagtaagagctcgaacatatatacctcttcaatggtcgtatcaaaaccagacagagcagatttgcaggcatctctgacaacacggcatatgagttcctcgtttgtacgacttacaggcaattcaagatgaccccatatggtgttattgaagatagattctaataagaaagcatctggaccgccaagagccacaagccgaaggtactgaagcataccagcgggaagagtctggccgtctactatgtcaaagtatccggtctcacccatcttgttactctcagcaatatccaacttatccccaaagaatgggtctgattctggtatctctattgttaaagtatatgagttccgtttagggtttgattccacaaaaccatagtcgagagcaagttctgcattgcttttgttcagatcgtactgaatgtatacctatggaagagatcatccaaacagtattaaagggcttgttcttacactcttgagggagaaaactaagtagacagtgtttggagcatacctgctcacctgctttaacataaacaggtgacttcaaggaaaataagagatctctagagaaaaggccggctcctttgatctcgtatgcataatcttctgtctttatcgcggggttatggtttatctgttcaaattcaaacattgaagtcagagattctctgctgagccaagcatcaatgaatgaagattattttctgaagttttcactagacaatatctgaaacaagaagatagcttgccaagtctgcaagagggatcaagacaaggttttggccacggagacgagaaaaagccctcgacttgaggatcccaaacgcccatatgaagtcatcaagtgttatgcgggatgagaagagatctttgttaggcagtaatatctcttgttccagtttcaagaattcattctccacatactctttcacacccaatgtggtgctcaacagttgagtccctgagccaaacaacagtaaccacaaagttaataatgtacatcatcatcagctactgctactcagaccaattggtatgaatctaaacaatgatcagacttttcaaagaaaagggtaagaaaatggacctttaagctcagcaagctcctcttctgacctgtactggagacatttcacgaagaagacatctcatcagcttagtgttgatcagagatacaattgatgatcagagaaggacaaaacccaccagaagacagtagaatcagtagattgaggaagcatatcaagataaactctccatgaagactcttcttcatacttctctctgatcaaaaacagagctactgaaacccacggctttaatccgccgcataaaggtccaatcttggaagcagtcactgtctctgggtttatccacaatcgcttgggaatctccaatacgacctcgtttcttccaatatcacgcctggctacaagtcccaaaccttccggtaccaccgcaggttctgccacagacttcccggatacgactccttggtctctgagccatttccagaaattccgaacattttccggcaactctgagcttgaagctgaaatgggtctcaccaaagatttcttgggtcgagaaaagagaaaggaagggttttgagacttttgaattgacgggatacggagaaaacccgacacgacggcgacggaggctgacatggtggttttccgatggcgggtagtatcagtgaaacagagagtgtgtggataacaataatatcacatcagttttttctaagttgttgatgagacaaaaatctagttattctagttaccaatgttaaaggcccattattctaaaaggccaaggcctacattttatttttgttctgatgtaattaaattgttaattgtctgtatttattttcatttttaaaaaattatctttttaacttatggtagcttcaacttctttttcttttttttttttgtcatctcaacctttgtaagaagaaaaatggtcaactatagcttcaacctcaaatctactgacttgacacttgagttttaaataggtaacatctcatggagatcccaatattcattctaaattcctccaagataatgcaacatgttacaacaacaacaacaacaacaacaacaacaacaacaacaacaacaacaacaacaaaagagattggccgagacatatatgtagtatgtacccaccatatcacacataccttcataatcatcatcatcatcataatatcaagtggtctaattcaaatgtttttgatttaattatgtgtttaagtagttcatatttaattgtgtgctaaaatacttattgtaattgaagaatcaaatatacaagtcttattcactattcttaatcaaatagaaattagtcttaaatttgtaatttagggggtacaatgatccactattctccatcaacgtagaagacaagtaatttactttgtaatataggtaatggtacgtacgtagtaatcacatgtaaaagcggaactttcctttctcttgttttgccggcttgaccacgggatatgagaccagtaaggtacatgtgtaatgtgatacctatcagaaaccctattacactcttatcaaaaaacaaaacaaaacctattacactctctcggcttaattaagattatgatcaattccaaatatgtttctgatataactttaattattaacgagaaaaccaaagtttattgctacttttttccgtcgaaatggccgctattttaagttttagacaataacttggtccatgaaattaaggtacaacgtcgatattgattaagatcagtttacttttgctaatataacgtgttaagtttgagatgggagacacgtgaatgacttttcattactttcaaaaattgttcaaaattccaaaattggcaacaagactgttttagttgttaatatgcaattagactgtttcaatagagtgtatttttctttgtcaaaatgtaataagtactaatttgtcatacaaaatatcaaatgtcaagaacataaactcttctaacggaaccgcttgtcgcgccgaaactcgtgtggtaaacctgaaaaacaactcactaatcgcaattttaaatcagagactgagaaaacacttctcacgaaaaccacaaaacgcggtcaatatcgggatgacgacatgatgtggtggtcggattgacacaattcaggttggtcaacaaaattcatccctctaaaatatattttcttagttcgttgccaaacagatatcttacctttactcttttttttttttttttaaaaactcatataaataggatagttattaaatttaactacaaatggtattgtatatgtatattctatggctaggtgaaaaggcttcctttagttcgagaaggtcaaaatggatggctaattaacttttatatacaaacagtatatgcctaacatttaataaggagagactcagattccttgtcaactactcactattgtctccatgactctttaaaaaatatatttttatagaatcttagtattcagaaattaaaccgtagcctttataggataacaaatgtagatgatgttaaatatgaaaattggctccacaactgtccatgaggcataaataactcgaaaacttaattagtttgatcttacagataactaattttttgtcacatttattataccccaaagtatcttaataatgcttgtcggttcaagttcatattttttcctcggttcaaaatccaggctatttatccgttcttttttaattaccttcatgataacttgtcaattttgtatttcttattcatgatttttctcatgcacatacctaatttacgtcgattaagatccatgcaacgttcataaaataatgagatagtatattagtattagtatcacatacataacgatataatattttacaatgtatttgcatgtaaagcattttcaacaactactacttaatccactttggttctgtgcaccatatcgaccttgagccgcccatataccgcgactagggtcgtccactacgaatataaaaatttatcgttataaatataaataattgatatatttcaatgattgatggattaattaatataaataaaacatgtcaatgtaagactaaatgactaatcagcgggactaatcaactcctctttttttttaaataattcaactggtagatcaacgcgggtttttaatctcttgtaagaactagtacgaatgtacgataataattccagtttctcacccgaaaaactgaagcataatgtttgctcacacactgacacacactgtggttaaataaaatatcgaaagttaaatttacaaattgttttatcgtaatacttgaaaaaccaaagattatattatgtaattataacaaaaagagatataataaattactggatttcaaatctctatatttttgtctccactttatcaaaaaaaaaaaacatcagtctccactctccacgcgccttttagtcgccctctctgaatacactacagtacaacgttgaaaagaattcaataaagaagatcaaaaagcaataaagttaatccttactttaattagaaacaattttctaatcataaacctttatcatatcgtcaaaacatatcatgaacgacttgtctctctctgttctctatatatatatgactcctcttcttcaaagttcagacacaaacataaactagcgtttaataaaaaacaagaaaaaatgaagttcggaaaagagttctcgtctcagatggtgccagagtggcaacaagcttacatggattacgattttctcaaaactcttctcaaagaaatcatcacattcaaacgaagaaccaacaatgcaccttctcatggtggtgccaagaccggcggaggattaaaccggaaattgactctataccgtgcgtttagcggtcttgtctcaacgccaaggcataaacgtagtaatagctctcatgatgttgaagaaggtgtacagttgacgggatcgatgaggtcggggccgattcttgtgaacacgaccgcgagtcatggttatgagacgacgtttctgatggccgcggaagaaggaggagagtacgaactagtgtttttccggcgactagacgatgagttcaataaggttgataagttttacagaaagaaagttgaagaagtgttgaaagaagcggcgatgcttaataaacagatggacgctttgatcgcgtttcgtgttaaagttgagaacccagatggatggagatgggaggaacggacggtggagatgactcgattagcttccgatattgctacttctgcggcggctctctctgcttctactccagccggagctaaatccagtaagcaataatcaatacatatctatctactcttcacctaactcacccactttggacataaaaagacaggaatttggtccaaatttatgtctaggtactatgatcatatttgttagcaccaaccaaatacgaaattgatagtaccgatacatgatttagcttaatcaaatcatactataacaaattgtaccaaaaccggattagagttgtttcatttttcatcagacttgaacaagaaacaagataaattggtattttaaattttgttagttttaaatatactcactaacaacaagtgaactgtaattccatttttatattttttgaatttgaatattccatatacttccaattgaactttttttttagtttattttactcgtttggatttaaaaattctcactgaaggtaaatgatttttatatttcaaagtaaaaaatttagtggttggtattttcatttccacttgagttattttatattcatgtatattagatttgttgtctattaaaacaatgatttactctctatctcacattttttttttttttcataagataataaaataatctgtttttgaacttctaaacgtttttccttgcggcttcaacttccatgcaagctagatcattttatacggtactgtaccaaaaaccggattatgaaattaatttccggttcacttaaatctcacgttaccgtagtctcaaccaaaccgaaattttgaatatgtagtgaaagttagaagtcaagagcacatggaagcaatccaagaaggaggctcgagcagagctgggctaatggaagatgatgaagaagacgaagacgaacaaaacgaaacctctgtggtatctaccggagcaatcgataatgagactactacgagcaggatgagaggagcgagaccatctccgatcgatgtacttggtcgagttaagatcaacaacacaaaagagacacctcgttccaccattaaaggagttctcaaagtatcaaaacagacagatttaaaattcagcagagagaatctgatgaaagtcgaagagagtctcaagcgtgctttcatcgagttttatcagaagcttcgacttctcaagagctataggtgcgtatgggtttcaaagtttgagtctttttatgattatgattgatgggtttttgattttgatattcgattatgttttgtgtagttttttgaatgtattggcgttctcgaagatattgaagaagtatgataaggtaagctttgagatttttgagttgaggttttttgaaggttttatatgaatgactgcaatgtgttcgacgaaatgtcttttacagataacttcgagagatgcaacgaagccttacatgaaagtggttgatagttcatacttgggaagctctgatgaggtaagaggtttatgagatttttcttatttgataataaagtaacttcatcaattcctctgttttttattctcgtatgattgctctgttatgataggtaatgagactcatggagcgtgttgaagcaacattcattaagcattttgctaacgctaatcgggcaaaagcaatgaacattttacgacctaaagcgaaacgagagagacatagaattacattttccacaggtgaaaaaatcagtaacttgcataatttgggttttagtatcattgtatcaaactttgtggtgcttatgaggaagttggtttcaggtttctcggctggttgcgttttttctcttatagtggctcttgttgctatcatccgtacccgaaatctcttggaaatggaaggccagaaggaatacatgaatactatgttccctctttataggtaagaacttagtaacttcgccttcttaagaacgtatctcgagcattcaagttggaatgtgttgttttgaatgttttcttcgttgttgttacttgcagcttgttcgggtttatcgtgctgcatatcatcgtgtatgctgctaatatatactactggaggcgatatcgagtaaactattccttcatatttgggttcaagcaaggaactgaacttggatacagacaagtcctgcttgttggtttcagcatcggagtcttggcattgctttgtgttcttgccaatcttgacatggaggcagaccccaaaacgaaagcctatcaagctagaactgaaattcttcctcttatcctacttgctgtaagtcccaaaacccggaaattcgactttttaactgaaaaaagaacggcataataactttgtgatgtttgttgtcgacttttgcaggctatgttcattgttctagtcctgccattcaactacttttaccgctcgagtcgctttttcttcctcacttgtctgtttcactgcctcgcagctccactttacaaggtaaatcagggataaaacaagctcatcaactaaagagaatatggtaaaaatttgaaccgtccaatattcattcgccttttcctatgcaggttacattgcctgatttcttcttgggagatcagttaactagccaggttcaagcgattcgaagcatcgagttctatatatgttactatggttggggagacttcagacacagaaaaagcacttgcaaagaatctgatgtctacaacactttcttcttcattgttgctgtcatcccttatgtctctcgcctccttcaggtaaagcacatagctactcctttcaaaacgaataatacaatatcttgcagtccataacgaaacttgttgttactcatacagtgcctgcgacggctgtttgaggaaaaaaacccggaacaagggtacaacggactcaagtatttcttgactatagtggcggtttgcttgagaacggcttacagtatccaaaaaggtcaagtcgcttggagggttttagctgctgtcttctcatttatagctgcaatattctgtacttactgggactttgtccatgattggggtcttctaaaccggacatccaaaaaccgttggcttcgagataaactccttgttcctcaaaagaaagtatacttcatagcgatggtgagtctcatgcaaaaacacttttcatcaaatcaaagatgtttcacagcaactaatcttagaacatgtatcaggttttgaatgtcctgttgagatttgcgtggatccagacagttttagatttcaacttttctttcatgcatagacagacgatggttgccattgtcgctagtcttgagatcattcgtcgtggtatatggaatttcttcaggtgaaaaaaaacttcaaaactcacattacctgagtccacaagctttgttgcattaatattccaattagtaactctctgtttttgtttggattatggaaaacagattggagaacgagcatttgaacaatgtcgggaaataccgagccttcaagtccgtcccattaccgttcaactacgatgaagatgacgataaagataactagtagtttcagatagattatgataaaatttggaaaaaaaggttaagataaattaagattgagtggcataaaatggactacgtgttttttattttgatcgaatgtgagttaattagcatcattttattattgatatcaattttgtatcatttatttaattgatattttaatttgtatcattttataagtgatgctaataacaaattagtacaacgattatctgttgatgtaaatatataggtttctatcaatattttaaaaataatccaaatcattatagatttctatcaattaatcaaattgatgctaaactatttaataaaaacatcagttattataattgattctaaatcatctatatttgtctcatttatacaaaattgattcaaaatagtatcacttagttttgtgatacaatttaagtgatttaattcaatctttttttttgtagtgcatacgcaccaaataaaccatcgcataaagatcttaagattctaaatcaatgatccacaacaagatcccgaacttgattttcacaaagattaaaccacaacgtaactctgatcggaaacttacaatcttcacgcatcttctcgctcaacttccttgagctcccattatcaaatcggtccagtcgtcttcactcctcatgatcgatgatgcttcgagagggattgatttctacggaaaaattctctgagattttgagagggaatgttcagtttaatgctttcgagaatcgtttatatagctagtcattctgaacaaataaaccaatggatcggaaagcaaatgaagagagaaagcaaatgctagtgtattttaatacaatatgaaaccacaaagaagtaaaacttttcagcttgatcttcagacaaactagaaaatgcataaaccagattaccagaagtaaacactagaaaaagattctgtttttagaagcaaaaaatcacactcacatgaagaaatagctaactaaagaaaccacaaacaaacacaaaaatcctcttatagatcaaataacctatcgaatcatatacagaaggaaagagtattaattcagatggaaacactcccaagccccaactgatattccttgtaaacaaagaaaccatcaaaaaaccctagaccctcttaattaatcattctttcgagagaaaggcttgaagctccttctctatgtgttcttgagcagtttttttggccgcaagaaacggacgatagtgatcagtgagcatccataccatacatttggtcatcatcgcaaagactccaacgttggtagcttcatcagtgcaatcttcccagtcagtaaatggttccttgcaaccacctcctctcatgaacgctgaaaacacctctcctttctcttcttcttcccttacttcatttggggatacggattcccctggatctcgccaaacagttgacggcaagaaatccttcatcatcagttttcttcgcatcgagaaagggaagatagtaatcagaatgtctctccatacacttctccaacatcgtataacacaaagatataggttccttattcttcttctcagcttcctccacacaacctttaaaggccgtataatgtttccttggatgcaccttctttcataaacacttgtaatcgattttgccaaagacttcacgaatctcctactttctctggctagacttgttttttttttgagatttggtatcggaattctccggtttcagatccgtggatgacaattaatcagtgattatcatttcattaggtcagagaattacaatatatgtagggatatgataatttacaattaagtatttgataattgcaattttttaaaatattcgataattacagtttctttacgcatgtagggatgtagtcatgtagggatgcatcatgtctatataacataagacatattgggatgcatcagaatcatataacataaatagtttggaaccaaataaacgttgaacgaggcttttctcacaccatatatcttttcaaaacatactaacaagtcaaaaattgatatccatgtaacttgaaaatcatgcacagacaatgctacctttgaatggtcattaaaaaaagaagctaaacacacttcagatccaaccatatatgtgatcaaagccagtgataaaagtcgagtcattcttggcagctaacgactaaggtaagcaaagaatcatatggtcatgtatggaggctgataacagagatgaagttctgtaatgtttcacatctccctacaaattagaaacacgacatacatacataccaggcaaaactgggatctgtaaaaaaaactatcttcgaggagatatcaaccaaacagaacgtcatcgatcatgaatgaaagtgttaaaaacaaatgctagtgtatcttaagcacaaagtgagtcaacatagaagtaaacttgatctttagacaaactagaaaatgctggaaccagaagctatcactacaaaaggtctgaccttttctgtttcagaagcaacaaatcacattccaatgagaaatagcttagcaaaccacaaagaagacaagatttcttcactgaaccattaatgggtctcaacaaaagtcatgacctttaaagagcaaattctctctcgaatcatataaaaaggagtatgaattcagatgacctcaatcaatcaacttattaattagagaagaaacatgatcatcaatgggatcttataagttatgattctaacaacgaactttcctctgttcctagagaacaatttttatccccaaattccaatcttttgatattcccataaacaagaaaccataacaaaattacccttgagcttgcttcttcgcagctacctcctcttccgagatcttctcttcttcttccttcttcttctcagcttcaagctccttcttaacctctgcttcagcagctttctccgcagcgagaatgggctgatagtaatcggaatgttcatccatacacttcttcaacatcgaagtgacttccatacaattagtaacaatatcttccttgttcttctcagctgcttcaacacactcttcccaagcaacaaacgaatctttgcaaccacctcctttcataaacaagcaaaacccacactctccttcctcttcaccatctgcgtctcctcctcctccttcttctggtttttcatccgattcggaatcttctgggtctctccaaacagttgatgaatctccgagttcctcagatggagctggagtcgacggagacgcatctccgagtttctcagatttagctggaggagcttcttcgttgttttgagatttggggtcggaaaaagtctctgtttttggatctgtggatgatgtaattcccatttttctctcaggagagagtgagatcggatcttatggaaattggaggattcaggaggagaaaaagatgtctctttttaagggttttaaggttctctctcggtgccgccgccgattctctttacaagccagagagaaatgatcaatcgaaacgtctttatgttaaaacccctcaaaaacctttctattgaaccggatattctaaaccggaccaaaccgaacttaaacctttgttaaaccgtaagaatttaaccaaagtgaatatgataaaacaacaacaaaagaatgatctgtccacaagacgattcaagaataatgtattgttaagatttcaacatcaatgtttgttgctaattaaacacaagtctcctatttgctacaaatcgaatatagacaccaacatcattcgttttatagtaataaaaggaagataaatatagggagtaatcattagattaatattacagtcgctttcagatttcgtcaaatttcacaggcagacaagtttctttgacttggtcactataagagttgtaaactctttgataaataattgaatacagcaattatttcaaatctccggtgaagtttttctgggctctaagtatgaagacaaagctcatgataacaatcttctcttgcttactactttggtcgatgttgttgttactatcattctccaacatcttcaaacaccagcttcttggtgctacaatcaacggtatgatcaatcatcttttgggtttcttagtcagaaatgatccttttcacttacttttttcattttcttgcagtaggttcaaaggattctgtaaaaccgagggatagactgttaggaggacttttaaccgctgatttcgatgaagattcttgcttgagtaggtatcagtcttccttgtatcgcaagccttcgccttacagaacttctgaatatctaatctctaagcttagaaactatgagatgctccacaagcgttgcggtccaggcactgatgcttacaagagagcaacagagaagcttggtcatgatcatgagaatgttggagatagctctgatggtgaatgcaaatacattgtgtgggtggctgtttatgggcttggaaacagaatacttactcttgcttctgtgttcctctacgctctcttgacagagagaatcattcttgtggaccaacgcaaggatattagtgatctcttctgtgagccttttcctggtacttcatggttacttcctcttgattttccattgatgggtcagatagatagtttcaaccgggaatactcgcattgttacggaacaatgttgaagaatcataccattaactcgacaacaatcccatcacatctctatcttcatcttctccatgattacagggatcaagacaagatgttcttttgccaaaaggatcagtctttagtcgacaaagtcccttggctggttgtcaaatccaacctttactttattccatctctatggctgaatcctagtttccaaaccgaactaatcaagctattcccgcagaaagacaccgtcttctaccacctggctcggtatctttttcacccgacaaaccaagtctggggtatggtcaccagatcctacaatgcttacttatcaagagcagacgagatactagggattcaagtacgggttttcagcagacaaactaaatatttccagcacgtgatggaccaaatcgtagcatgtacacaaagagagaaactgttacctgaatttgctgcacaagaagaagcacaagtaactaatacatcaaatccctccaaacttaaagctgttctggttacatctctgaatccagaatactcaaataacctaaagaagatgtattgggaacacccaactacaacaggagacatagtagaagtttatcagccaagtagagaaaggtttcagcaaacagacaaaaagcttcacgaccaaaaggccctggcagagatgtacctcttaagcctaactgataagcttgtcacaagcgctttgtcaacatttggatatgtagctcaaggtcttggagggttaaagccatggatactctacacaccaaagaagttcaaatcccctaatccaccatgtggccgtgtcatctccatggagccttgtttccttacacctccagtacatggatgtgaagccaaaaagggaattaacactgcaaaaatcgttccttttgtaagacattgtgaagatcttagacactatgggcttaagctagttgatgataccaaaaatgagttatagattttacaaatcgaaacagagcatctttctgattgtatgtaaaggcaaatgtatacagcagatgtattaaaaatcaaaacttggctactgcaatttggttacttactcgatccagaagttatggtccaaaggcaatgctcgaatacatggttactgcaattttaacagaacaggaccttctctgtcggatttgtgaggtcatgtcgatgttcttcaaaattcaagcactctcctaacttgtaatcgctcttcgttcacttcttctcaaaatagttaggttatctggagaaactggggtctattgaattattatatgtcagctaacctaaactatttggagaagaggagatcgaggcgtttacagattttgtgtttagtaaagacactagcgagactctggtgaaatagacaaaacaaaacaaaaataatcctaattttataggtttttggttaatatcatgtgtaatttattattatttttaaaatgtttaaaagtaaaaaaaagagttataaagctgagtttttaacaagtgtcaaaaaaatgaaatttgaattttaagttttagattttcaatattgcatataataaaattctggaaataatcatattattattttccgtataaaatagtcaatgttaccttacctattaaaatgttaatacatatcacaaaattaaatgctaaagattgttttccaagttaaatttgaaccattaagctgtctttggaaaaccaaataatatttacttatgacaattgacctaaactatatacattaaacagatatggaaataatcataaaggcataaatcttttcaccttttttttcttcttctagaaaacagtcaatattattaaatacgggcataataacttcttactatgaacgtttagcaattagcattaagctctctttgttgaaaaaaaaaaaaaaaaaaaattctctgttcttcttttgtaattttctttttatcaccttcttgttcttctttgtttctattttttattggcttttttcgtcttcgttcaatctgaatcattttttcatgactattttttaagttgcgttttcaattataaaaaaatttgtttatagattgattgacaatatggacaccaaaaaaccatccgatccatatgttcgagaacaaacatgttctcaaagatcaattcaaccaccaacaaatcaaggcaaggtacgttatgaatttatatatgaaactttataatttgttttctgttcatatttaagtacacattcaatatatacatattcaaaagatgaataaaacttcatttgataaaaattataatcttagttcaaaggtctatattgataattccattagaattcttaacatagttttcatagaacattcattcatacctctaaaaatccctgtggattggtttaatctgttttaatcgttgatttcggttggtttagtgaaaagttcagcataggcttttatctcttgattttgggcttagttgttaaaggcccatgagttcagattttctatttcaaaccgttcgaaacagagtagacctaaacagagtaacgaacgactctagtgaaggtagcttgttttgctagcaacgaaagctatttttattggtcattgcaatacgttttcataatactaataaagcaattagtggtctagtagcatttttttattggatggtagatgcaaaaagttttctataagaaacccgactagattagccaaattacatgcaacatctttaaaaatgatttcgagaagctgcctaaaaaaagaaaaaaggatttgaaacataacccattttaaaaccaaaacataaaagttgaattggcctatcaataagttgtcaaaatggtaagttttggataggctcatcactcataaatcaattttgtttactctctttattcttagtcaacaacgcgaatttccggatctgattagtattatttccataaaataaatgaatgtatgatttgtcaatttgaaaataatacatgacatgtgatgtattgtttggattccaagttctcaccattttgaggattattgctttactacaaaacaagtccctagtcacattggtcatttcttcgttagtttaaaattatatataactcaacttgatgattcacataaatcgaagatcaagacttttctagtttaaaaaaaagtggagtcacgttacgtagttcgttgattgtcacaacttaacaatgacccattagaatattcaaaagacttagtattatatacaaatgcatgtttcgtcacctttaattaagaataaagagttgtaatcacgctagatatataactcttttgaatcaatctcctagttatagctgatcatactaaagtcaacatgtatcacatctttcagatctccagcgaagttttcagagcttttggtttgaagatgaagattctgctaacactagtctttagtggcttactaatttggtctgtagtgttagtttcattctcaaacgacttcaacaaccaacttcttgttgctacttccaacggtaaataaaatcatctatcttttgtttaactcaagaattgtcagaattgctgcttatgactttctatttcttgtaacagtttcaagggaatccgaaacaccgagagatagactgatcggagggcttttaaccgcggatttcgatgaaggttcttgcttgagtaggtatcagcaatctttgttgtaccggaaggcttcaccgtacaagccttcggaatatcttgtctctaagcttagaagttacgagaagcttcacaagcgttgcggtccaggcacggatgcttacaagaaagcaacagagattcttggtcatgatgatgagaattatgcaagcaaatctgttggtgaatgcagatacattgtgtgggttgcggtttacgggcttggaaacagaatacttactcttgcctctgtcttcctctacgctctcttgacagagagagttgttcttgttgatcaaagcaaagatataagtgatctcttctgcgagccgtttccaggtacttcatggttacttcctcttgaattcccattgatgaagcagattgatggctacaacaagggatactctcgttgttacggaacaatgttgaacaatcaagccatcaactccactttgatcccgccgcatctgtatcttcatattcttcatgattcaagggataatgataagatgttcttctgtcaaaaggatcaatctttagtggacaaagtcccttggttgattgtcaaagccaatgtctactttgtcccatctttatggttgaatccaactttccaaaccgaactaatgaagctgttcccgcagaaagaagccgtctttcaccatctcgctcggtatctttttcacccgacgaatcaagtttggggcttgatcacaagatcctacaatgcctacttatcaagagcagacgagacgcttggtattcagatacgggtattcagcgatcgagctggatattttcagcatgtaatggatcaggtcgtagcttgtacacgaagagagaaccttttgcctgaaccagctgcacaagaagaaccaaaagtcaatatatcaagaagccagaaacttaaagctgttcttgtcacatctttgtatccagagtactctgaaaccttaaagaacatgtattgggaacgaccgagttcaacaggggagatcattgaagtttatcagccaagtggagaaagggttcaacaaacagacaagaagctacacgaccaaaaggcgctcgccgagatgtatcttctaagtctaactgataaaatagtcacaagtgcaaggtctacatttggatatgttgctcatagtcttggaggattaaagccatggttactctatcagccaacaggtcctacagctcctgatccaccgtgtattcaatccacgtcgatggacccttgtcaccttactcctccgtctcatggatgtgaacccgaatggggaactaactccgggaaggtagttccttttgtaaggcattgtgaggatcgtgggaacgatggtcttaagctatttgatgagttatagatcttctttaatatagctgattcaataggattgtgagttattgaaacagagaatctttgatgaattc

SEQ ID NO: 1122 - DNA, 77521 bp, Arabidopsis thaliana
catttaactgccataggttgattggcaaccagaaaaattatcttcgtatatagtatatttaagtcaactttacagaaactattataatttcggaggggacaaacttaggattggatacgtcattcttgttaatataatacatatacgatcattaatattttgctatgataatattgtatttgtatgaaactaacaagctttaataaaaatcgttgttcttctggatggtttagccaatctctctaatacaattattcaatggccgacaaacaatagagaaaggatacacaaaaaaaaaattaaaataagaggatggaaggaaccacaaatattgaagttttcaatttttaggctgtttcttttctaattcctttttcacgttttcttttgcgcttaaacaatattgaattgttaattatgagtattgtatagtacactggtcactttttggataagccgttcacatggaatcaaatgaaactaaaatatcaaattgattagaaagatgtttaaaatatgacagttgtcttagaacaatctcatgctgatagaataaacacattgatattataaaacggaaataaatatatacaatatgcacctttgaattaattatgcgtacttcgaacaaatggttagcttagtatctactatattgttttaaatgtctaatttgacatacatgaatgtaacaaaacaacgaagtcagtgaaagtgacaaggtgttgcctcttttaaagtcgctttacctcctatggtttcgtcttatcgtcttgtgcgttgggccacttgtgccaattatcattttcttaatgatctggtgaatttagaaccaagtttgtactttcatatctttaacaaattatgcaaccatttttaagaccttataaaaagtgaccaaaaaaggtacttatgtgataaaaaaaaaaaaaacagatggtgcgattcgtcgttaactgcaatctacatagcaacgtttcaaaccatcgaaacatcgtctctagacgctttggtttaaactaaccagtctttaactcccaagtcccaactatttgaataactcaaccattaattttatccgtgtataatacgataggctatagtattagaatataataatcgtttggttggctattggttaacatgtcttcgtgaacattaccgcacatgggatcacatggacctttgtatatttcgaatattttaactatacaatactcttgactttgtttatatatattttaaaaaatgttggaatatagcatagatttagatccctacatgcattattcattttttttttatatccactactcgggctaatttaatactactatttttatataatctgtctctacaacgtggtagaacagcttcattaatacgttacttgaagattcactaattatttatacatgtacacttcaataattacggcaaaaaggtaacgttaattccacgtcgagcatcttaatattactagctattagtcacatagataacttttccttcattcgtaaagtaacccgtaaaaattacgatgcttaacgtgaaacggtgaaatatgaattaattatttatccaacatataatccgatagatgtcattttcgtgtcagtacacatttagtctacgatataaccaaaaaaagaaagacataaagaacgattttttaataaacaaaatagatagtcgaaaatagattaattaacaagactttgatttagctaacttgattgcttgcaaaactggtcttagatctagaaatccaatgaccatcacatcattcaacatgtcccaattggtacaccgtctccatcatataaaccaaaacccgcacattaatcccattaaccgaacggtactctctccggacttctgttaacttctcctatcaaagttacgtttatagaagaaattcatgtatacatcgaaaaacaaaatgtcttaaaagcaaaagaattcaaacaacattgaacttttcctattgacgaaaagtcaaaacttttacttttctagtcttcttaaccaattatctcttgttggaatcgtaaataggttaataaaataaatacatatctctataatttaaaatggaaaaaaatatcaccagtttactattttttttgatttaaattataaactttatacttaggattatgttgatttccaattaaatcattaatttttcttgactaaaccaattgagatactgattttttttttcagcgccatcaattgatttagacacgagagattacttcgaattcgaaaaaaatagaaaatccgaagtagaggagaaaatccgtataaaaaggtagaaaaatttgaaatcgattttagagatctagggtttgtggtttggaaaatttctaataatgtgtattaactggattagtcaacgagagttcgtaattaaattgaaaatcaatataaaattaaggatttaaatcactaggtcaaaagttcatgttctaaaaccaacaaaaatggtaaactagtgctgatttaaatgatatttttaccaattgaaaatacactttccttttttattgttctagaagacttatccctctataaagtagccacactcttctgtcttctctcatcacctcattcatatctctctcaacctgaacattttcattttttctaaatcaagaacttcaaatcttgaaactttctaaaaagatggagcttattcctgatcttcccgaaactgtagcctacgagtgtctcctacgctcctcctacaagcaattccctcttatggcctctgtttgcaaactctggcagcgagaaatcagcctctctgattttttccgacaccggaaagcttcaggacatagtcaagagcttgttgtcttgtctcaagctcgggtcgacccggttaaagaactcgtatcgggtaataaaaccatccccacccccgtgtaccgaatctcggttcttgaacttggtaccggtctaaggagcgagctgcctccggttccaggtcattccaacgggttgcctctgttctgcagattagtctctgtcgggtcggatcttgttgtattgtgcgggcttgacccggttacatggcgtacctctgattcggtcttcgttttcagcttcttgacctccacgtggcgcgtcgggaagagcatgccaggtggaccgcgttccttctttgcctgcgcttcggattctcaacggaacgtctttgtggctggaggacacgacgaagacaagaacgcgatgatgtcagctctggtgtatgacgtggcagaagacagatgggctttcttgccggatatgggccgtgagcgagacgaatgcacagctattttccacgctggcaaattccatgtcatcggtggttactccacggaggaacaagggcaatttagtaaaactgctgaatcgttcgacgtcaccacatggcggtggagtccacaaggagaagagtttctctcttcggagatgactatgtggcctccgatttgtgctgccggtgaaaacggagatttatatgcttgttgtcgccgtgatctgatgatgatgaaagatgacacgtggtataaagttgggaatctacctgctgacgtgtgcaatgtatcttacgtggcgataaggaggtctggaaacctggttgtgatcggttcggctcggtacggcgaaccaagtgtagggtataattgggatatgagcaattctcgatggttaaaactggaaacacatgataaatatgaaggccacgttcaagctggttgcttcttggagatataaaaaaactttagaaaaggttccgaatcttttgtacgtcgtccttgcgaaatgacggtaaatttggtcggttgattttgtcaagtgtgactgtataaatattatattgttatagataaatttgttagcttgaatgtaaaaaaattattgtcgagtgattttatagtttttaatcttattttttaagttgttgtgtgatgttactaaagttagtggtagattttatatttgggttgcctaaattttcagccatgtactatttggaatctcaactttcctacttaaacttttagccacttgaaaaaccaccataaacaattttaatctcgataaaactatatgtactttcggatttgttcttaaaactacgcctccaattgaaccgaccagttaaccgttaattatacatctggtttgacttatccataatttaaccgaaattaattcgatttaactctattttagcctaattttgacctaaatgtaaataaattgccttattaagaagtaaaagtgtttttattaatttttatttgtgataaaaaattaaaaatattaagttataacttaattttagcgaaaattaatatgacaaaatatacctcaaattatattttgagctacattttgttatagaattttgataatatacaagcatatacattttctttttggcaatcatttatatttttttataaatttaaagctatgtcttttttttaaacaaaatattcatttttcttgaaatcataatatatgacctttgaactttatatatgtaatgaaattcaaaatatatgccaaattaatttttatatatatccgtaaacaccacaatcaaagtatatattatggtatttataaattcatttttctttatagattcagttttctttttatatattcaagatgagttatatatatatatatggttatggtgtttttaaaaagaaaatgtcctttgaattattaaatttagagtatataccaaatacatttatatatataacaccattttatttataaaaagaatttattgtctattttgttatattattttgcggtatatttttttattaccaaaatatatactaaaattttattatataattttgtgtggtatatttgttattttattattttggtaaaattaattaattaatttttaagtttttatcaaaaataaataaaaataaataaagtatttttcttctagagaatatattttttgggtctaaattgggttaaaatagagtcgaaatcgaattaagttcggttaaatttcgggtaagtcaaaccggatgtataattatcggttaactggtcggttcaattggaggtgtagttttaagaacaaatccgaaagtacatgtagttttatcgagattaaaattgtttatagtaatttttcaagtggctaaaagtttatggtggaaaattgagattccaactactatagggttgaaaattcaggcaaccctttatactttacaatttaatgttagtcctaataagcccaactaaagtacacttactctattgatctaacgaagcttacaaggacaagagtgtcgatacgttatgttagtcccatttcgtgttagaattgaaaatttaacattcgtgtcatttcgccaacaatctcgaaagaatcccaaagtgcagttgccgagatagagcgtatttgaagactcgggttataaattttttggaaacatgggctaagctaagccaagcccaatattccaaaatattagttttttaaaaaacactaagaaaaccaaaccagcaaagtcttagttcatctctaattttctttcctcatcacaacgacgcaactataaataaccaataagttgtgggcttgtggctttagttcatctctaatttttagggcttctgtcttcctcgtcaagttattcagatttgctcttcaagatgtatctttaacatgcgaaactaaagaaatcgaaatttatcagaaagttggaaaaatatatacatttacccgagtagattatcctaacaaagatttttttttataaaaaaaactaaagataataattgagttttgtcgttatgaaaccctaaaaaattatcatcctagagatccggatgaaaccctaacaaaataagcttataataaataaaattaacaaattgagttttgtcatgatgaaacagtaaatagagagaaaaagatatatcctgatggagaatcgagaagtaaactggatgaagagtggttgcaagcgtagaatagagcttccagaggaattattggcagagatagtggcgagattaccttttataagtataacgaggttcaagtccgtgtgcaaaggatggagatcattaatagaatcaacgtatttccgtcatctatttgtgtttgctcaccgaaactcttcatcgtcgtggtcactcgtgtgcgggacatttggttggtcagtcgaggaaatggcggggttctacggatgcaagagatatggtcttccccgtaggctaggttcatacatcccgcctcatggcttggtggataaacataagatcgtagcctgcacggacggattggttttgcttcaaaccgtaacgaaaagagagacgttcagtgtgggtagcccggtgttacggcagtgggttcagctcccacctcacccttggaaagggatcagttcatcagttttggcgataggtctagtcacccgagtagaagacggtgtcgttatggagtataaggtggtttgtatggatattgattaccgttgggaagttgagtcccttatcttggagatatattcgtcactgacgggaacgtggactcgcaaaaaagtccgttgtcctagtctcatcgtttctttatcctataaaagatgcttgagtttgaagaagatgcttcactggcttgacacccattatcgttgtcggagtagcgtgggagccattgtagcatatgatgtctatgctgatgatgatgagcagcagtttcgcattatcccttttcctgatcaaaaggcttgctttagaagagcctacactacttcagggggattccttgtgtgtattaacaaaatccatcttctattgaggctttggaggcttgaagagtacacaagtgattcagggagatggcaactaacgcaggaaataaatctaacatcttttggttgcgatcaccattactttccggtggcaatgcatccctctgaaacccatatcacttatatgggcaatccggaaaaggctttggtatcaatagacttgaagacacacaagcttacactccacactaaatcatcggcttatagagacacaatggtttaccactatttggatactgtttatgtatcagtggaagcaagttttgatcacgacgttttctacacaccccaattcacactcccaacgtggatggggtcggtccctcgttcaccttcaatatagcccattctttgcttgttcgttttctttttgtgaaagattgcatttgcttaatatagtactagtccaagatatgtatttctttatgaccctcctttttgtttttgggatatgtacgcatcatgaatttcgtaagaaagacaatgcatcagatcaccacagttcttgcgttttctttggagatgtcttgcggattggaggatatatttgttgagaagtctgttattcctctcagtccatatcctataaactctctttttctcatcaagaaagaattcatttatcaaaatgtttccctcttcttcatggcctttatgaaaaccgaaaaaataactgaatatacgctacatatagtcgtctctcttaggaaaataatcgcacaatgaagtaggaaaataaaagaataaagcatttgacaacattctgttattcattttttgccagtatacaaatctttggaaaattgagcacaagagaaaaacattttttcaaacgtaaattgtggtttaagttacaattgagtcatagataaaaagataaaaaagagaattaaaactgagcgctaaatacttttattctctatatatatttcgttggtgcaaagtatgagcggtttagtttcttgcttcgagggtctggttattgttttcccttgaatctctctctcttcttttctacttcattcagatcattatctaattgttttgggattcttttttattgttcattcgacttgaatctctctgttatatttttacttcgatcattatctatgtagctcgtgggtcttgctcttaatagtttttttgaatctcttttgcttccacacatacgactggatgtcggaaagagagagaaccttctccgccgtcacagcgaccgcaaaagagatctcaaccaccggcaaagattccatcgatgtcgcatgcacgaaaccgatcaccgagacactttcaaattaatgaaattcaggtcggcgagtggagtcaagattcttccctcatcgaaggtctcaaagcacgaatctatggaggctcagataaactagtatgggagttagaccataaacgagcaagaaaaaggaagataaagatcgtttttggtaacgtttcctcgatgcaatttagcgcatgctcaaacatatgcaaggttcagagacaaaaaaacaaaaaacaaaacaaaaaaaaacaaaactggacacttatatattgaaatcatttttttttataagaataaacacataaaaaacatcatttacaaaaaataaaggatttagcccaataaatcattttttttttgaaattgttggtgtatttaatcaacaaatttacaaaaagaagaattacgttaagctttaaagaaatacaaatatatatgaatttatatttaatattatttttcttcttttttcttatacttgaacatattttttttttattggcgatgctcaaagagaaaaaaaatgtttgtgctccctttggttatgggcccctggttcttagagctgatactaagaaaatgtcactaaatctcaaatatttgggtcaaagcccatatatggtcagatagaggcccattcaaaaggtctgagatatggagggagccgggaggagtggtctagtctagatataaataaacgaataaaatggtttggcgggcatttcttcaaatgccaacgaatctcgaatattccatatattacctgtcatttccctttctctgataaactacataacaaaaacaaaagaagaagagggacaaacattttggggtttacatcagaaaaacaagctgtacctatttccaattccgaataagataattagagtttaattaaccctaatagattattttagtttctttttacaaagttgttaactatgattctggcatgagacaactgagaaaacatattgctcggacttgtgtcggtgagacccgaatcagaagaaattgtttagaggggaagatattgaacgttggatcagagggacccatacaacacacccaccaatccaagggtcgcgatctatttgaggtggcaaatggttcccacttacccgcaggaatattatgggaccgctccttaactcttgcaatgtcacttgttggtgcatcccactcttctcttccttcttctctcttcaagataaagcgataacataaacaaatgattatttttacaagatttgatttgctgcctatattactccattatgcaatataataaaatactaatattccagatctttatacggttttagataccaataaatatctgacactgaactaaatcgataaaaagtataaataaagcaccatatgttattaaaatataattcacataaaaaatatcaaataattcatagatttgcctataagcaaatgactcgtccgtgactgttaaatgaaattaatcggtacaagttatctatggaaaacagttcaactatttaactatatcttctactacagtgtctttttcgttctaattgagtaattcataaacgtttaactaattcgattgatactcatcaacgccttatagcattgtcaatatacaactataaacattgagatgtcaccaaattttggtgaggctaaatagaaaacattataattacgacgacgacgataatctaatcatatatcatggaaagtcacaaatcttaccgtgtaaaatcattcgcctctttctaattcaattattgttttaactttaattaggtggattggtttgaattctacgtttaccacaccagtcaccacttggataaacctttaggccatgaatgatattatataatttagaaagaaatggaaactaaatcgtgattgaaagataaaagtatgtcagccacaaaactaggaaagatttcctttacatgataataattttttcgagattcattagcaacctgcaaaagggaacaaagataaagcatgagtggtcactagtactcactgagtacccaaaaaaaacacaattaaatgctaagaaaattccacaaaataattttttggttaagatattttattttatatataaaaaggtatttatccgattggagggttgcacaccattcaatacacttaattacgtcagccgttcgaaaaggccctccgatatatcctcctctctcacaaacttcttcaattttgtattcactggcaatatctatgtacggtttggtgcactgtatcttcttacacgactgtctcgtatcgtatgaagatgagattaaaatgaaaaagtattggaatctaacctaatcgaacaaatgccaaaaataatttagtacaacgtcgaatcgaatttgtgaaagtactatagaatcgattcacattagagacgaatacgagtttttattccactttaaatttcatcgtaaactgaaaagttttttttttttttttttgctttgcatttttcttttttgctttatctgacacgtagatattaatcagcacacggatgtagttttatctctttgccaaaaaaagagagtcaaatcctcaaatttaatcctacataaatgagaattttgttattgttaatcatagcttttacaattatagcaagcatttactttaccccaataaagtttatggcaagcatttatatatcgtggattggtaaattaacaattttatacagatggcctgttttaattaaagggttagatttttcactatggctttcatttaaacaattaaaaaccctgatattttaactacgtatttccatttatcctaatcatgaaattaatacaaaatgatttaggctcttaactatatcttctttttttattgttcaaagctctttactatttatccatatttgataatatgtacactgaatccatctttgtaaaataggaagagagaattaaatgatatattttagaccaaaatacacccgatttggtaaatactcagaatataccatatggatcagataaatcataatcttcacctaactaaattaattttctaccacgaagggggattgactacaaaacccgaaaagtactaatcatgtacttccagatccgacggctaaaaacgcatcgatcaacacgtagtaggtgtctttcgccctaaactcaacgaccaagatgaactcaagctttactttgctgtcgtgtccgacaactaccggatagatgaggatgaatctaaattcggacaaatagagcgtagtcaacacgcgcgtaaatgagttctgatggtgtagcgtaaaaaccgtgtacccaaccgtaccggattccatctatctttctggatgggagcatccaaagagaagaaggagagagctagtcttatataacgacacgatatcctcacctatttacgcctcattttcttcttcacctctctctctgtgtgtgttctgtgttctctctctcgcgcgaagcggttctctttcttttgtttatttgtttttatttgtttttctcttatacggaggagagaagatggtggcgcctgctttgttaccggagctctggacggagatccttgtaccgatttgtgcggtgattggtatcgccttttcgcttttccaatggtacgttgtatctcgcgtgaaactcacctctgacctcggcgcatcgtcttccggtggagctaacaatgggaagaatggatacggtgattatctaatcgaggaagaggaaggtgttaatgaccagagtgttgtcgctaagtgcgctgagattcagactgctatttccgaaggtaagatctattgatactttattcagatctcactgttctgtttttagatctggctctgttttttgattggtggttgtttgatgatgttttggattgttagaacgttgaaattactaattcagtatcttgtgaaatctgagatgatgtgtgttttctgagtgaataatattgggatctgtttggttgttgtggggacaggtgcaacttcattcctattcacggagtacaaatatgttggtgtcttcatgattttctttgctgctgttatctttgttttcctcggctctgttgagggattcagcactgataacaagccttgtacttacgacaccaccagaacctgcaagcctgcattggctactgcagctttcagtaccattgctttcgtgcttggtgctgttacctctgttctatctggtttccttgggatgaagattgctacatacgctaatgctaggaccactttggaggcgaggaaaggtgttggaaaggcgttcattgttgcattcaggtctggtgctgtgatgggtttccttcttgcagcgagtggtctattggtgctttacattactatcaatgtgttcaagatctattacggagatgactgggaaggtctttttgaggctattactggttatggtcttggtgggtcttccatggctctctttggccgtgttggtggtgggatctacactaaggctgctgatgtcggcgctgaccttgtcggtaaaattgagaggaatattccagaggatgatccaagaaacccagctgtaagtacaccatttcactgtgtgataacactttgctttctttttttcaatagaagttaagacttattttggttggttatgttacaggtcattgctgataatgtcggtgacaatgttggtgacattgctggtatgggatctgatctctttggatcatatgctgaagcatcatgcgctgctcttgttgttgcctcgatctcatctttcggaatcaaccacgacttcactgccatgtgctacccattgctcatcagttcaatgggaatcttggtttgtttgatcacaactctctttgccactgacttctttgagattaagcttgtcaaggagattgaaccagcattgaagaaccagctcattatctcaactgttattatgactgttggtattgctattgtgtcatgggttggcttaccgacctcctttaccatcttcaactttggaacacaaaaagttgtcaagaactggtaatttccttgtggatgattgcttttgtttttttcctgcatttctctattcaaatttctcgttgcacttttttaagtcttgcattattttggatttcaggcagctattcctttgtgtttgtgttggtctttgggctggactcattattggtttcgtcactgagtactacactagtaacgcctacaggtaagactcattttagctgtatttagtcactaacttttcccagctagtagagctaactcttatgtcctcctattcttgcagccctgtgcaagatgttgcagattcatgcagaactggtgcagctaccaatgttatcttcggccttgctcttggttacaaatccgtcattattccaatctttgctattgctatcagtatattcgttagcttcagctttgctgctatgtatggtgttgctgttgctgctcttggtatgctcagtaccattgccactggtttggcaattgatgcttatggtcccatcagtgacaatgctggtggtattgctgaaatggctggaatgagccaccgcatccgtgaaagaactgatgctcttgatgccgctggaaacaccactgctgctattggaaaggtatggagccttcttaacctctttctgcaatccgatgaattaataaaagagcttgcttgcttgaaccattcctcaggttgcctttgcttgtgttgtattttgacatgttattctggtttgttgtgtacagggatttgccattggctctgctgccctagtctccttggctctctttggtgcctttgtgagccgtgcagggatccacaccgtagatgttttgacccctaaagttatcattgggctccttgttggtgccatgcttccttactggttctctgccatgacaatgaagagtgtgggaagtgcagctcttaagatggttgaagaagttcgcaggcagttcaacaccatccctggacttatggaaggaaccgcaaaaccagactacgccacatgtgtcaagatctccaccgatgcttccatcaaggaaatgatacctcctggttgccttgtcatgctcacacctctcattgttggtttcttctttggagttgagaccctctctggtgtcctcgccggatctcttgtatccggtgttcaggtaaagtatattctcaattcaattgtgaataactattcttaaaaaaaatgctcatcgatgctctctgtttattctattcagatcgccatatcagcatctaacactggtggtgcctgggacaacgccaagaaatacatcgaggtaatggaattttcttgtagcttaaatcaaaccatttgaaaatatgaagtcaaatccttaagcattgttatatattcgcaggctggtgtatcagagcacgcaaagagccttggaccaaagggttcagagccacacaaggcagctgtgattggagacacaattggagacccattgaaggatacttcaggaccttcattgaacatcctcatcaagctcatggctgttgagtctcttgtctttgctcccttcttcgccactcacggtggtatccttttcaagtacttctaaactcaatccgagggaagaagatgacgatgatgaagaagaagaagatgatgatggcgatcgattctaaactttcttttttaccattcttattttcgtttaccgtaggtggttaaaaaaccttttttgttgatgaggctcatttaaagaaccaaccaaatgatgtttctttctctcactctctgtctttctgttttctttttgttctgtttagaatttagaaatccaccaagtattcggtcgagacttgttttagccgttactttctgctgcttatatttcctaaattggttgtcttcttcgagacataattggaatttattgttactgttagtcttttgtcggcgttaggtgtaaacgattctcaatttctcatgatctgtaaattctttcatgacatttattaccacaaacaacaaatgattttacacagctgtagtttctacctaagactctcgaagagcttctgctccagccacaatctccagcaactccccagtgatcttagcctgtctcgctcggttataagccatcgtcagattcttcttcaattcaaccgcattatcagtcgcattactcatcgcattcatcctcgacgcaagctcactcgctaaagattcctgcagtgctcttagaatctgactgttgagatacaaaggcatcattgcatcaagaatctgaacagggtcttgctcaaactgcatcaacggtgagatctcaggcttctcaacttcaagcttggtcctttccacagctaacttcccatctttgctcgttagcctaaacatctcatcctcgatagcatcaacacactcacctttcacatcacaagactctcctttcatcgacaaaggcaacagagtgtggatcacaggatcagatttcaccaaagacacaaactttgtgtaaacaagctcaactttatcaacctcttcactgacaaacaaggaaaacacatcatctgcaataacttgagcttctttagtcgttgggaaaacacctcctccttcaatacatttatcaacatcaaattcatctctccgactaaaataagcattccctttcttacctacacttatcacaacacagtctattcctctctgcttcaactcttgaactcgcagagtagctttcttggtcactgcattgttgaaaccaccacacaatcctttatcgccagtaacaacaaccaaagcaactctcttcacgggtctaacaatgctcagaggaaaatcaatgtcttctaattgagcagattggttaattgagtagagaatctccacaagagtttcagtgaaaggtctaccctttatgactgcatcttgagctcgacgaactctagctgccgccacgagtctcatcgcttccgttatcttctgggtattcttcacactgtcgattcgttctcgtaactctcggattccagctcgaatttgaattgagggcaacggagatctcgacgaaatccggtttggtgtcagtgattgaaacggataataacgaactggtttcaaggtagctatgaaagagtaggactctgagctcgaagccgaattcgaattcgaaggagacgacaagagccaagaggtcgagatcgaacctgtcattttcgtttgggaaagaagaccctgaacttgagaggtttaagatttcatcttctcgtgaagaaatgagcaaagaaagagaacttgaggggttttctgtaattatcatgtttattaggggtcagtatataaaaattactacaaaagtcaaaattagagtttttgtttttttttttctatgagaaaaacgagggaaatatcaataaccctcctaaatcctaataaaaattactacaaatagccaaattaatagaaaaccaaaaaacaacaactatagtcagcatatgaaaattacgaaattttctttttaaagattcatatataggaagagattgaactttaaagtaacaaatcaaaataaaattatggacaaataaaaactctagtccttcagaaaaagaaatattgtaaatgcgggttactaaatacaaatgaatacaaaacagtacctacaaatttccttggaacgacttttaattttgacctcaattttttatttccattatggtccttgtgttgttgtgtatttagcattttgtttttcttgggtcaatcagcatcaccacgtttaggccacgacataaaattgatccgtttatttttgaggctcgctcgcatcttcttcctcctttggcgcaaccgcttcttcctcttctattctcacagatttctctaagctcccaactttggagctaaaactcaatcaacactactcacaatgctactccatttctctccggcgaaacccctcatttctccacccaatctccgccgcaattcacccacattcctcatttccccgccgcgatctcttcgaattcgagcaatcgacgccgcccaaatcttcgattacgaaacccaactcaaatccgagtaccgcaaatcctctgctctcaaaatcgccgtcttgggtttcggcaatttcggccaattcctctccaaaaccctaattcgacacggccacgatctaatcactcactcccgctccgattactccgacgccgcaaactcaatcggagctcgtttcttcgataaccctcacgatctctgtgaacaacatcccgacgttgtcctcctctgtacctcaatcctctccacagaatcagtcctcagatcattccctttccaacgtctccgtcgtagcacactcttcgtcgatgttctctccgttaaggaattcccaaaagccctcttcattaaataccttcctaaggagtttgacattctctgtactcatccaatgtttggacctgagagtggtaagcattcttggtctggcttgccctttgtctacgataaggtgagaatcggagacgcagcttcaagacaagagaggtgtgagaagtttctaagaatttttgagaatgaaggttgcaagatggttgaaatgagctgtgagaagcatgattattacgcagctggatcgcaattcgtgacgcatactatgggaagggttttggagaaatatggagttgagtcttcgccgattaacaccaaaggttatgagacgttgttggatttggtggagaacacatcgagtgatagctttgagcttttctacggtttgtttatgtataatccgaatgctcttgaacagttggagagattggatatggcttttgagtctgttaagaaggagctgtttgggagattacatcagcaatacaggaagcaaatgtttggtggggaggttcaatcgcccaagaaaactgagcagaaattgctcaatgatggtggtgttgttcctatgaatgatatatcatcatcatcatcatcatcatcatcatcatcttaagatcacaagtttgattggattatgctagattcaaaaataaaaagttgtgacttttttggaaaacgtcaagagtggaaaataaaaaagggattttggtgtgttcatatgtatgttggggtctcttttggcttggtatcaataaacttgtctttttttctctaaatgtatctgtggaaatgcttatccctctggtcgccggaaacaaatacggacaaattgtctccttctccggccatatttgtattggatcaacattgtattgctcaaaagtcattactgtttttctctgtctccaatgatctcgggtcacccacccgattcggatcaggacaacatcgtttcgttatgggccgattatataatgggccgcttgaatgtctcgtcttatttaattaaaagaaaaaaacacattttaaatttgaatgattcacacgtgtgttgttgccaccatagttggtcggagcttttcctcttcccaaaattgtaaccctaaccacgcaccgacggcgaaaactgatcgcgggttttcgcatcttttacttgcaaagtcttggaaatggaagtgatggacaaatgggtagctgaatttttcctccgacgccaactaaatcctagggtttacgcttttccactgttatcggctctgaaaccagtagattccgacgactgtgtaaaactcaagctaactgctgttttgcgggatatctccaattccatgattcaaggtaccgtagacgaaggaatgcttgatctcctcgaaattcttgagaagcttctgttacaggaacattcggttatcatgggatctctcaaatctgcgtattgctggactgctgtggaatgcacgcttaggtttatgtggccagtgaatgcttcggatggcttcttcggtgatgcccttgagaggatttggaggaatcggattgggacattgaaggagaaagagagcgacttggtgactcgtgagttgttgaaatgggagagtgatctaaacaaggcgtttgaggaacctgagatttaccagaagattcgtgagactaacatcaggtacaatgccatctctcatcttaatcagcttctcaaagagcagtgggcactacttggatgttcttctcttgaatcagaagctcgaaagaggtttcttaagcgtaaggattcaccatatgcttcccggagaggaggtaatagagagaaagctaatgatgttgaagaagtgggtggtgtggagaatcctgatggggttggtaaggtgaatgaacatgaacaggaacacgagccaagtcttaataagggggaaatgttggtagctcgagagcttaaggattttttgttggagattcaaagactcatcgaccctataacaaggcaagatcaagaacctaacaatgcaatggagcattcagttgatgtcactcctcagcctgatggggcaaataggactgatgcagaagatagtgagggaacatcatcgtctagaagagtcaggcctcatctaccaaccccggaacctctgaatgtatcaccgttgaagaaaggaagattagaaagaccgcgtcccagaaggccaatgaaattctggacttctgaagaagtggcagctttgagggaaggagttaaagaatatggaaaatcatggaaagatatcaagaattcataccctgttgttttcgctgataggagcgaggtggatttgaaggataagtggaggaatttacttggtcgtcagtagtaggaatcttaccttctaacttatgggcattttggttttgggatcttgtgtagttttgccgcttgtgttagaaagggactcactttttgtacggtgaaggctttaatatgttcttgattcaggctcttgtagttagtgtcaagctttagacgatatttcttgttcaaaaatctattgaccagttgattacaaaatggaatgattttaaatatttggtcctataatcaaatcaagcaagctctgaaacccatctctaactcctcccggttcaaattcttgccgatgaaaacaatcttgttggttcttgtttcatcttttctccataaccggtcaggtgatccttcaaatatttcatgaactccctgttccaaccattataaaccacaaacgtcagagataatttacatcccaaggcttcgatgctttagaattcatccgaaatgatcaaaataatgacaaaggttggtcacctgaaacacgaatctctcgtccatgtcttgtacggagaggatacctttcattctgtagatatcctcactacgttggtacaatagcgccccaagccacatgttagcctgatccattttcaaaactaaggttatagatgatgcaagtaatcaatcgcacatctcaacaatcgttttaattataagtaacacgtcaggtgctacagttttatgcatcacatgtgacacaacttgagccatattgggttaataccttctcgaggtctaagtctccttcgcaaactatactgactgaaccaacaccagggtcatgggtgtgatcatgagaatggtgatgctctgcagtttcagaagcaaactaatcaatgcatgtaggcgatcgttattaagtaataaggccattatttggtaacactataacataccgtgttcatgctcatgctcatgctcattgtggtgatcatggcagtcatgaccatggtgatgatcatcatgaccctcgcgatcttctttctcttcttcattcacagagctttcaattctggaaagataaaatagttggccaccagcaataaatcagagtaacaaaatcagccctcttaaaccaggaaatccacaaccaataaaccataacaaatgtaaggagctacaattcactttggacagaagttttcggagtgactcgtaataagatttttagtaagacgtaaaataaaaccggacctttctagatcaaaccctccaattccaagaacataatccaagtcaaccttcccatactttgtccgcttcatgtgagccatgctgtttatggtctggaaataaccacatcataaatgctaacgcagtgcacagagaaaaatagatgttcaaagagaaaaaagaaagaatcagaagaagcagaacctacctttatccgctgcatcactgaagctagttctggctcaccaacaagatcagtctacaacaaagtacaaacaattttcagcttgtatgatatgtcgaggagaacatacatagcagaccattgaaaagcttctactataagcatccaccacacatttcaaatacaagttatggtgatgttaatcatgaaaattaggtcgaaatagaacttcacaataccttgttaacaatgatacgatccgcgtaagctatttgttcaaccgcctcattgacatagccttcaggtttgacctcatctagatgcaaacgagcatgtttagcatcaaccagagtgacaaccccatccagcttgacatcattgaaaatttcatcctcagcatagaaagtttgaataatcggagcagggttagccaatcctgaaagaaaatatacataatatattcatttattctttaataacatagtagttggttcttaacgaatcatgtagctccagagtgatagaaaatattgaacctgtcgtctcaataacgatatggtcgaaccttcctttcttggtctggaccatttcagaaatcatcctcacaagatcacccctaacagtacaacacagacagccattgttaagcatcattatatcctccgctcccgcagtttgagctgccacaagtgatccatcaatgtcgacttcaccaaactgagaattcacatttcagaacaaattagtgaaaccataaaacataaaacaatctctattcagcttctcagacaatacctcgttctcaatcacggctatgcgcttcccatgatctcccgtcaatatatggtttagcaatgttgtctatacactcagaaaaaaacaattccagtgaaattcagaatctgatcgctcaaaattgagcaggaatttccgaatcatgaaccctagattagcctcaccttaccagagcccaggaacccggtgattatagtggccggaattcgattgtcgggcaaaatctcactggcaacatcgaagatatcttcatcatctacaacggcgagcgaggaatcagaggcaacggcggagtggaatctccgacggctgtcagagtaaagcgccgcggaatagaacgatgacgacttcgttctgagggaaactgtggctgtactgagcctagcagaagcgaaccgatggttcaaggaggtattagctcggggaacgatgaaagcaaggaaagtcgtggctatgtcgagtttcaacagcgtcgccattgttattagggttcaaggtattctgtgaaggttcggacatagagatagacagttagacacttgctagcttcagaatttacgcggtttttttacattgttttttttttccggttccatccaacggtcgagatttgacttgtattatttcgaaagaaaaacaaaatggtaaaacataaatgtatgaaaaaggattaaaattatagcacatgagatattgtagtcatttttgttacaaaatatattaatcagaaattcagaatgcgtgcatcaaaattagatgcaaaacttgaagaagagcataatcctaaatctagttataacaaatatatggcgacaatttctgatatcagtttcgagaattagtttgttttgcaactgtattgatgtcaacagaagataatgtgattaaaattgtttctaaaacaagaactgtcaaatttcgagtaattatatttattgattttcttgtttatgcatatccaaggttactcttcatcatctcacaattttttttcggttataaactaaaaaatgtggctaatttgaatataaagtttgtatatttaaaagcaaaaagtaacgttggtccaatgcaaaaaaattaagagttccctatactattagaatttagaaatgaaatactatacgattcgaagtttgtgttgtaacgcaggtttaattaattgagatggagtaaaacaaaaaggaataagaagaaaagaaacaacaaggaacatcaatacaaaagaaataaatcgttgaaatctcaaagaggggtccacttaaaagtgggaccttgaccttctttattcttccatcttatctcaaaaacgcattagattgttccgaacctaactcctttcctcactaagggtgattcatcttacacgtgtcatccgatagtaggttaagaaacaggctcggctcacggccactttgcacatttctatactcttctctctttcttattcctcaccttccttgttcaatcaccgtctcctcaaaatcacaacaccaacaaaacaaaaaaaaggttttgatcaaagagatcactgttaaaccctcacaaaatttcctcaggactaataatctgcgatcgatcgtcgttatgataaggtacgtatcagcttattcgatcaactagcacaactgtttcctggtgaacagttactttatattgcttccctttacttgtcttttatattaagcttgctaatctctttgattcgtttttgtttgaattagctttactttgggtttctgggttttactgttgggaattaaacgcttcacatagtgatgattcacacttatctcatttgttactgtaattgtttgtgtttgttttcatccgattgatgtgagtttgaatcattttatcgtatttgactatctctttttgatgatcgtacgaaagtagagatctttgacaaggtaaatgtggttttttttttatgtataagaacctgcaaagttgaatgaaaaattcttggggaaatttttgtaagtcaaatttttgacgtgagtgagggattgtgatcgtgctctgtttcagtctctaaagaagattgatgattctggattacattatcatgggaggagcttgttcaaggaagagagatcaacaagttgaggatattttaaacagaggtgtctctggaaaatatagcaagagttcaagttcgaaatggttagctacttcgctctctaggtctggctccgatgttaaacggaagaatggagaatgcccgtcgcttatggagctctgtgtccgcaagatacaggaggtatattgtttccacttaccaggctctaattagtgtataaacgctagcctaatgtttgaactctgtttcattgcaggacattgatagatataccaagttctctgacctacctagagatatcagtcagcagatttttgatgaattggtttattcccagaggttaactttaaagtctcttgaggcatttcgggactgtgcaatccaggtaaagtccttggtgtttctcttgtgttcatgtcctattagtgtaacggatatctttgtctgactcacaatttgtgaaagcaggatctttacttgggggaataccctggagttaatgatgactggatggatgtcatctcctcgcaaagtacatcgttgctttctgttgatttttcggggtctgatatcacagactctggactggtttctttaaaaggttgcacaaacctggaatctttaaactttaatttctgtgaccagatatccaaccgtgggcttgtgcatctcagcggtaaactttactcattttcacacatttcttttgttttctgcttatcgaagttttccttgtactttatatgtgtatgtttcctaaacgtagctgctacatatctgatattaaacactttcaggcctctcaaatttgacgagcctgagctttagaaggaatgctgcaatcactgcacaaggcatgcgtgcattatccaacttggttaacttgaagaagctagatcttgagaagtgtcctgggattgacggtgggcttgttcacctgcgaggtacatagctatgtgttttattgtgataattgccagttttctgtaccctactttttcacttagtcaatgtcttttcttcatcccatttagcttctctgcacttttctatcttttccagctttaaccaagctagagtccttgaacataaagtggtgtaactgcataactgatgcagacatggagcctctttcaggtaacaaaaatatacgtctccttcacatgttttattactttcccaagtagatgtgcttactcctatttgcttcagtacttacaaatctgaggagcttacagatttgctgcagtaagattaccgatatcggtattagctaccttaaaggtaggggttttgattatcatactccttttatcaccatttgtctcacatcttacgttgtacacgaagcgtgattcacttcttccacttgcttgcttcagggctaaacaagcttaatttattgaacttggaggggtgccgtcatgttactgctgcatgcttggacacactcacaggtttgtatagacatcctcatggtatgttttggactgtacatgtaatgacaccttcgagatgaactcatatgagttttttcttttggttttatagctcttgcagggttgatgtatttgaacctcaatagatgtaatttttcagacagcgggtgtgaaaagttttctggtgagtgttacttgacttcctcgcagttaaatggtaatttttgcttttcgaaaactctccaatctctgctataatttttttcacgctcctttgcagatttaattaatttgaagatactaaacttgggcatgaacaacattacaaattcatgcttggtccacctgaaaggttgtctcactttcactatatcatgtttccactattttttttggaatcctctctttttaccatttcgtgttgtctgctaaattgctaatcaagaaaattttattctcaggtttgacaaagttggaaagcttgaatttggattcttgtagaattggtgacgaaggactggtacatttatcaggtgattgctacttttgttgttatactgttatcatggatattcgtattcgatattcatttatagtcatgtggttgtaggtatgcttgagttgaaatctctggagttgtctgataccgaagtaggaagcaatggtcttcgccatctctctggttaaccattttccctttgtcatttccattttgtatcttgtgatttatttgtttgttgattagtgcgtttatgttactatatataggcctgtcaaacctagagagcataaacttgtcatttactgttgtgaccgatagcggtttaagaaaattatctggtttgacatctcttcgaacattgaatctggatgctcgtcatgttactgatgctggtctttccgcgctcacaagtaagtccttccagtgcaaagttatttgctttggtatgatgtggttaccacctcttgagtaacccactgtctgtttttgttctaggtttgacagggttgacgcaccttgatctcttcggtgctcgtatcacagattctggaacaaatcacctacgaagtaagtttttgatgtttattatctattcttttccgtggagatctgcctcataaactttctttgttggttttcttctgatacagacctgaagaaactgcagtcacttgaaatatgtggtggtggattaaccgatactggtgtcaagaacataaaagatctttcatccctcactctcctcaatctatcacaaaactccaatctcacagacaaaacactggagttgatttctggtaaatatacaattcttgttcaatgagacaaatcatatgtacctgaaacctgaaccataatctcataaaacccgcaggattgaccggattggtctctctgaacgtctcaaactctcgagtatcaagctcaggactacgtcacctgaagccattgaagaacttgagatctctgaccttggagtcctgcaagctctctgctaatgacatcaggaagcttcaggcgactgatctgccaaacttggtcaacttccgtcctgaataaaataatatgttcaaaggcaaattcacgaactctgtaaatagatcgatctcctctggtctcagactaagacactgctcttagatatatcgtcaaaagctatgctcttcttcggattatttgctgaagaaactgtaaataaagcttctttcaagctatggccggacgaaagagtcctccatggctcttctacgtggtcagctttcaggatctgtttggtttgtttatctactgaagtgaaccaacataaactgtcactcttgtaaatatatgtaaattcgaaatatcgactgtaatatataattgaatatcttgcacaatagaaaatctatgtgaaggtaaaaatctcagaaaaggaaaagagagagaaacaacatcagtcactgtttttatccaaacttcactactgaattactgtgaaaatatgttacatctaaatgttaagaatctctgggtcataaatttttctaccaaaaaaataagaaagaaaagacttttaaatagaagaaagggaatcagagaggtaggtggctctcggatcagatcatctctgaggctgatcagatgcagaggctccaacggaaggtgcagttggtgcaccgctagccgacccgttctcagccggtggagcgactccccatttaccttcagactcgagcggttcgaatatgtgcactcccccgtctgagagaccaactgcaaacatgtttggttcttgcggatgtgcagcaatcactagtggatgtacgtttgaattgctgcacaagtcaacaagaggagctttatgatatataaacaactaaccgattgatgtttagaaacgttctttccgaaatttaaagattcctctgtttttttgggtaaatttcaagattcctctgtttacctgagactagctggtagatacgcagaagggttgacccggcaacgcagccgtagatttgcagagctaaatacacaaactgttgcatccataaaactcgcgtagaccaattggctatcgcatgagaatgtggcatgagtgattggagctaatgattctcgaacagcccactgaaacattgcaatcattaatcatctttcaaatgcaataaattgcagatcttagagagagcggcctataaatataaaatacctgtttcatgcattcgagcttggtagtttcgtatatagcaagttgcgtctcgtgcacaacgaggaagtgagcttgatcttgatggaactgaacacgcgtatctgaaggtgcactgtttggtcttccctgtggaagtggcaaaaccttgcttctctgcttttcccatccatctgtgttccaaacacaaagctgaaacaaaaacatttcaaagactattgatcttttcttcatcgattctcaaaaaaaaaaaaaaaaatggtctaaggcgggaacctgtgcatctgctccagacgaaaccaacacgtttaatacgttggagaaggcaagaccagttattctctttgaatgacctttaagcttactcttcacctgcaggagcaaacaaggaacatgatggccatcatattaacaaacaaaacacttcatcttcttttctacattcttctcttgagttttgatgcattacctcatcaacacggacattataaatctgaatcgtgctatcatccatcccaatagcgatgatattgttgtcttgaggatgaaaagcaagaaaagtagcagccggtggtgggggcatgaaagtcgccattgtctgcaaattattagccaagaacagtcagtcaaattgcatacacagaacatcaaaagatcagcatctatgtgtccccattaccttaaacgtcatcatgttaaataaggatatctttcctccggaggctgacattacatatgaatcattcttggataaagcaaaacaaggtacagcttcctcgggattggtttcagcaacatcgttagtcatgaggatcccactagctggttgccactgctgaggcggtaaagaagctgtcgcctacacggaaaatcgagatgtagagatcagtgacacttatcattatttgactaagaaagagtctcaatttcacctttccagttgcgttgcgctcattccgctgccatttccatagaagatgaattgcgtttgatgccagagccaaaatagcatttcccgaattcgtgaaaatcaatcttgatatctgccaaaagtcattggttttattgtcagaaaaaagaacagctatatatatataccctatacatggctcagaaaatgtatattttatataccttggctactctcagattctcagggagtctcagtgacctgcattgagaaggctcgctgacttcagtaagcttccatatcttagacttatcatttgattcttctgtgatcactggcttcacatccaccatattccgcgaatctccattctaaaaaggcaagtgatgaataatagaaagataaaataaagtgagtgaaagaacaaaaaagaattgtatttcttaccattccttggatggaaactacattggctgatcgatctgcgtgaccagcacttgttgcagcagctgccgctgccgctgctatgctgtttattgcaggctgcaaatgtagaatgaagtgttgactaaatctttcaattgggtgtaagtaatttaaagcttagcttagattttaagtaccttggaggattcagatgatatgttctcaaaagtgtgcaatagccttagaccatctgagtttgccataatcttgatcacattctcgttgccagacacggccaggagagagccttccttgttgaaccggatacgcgggcttgcctagtttaaatatattagaagcgcaagttaagaagaaactccaaaagaatatctgaaaacttttctagttaggcattttttgttcatgtacctggaggcctccatcgccatcaatggcagttaaaagctgtacagcgtccatatcccagaacttgatggagaaatcatcacccgcagctagataacggtttttagttgtatcaaactgcacaacacctagagaacgcttgtggaatccttgataagttcttttaacagctccttcgctttcattccactcaacaatgaaagactctccatctttactcgtcccacaagagaatagcctagtaccatcggcactataagccattgtagtacaccagcgaccaggtgcatcatagtcaactcgggaacccatattatcatacaaccaagccttaattttcccatcaagagctgttgaaaatatgaacttgatgacaggaaaaatacaacacatcaaaaaactgaaacatttaatagaagggagggagatcaacggttagctaagcttacctgaatgttttccttgtaatgaggacaaacggaataaacaggagcttcatggccttcaaaagtatgccttttgacacctgttgcagcgtcccaaaccttgatggttttgtcatcaccacaagttattacacatagttgcttgtttggagtcgagaaggaaatatcattcacaccaccaacatgagcatcaatctgaaataatcacaatattacaagaaaatccccaagggaaaaaacgattgttaaagagagaggcttgtgaatggtacgagacctcaaggtgttgcctcatgtcttcacctccgtgataagagtatagttgtacaatatgtctcgagtaagcaactcctgcaattcagaacgtttggtgacttataaagttgcattcatgtgcagatataaatttaaaggcgagttctttaccaaacaaggaaccgtcagggctccatatcacacggttgacagaaacgacaggttctttcaccagagcagcctgaagatacaactaattcagtcactgtagattcataacatatataaaagttaacattttgttgttgctatgcataggcacctgcaagggcattgaacatttactcaaatcccagactttgaacgtcttctgtactaatctttcgcgagaaccaacttcccacagcccgatatcacctacatttgtaccaactggtacaacaattcaaacgaatttagaaaattgctgatgattattattattattattacacagaagcacatacagagagcaagaaacacacctagaagcagggtctgtttaattggatggaaatccatgctcatgggagatgagccctgactcaaagttctcgcaactgtcttgggcaagtcgtcaggtgctttgaaagccggagaatgaccatgggcctgccctgaaaatgacatcggtaacatgttcacgcctagattcacctcgtcagagattcccattggtcttgttctttttgagacatgttcagaatctgctgacgggtagtctaaagaagcattagttggaggagttctcgggtgcttcaacgccgctataccaaagataggaaaggagttccattgtaagcaaattgcatagatcacacaaagtgtgtctgaagaaacatacacatttgataagcaagtagtacctgggattgatggaccaccaagtgcaatggctcctgctgagacagctggatgtgggacagaggatggactagacatccaaccagcaagaggtgttggaacaggtgacgccgttggttgaaatggctggaaacatagagacaatcaaacacttggcctcaggaaaacataaataaaaatgatagaaactaaattaccccgtgtgcgcctaaaggaggaaatcctccagcctttggtatccctccaagcagtggattgttcacaggagatggagctcgtgcgccatttggagggccacaagagtgatccacaaaaagagtcttgatatctggatttggccttggatttttacaaagctggtgttgccaatttaagctgcgagttatgcagtaacaaaagatagaatgaattaatatgccaacaacaacttgaagtgaataagacaaaaagattaagggacaaagcaataaacctctggttgatcaaagtcctcagccttgaatttctaagagtagggaactgcaatttatcacggaataaaggattcgcctcaatcagctttttgagttccaccaacatgatcgctcttgcagacttggtgtccccatacttggataactgttcattctccctaaaagttgatcaaactcgaaacacttaatactctgcatcaatctttcttttgaactacggctaagaaaacaaaggctttggacactacattaatccaatataacattaccggaagttctccaatgtcaagagctgtgttatttccttgaaaagctcctcattaaaagttgaaaacactttcaaatccttcactagtatatccacagccttgggacgatcatgcctaccaacaaaaaagtcaccaaggtcaatcacaaatcagactctttttcttttgctatctcactgaaaggaaaaaaaaaaaacaaatccccaaccatgacttacttatccaaagcctcgagatacttctgctttcttatctcgaagaatatcttcatagagtatctattatcatctactttagtgaaaccagagagatacttctcaacctcatcccaatttccattgtgaacctcatcctcaaaatacttcatattgaagaaaaacccagattcttgttcaagcctgaacatgacaaagcaataatgcattaaccaacacaagagctaaacaggtcagttggtaaattagatccaaggaaatctacagagcaaaagagacatacttgtgaacagtctctttaaacttctcttcatcgagaaactgtaagatcaagaaaacgagctctctactaagagaagacatgttttctctcacttccttaaaagacttttttctaactcagatgcacaacaactaaccaaactatcaccagatctgcaatataaacaatggccgaaatgagctcaaatctgagtttccagattatggaaattaaaaaacacgaaaagagaagttagaaatgaaagctaaaaacttggaacctatatctgaataattatccagaaacttcgcatctctgcagataacggcaaaaaaaagaggaaatttaggtcttcctggaattggaagatgtgaatttaatagcttaaaaaaagaatctttttttactacatgaaaaaagcaaattaattatcagaaagggggatgaaaaaataaagcaaaacccagaaaaaagtttgggcaaaaggataaaaaaatatatacaataaaactcgaaacagctagattccattaacagaggcaacaaaggtagaagaaagaagcgtgaagcttactcaccataaagagagagagatcgatgaagaagaagaagaagaccacagagacgaaagaggtgatggattgatttttggactctttttctctctatcgaaaaaaggaaacttgaaagaaagcaaaactaaattaaaaagcttcttcttctctctctctctctctctctctatctagagaaaaagggattttctctctcttcgagatatatatacggacattaaaacttgcagaaatggagattttaataagagaaggtgacagataattggatgctgataaaataagttagctatcactctaagaaaagctaactgcgataagcaggaatgataagtagaactgcttataactacgacttgatcggctacatttctcgacgttatcggctcggaatattagttgccagctgtactccacagaggtgtgatccactccttcgcgatgagttttacacctatctggaaaaccgtcgattttgtcagatggcgcggaggacggagatctaacggctagagtttcattcaatgtgtcagacttgtctccagatccctcgtggcacgacaaagctttttatattgagtcattgccctcaagtttgactaatatttacggatatgacattgaagagccaattgctcttgagatgcgttaactcatcgaacatcacgtgatggagaaatgttcaactcgtaaagatgctacgtcgtctttcttctcggcgagatacgaaatatgatttataaactcggtttatcacgatttatacgatatggctgatgttcctcatataaaaaaaacaagaacaaaactaatactactaaatatttcaatattatagtattgtttgaacatttcttggtccaacatgttgctgaacattatcattattctttgataatattattctttatttttaactttttcattagaggttaatttagtgcatgattggttgtgaaaaatgtaaacgtaaggatgtggatagtagttcctattaattctttgtatacacaagaaccacttgcattgactattattgttaagatgttcgtgataatttatactttagttttgtttgtttatagatagattgctactaggagcaggtggatcggaattagctggattctttccgtttaaataatagcaggggaaggaagtacaagatactatagcttagaagtaataataacgcaaggattaattgtaaatgaaaccgaatgtgtattgttgaagttataaataacatttttaaaatatattagaggggtgaagatatcgatggaggatgggcaataaatgagagtttgtgtaatttagagtcgcacgtttgagtaatttgacatctatcccgtccaaacacaaacactgttgtctcaccatcaccacacgtaaagcgataacattttcaagtacaaacataaatatgtaatcgtgatttacgatttatttaatttagcgtgtgtgtctatctatttttagttttttttcttacagtagttgtccactacgactagtctactactaaccatcacgaatcgcgaggtcataaatcataataataattaaaaaaacgatatacaagtactgaaattctttaatacgagcaaagcataatattttaagtttataaccagtttttttttattttactaaagtgtaatatcataactgaggtaggttggataaactaatgaaacgaagcgttcaaaccatttaagaaacatgataagtattaaaaataaattatactattagaaatatcttatatatctttaaatgttaaaaatattttatttataaaaaatgataggtgtgaagaatatatttttatatatttttaaaaaactggatacgtgttaaaaataatttagaaagcaaactgtactttgttaaaagctttaatcaaacaatatatattgaaaagaatcgttatgagcgcaacacaaatatattctaaacaaattgattgtagtctaatgattaagttagaatgatatcaagaaaaagaaaaaagttagaataatagagattttgtcatatagatatcacagttagaataaaaatcccatcaaatacaaatctacactcttacttttatttttgatagaaaaattctatgtattttacaaatttcggagaatttgctcgtattaaagaaaataatgctatgtgtttaattcatatcttataactaaaacataatttaaaacttactgtattaattaagagaaaataaaatctgacttatttaatggaaagaagaagaaacaaactatagcatcacaataaataaataaataaaggagttagaattgagcattgagggatagatggtggttgcaatttttttctttaagttaaaaagctatccggccaaaagcaaagcaagtgggtcccatccggcgtatctgtccaaaagtctcactatcacgagatcagtgacgctctgatcaacctcagccctaacttcttcttctttctttctttttttcgattattatttccccatttaatgaaaacgaaacgttatttattttaatcattcacgatttaataacgactgctagtacacatctgcctctactctataccggtaactgtgcgataatcccccaaattgaatgataaatccaacttcagattctctttattttcatttctccattgactctaatattgaactcaactattgaaattttcatttagcaacaaaatttgccaagtacgtatggccaaaaatatactctagtattagaaattgttattttaatcgtcaagaaagtggtcttttattaaggcattatttattagttttagggatatgtcgctttccattaatgtatgtgtccccttctcttacacgttcacataaaggttttattgctttgccattttccttattcttccttttctctgttttttcttctttttctttttctggttcaaattcttcttcgttttctcatatcccggtcatatggcaatatatcgatactaggtgtttgactcagttggtgatgaaaatatacatataacagacttaacagtataacacgaacacacgttataaaaggcgtattttatggtcaaacaatgtatatagaatcttcatattcatttccttcaaattctggttaaaaaagaagaagaataaatataagtgtttctcgcaattttaccgaatatatgatcagcaactcatgcaccatacactctccaagaaaagaaaaacaaatcgatttttggtgaagttctgatcttgcaaatctttttgtacaaaacttagtgtaataactattatatttgatgttaattatgtaaattactactattcaaacatatacaaatctttattagattggatattttatacatttcagtcaaattaaacgcatatataatttattaagtgtaacaacaacatactacggaaccaagacaaaggcctgttgtaaacttcattcttgaacaaaacgcaatgcagcctttttcccctccgacttcaggcaaacacggacttgttttgaagcatacatgttcatcctcttttattccagaacctatattttatttaatattagttcattcataaaaatgataaaattacgttcatagtaaaaataacagaataatcagccggtaccagaaacgatatcagatgttgaacgacaatgaacataagatataacaaagagaatggtgaaaacaaatgctatcaaattctttttggtgatagccattttatgatattttctgtttacgatttttctctatactcatgcccatcacacatctatatatacaacagacatgtaaataggtatcttttcacacacacacaaaaaaagtatcttttatggtcaaagatgaaaaaaaaaacataatctttcaagaatttatttccataagtcaaaagaaaaataaagaaaagtaatttctcatttaagtaggttttgaacattagtactaaatagcttttattctttttacacacagttgggggaaaatttactttttcctgactataaatctaagaaaattaattggaagattttctccagtttcatctctgaccaatgtgcatactgcatagtgttgttactaataagggaggaaatagttggcctataccctattattaattgtgatatattttccaatttttttttttttcctattattgagtatatgatatattttgtatcagttttatgtaaatgacatgatcaggaatcccttaaatttccagtttttaatagtaaaaagtgtattctaatatttaccctcacttaattgtcttattttcgaagcgatgtttagttttttagtaaaaccaaagcaaagtagattccaaaacactggtgtattagtacataataatactacgtgttaactttttagttataaaatacaagagtgacccatacacaaaaaaagtaagatcccactgggttttgctcctttcccacacaccgtgattgatggtcactctccattctccacactctcacacaatttctcgatattctctacatattacatacccaccactccactcccatcttttcttttattactcacacaagcatgggtttactttatctgtaatattacacaaatgtaatccccatttcctcgaataaaatttgaaaaaatgaataacccactgatattaaatcaatattttgttctgtgtgtttttcacttttgaccctcttatattttcactttaatcagatatagtccctctttacgtctcaactaccttaacgacgaagcccgctacttgcacaaaagtcaaaaaagccccccactcacttttcctctatatatacatcatctcccacacaaacacaaacaaacataaaccttcttcaatggaagattggtggttttcatggctctctagaacaaaccttgaaccttctctcatccacgaatacggcctctccttctctcagaacgagctcgaacacgaagacatttcttacttcgaccacgaatttctccagagcatgggaatctctatcgccaaacaccgtctcgagattctcaaactcgctcgtcgagatcgcaagaactctcctcctctcacctctcgttccatctccagagtcgtgactgcgattaagaaaaccaggaaatgtttatccgatcacgtacgcgcctggatccgccgtgaagaagagtcggcgtcgtctcgagctctggtgttggtgccgaagaagactagcaacgggattgggaagtggagaggtggattcctgaagaggaacaagagatctgtgatgccgagcaatggaaatggtggattggagaagcaagagaggttgttgttgaccaatgggactccttgtagaatcgatagcttctcaagtcccatggttttcgattacagtttcaaggatgagaaactttacgctcaagatacttattttgaagatatcaaatgggattcaatgtttcagaatctcaaacctacttagaaaaatctctaagttctgttttatgttttctctttcagcttcttcttcgttctttatatcagaattgatggtgagagatgaggttttagggttcttccaccatgttttcttgattttgtctttgtatgtgattaggctagttaatttttgttagttaacaattggaaaatagagttgagtggtggtgtcaggtgtgtatgtgagtgtgtggggtcattgtaatgagtctgtctctccagtctttgcttttggcctaagtctctgttccagtcaaaacttctttacagcttttatcactttttactcttttctcaaaaaatgctctgtttacacacataaccatgacgctaagcctgccggagtgatcttactcttgaggtaatcggaaagatcttgagctcaggacactacacagtctacactagagcacacaaaacattgtgcttccaaattttatctgttgtgtgtgtgtcaattttcagatatacctaagggaagtgtaactgaaaaccatacctcagttcttggcttcttgccaccacaagtcacagtagattccatatctgatgttaccaaaccagcaaaatgcttgtagctattaccaacgctttcctcccaatgaagcaacacttgatggcattggggttgtctgacgcttccttttcatggtcgccatcttgcgtcatgaagtttctttcttggagatggcacttagtcattgcaaccaagtccacaccaaatgaagctcttgaacctttgcctggtactgaaccagcaatcctatcaaccatgcttacaacagatctaatatcacatactgcagacgaaagcgcttgtggtgagatggatttcatctgaaaacaacagaaagcaaacatcaagatcagaacaatgtttccacggcaaatgagggatggcagcaatgacactgccctgttgcaatatacccttcaaaattagtaacgttacttacggctctaataaggcgttcaataggcagctcagtagcactcgattttccacaagtacttgtcaaaggatttataatatttccatcaggactggtaagctccggaaggagaggagaggcagagatccctggagtgccaatttcaagggattgaagtacaccttgcctgatctgttgtacccttgacccagcaccctgcatgctcattgattgcatctgcagagttgtttggtcatcatgagactgatcttgaactgtctgagatagtggttgctgcataggctgaatctcagatttcgtaagctgcagtttctgtactgtcttcctcagactctgcatatttaagaaattcataatgttgttcttgcgataatccatactatccttcaagtcaggtttgatattgctctttgaaagagataggaaacgtagcattccctccaacactgtcttgcctcgtttcaatttctcaaactgatctgatctttgtttctgatgcgaaagagaatcctcctagagagaaaacggaacgtattcagtagaaaagaaacaaacatatagatgaacgttaaaagtttacaacctctgtaggtttgggaaggaatatatctgtcagaaggttaacttctagtgaactatctgtaagtataagagtctgacgaaccttttactttgttaaatgggtaacaagaatcctaagttgtaggactttcatttgtaacaatgaactgatcttgcattgaatttgtaaaactcttcataaagtacttagtactgttccagaggacgtacacgtgcaaactaacttcctaggaagaatgaaaactgtaacttacttgctgcaacttggctgctactctctggtagatttcattgaggtctctttgatggatttgatctacaaagaaaagcaatataatcatacatacgattactcatcatggtgatatcatctagtaacagagagatgatcctgctagtaacaaaggaataatctggttgtcgtagtaatctttcaagtaaggcatgacattgcttctttgaaacagataggaattgtatcattcttcgctccaacattgccttcaatctctcaaattgctttaatctctgttgatgggtaaaagaattctgcatgaattcaataagaaaccaaaccctaccctactagttgacggaacactaaagcacccaccaaaaacacacctaatctccgagaaattaacatttacaaaaaaaaaaagggtctttattcatttttcgatcataacttgataggaggagcctggtagaaacagagcaccggagtcaacaacattgaggatgagagttcaaaacacatcagaagagagaagaccaacataaaaagagagagagacaaaatatctacaatgcatttccttgattattatgagactgatcttgaagctgcctttgctgtactgtcttcccagccggttcttagcgtaattaagaaatatataatccgtttctcataatagtcccatctacaatcctttaatatcggcatgatatttctctttcgaagagataggacttggatcaattgctctatgtttgtcttcatgctttggaacttgtcaaagtgctttgatctttgttgctgcggaagcgattcctcctgaaaaaaacaaacaaactagtattactacatctatacaacttaaggcagagagttaatagttgacagtaactacatcttacatggttcaacttgtctgcaagtctctggtaaacatcagtcacatgtggtagataacgctctctcatggatctaagctgtataaacaattacacaccacaatgaatgatcccgatgatgatttaagaaaggagttttattattatgatgattatgacttatgagttaccttttggaaaacctcctcccgccaatcatctccattttcattttccattgtatctactatctagtgttgctagccaagaaaaataattaaaaagcgagattcattcatcatcagaaactgtgtaaaaaaaaatacaaaaacctaaaattagaggtacacaagtatcatcaatccataaaactagtttcttatgcaaaaggttttgctatcgacgaatccatgggtttactatgacacgtaatgagataggtgactcaaaataaggaccttttggcgatgaatctccgagacttagaacggtccgtttggatttggtttttctccaaacgttcttacgtttcaatctttcttttaataagtgaaacgtagcaattagggttaaggagaagaattagagatgattgtttttgttttaatcatcttttgattttatagagaaacaaacaagagagagctaaatacaaggattaaaaggcttcaacaacattacaatatcaggttattaagcgaggcccaatgacccaataataagtacttatcaggcccaagtctcttctgcaaataataagttttttggagtttttttaagttttctatttcacacagtaaaggctaaaaatcgagtaaagagacttgtagaaaaaccagtgaaatctccggctatttgtgtgaccaaaatgttaattatagtcattaactaaataaatctcgttcatgtactaatttgtatagacaattacacaccacactgatcactccttgtatcttctaacttgatgactttatgatgataaatcatcaataattacaataaaaaagttagccatttggtatatacaaaaaaaaaaaaatgtttcaaacagccattttattgtgacaactgaacagagtaaagaagttgaaactcttctgaacgatctcaaaatgcgtattacaacaaatctcaaaatacaacattcagcaagaccccaaaaaaggggtaattgcacttcagaattagaagaaaatgacgaatatactaacaagattcacaaaatacatacaataaagttaaaataatattatttaaatatattcaataatatagcataagcttttgcaaacagataacaaaaaatcccaatcacgtgtgtgggaaaacaacttatactatacaacaaaaagtgaggaaaaaactttttggctttttttctttagttttgacatgaacctgcaagtgaatcacagagctgctattgaagacgagagagatccgtcagattcaggaagctgctacatatttctcccaagtgccgtattttgagctgaaagttccaccgccaaattgctgtgcgtactcacagatcactgcccgagcacaggcgtcccatgtcttggctatgtctttgagcgacatcggctgtgacaaacttcttagcaatatgttgaaccttgccatagctttggacgacaggtcctcgttttctttgctgttcaagaaaccagaccgtgttacggtaagaagataacgcagtttctaataaagggtttctagtagatgattcttgtgaagattttaactgtatcgtagaagtttgctcgactcggtacggaaaatctatggttctatttacttgagactgaaggatttgcttgtacctggtttcgaccgggagtttatctagaagagatggagagccattggggtagctacaaggaaccagcagacgcaatggttgaataggagactgtaatagaagcacaaagcatatattataaaaaaggataaatgaaatattttgtttcacaaaacgttaatgttaacgagatgaccatgtttaccatttgtgttgatgagagatgagccttcaaggctgggctgagagaaacagctataaacgagaatctaactgttgttccttcacaccctatgcttgatattgcaacctcactaggatcagcagcatcttcatcatcacttatctcaacaactgtatctatcagccgctggtttatttcctttatttcctccaaaagggcatgctcggtctgcagttcaagattgagtcttcaaaaaaaaaagaatatcgaaaccttgtgcttccaaattttctttgttacgtgtgtgtgtgtgtgtgtgagtgtgtgtcaatattcaaatatagctaggggaagtctaactgagtatcatacctcagttcttgccttcttgccatccgaagtcgcagtagattctagatcggatgtttctgaaccagcaaactgcttgtagttatcaccaacacttcctcccagtgaagcaacgcttagtggcattgcggttgtgtgacgcttcattttcttagtcgccatcattccctcttgggtcatgaagtttcttgcttggagacggcacttagtcattgcaaccaagtcttcaccaacggaagctcttgaaccgtttcctggtgctgaaccagctatccgatcaaccatgcttacaacagatccgatgtcacttactgcagaagaaagggcttgtggtgagatggacttcacctgaaagcaaagcatacatcataagcagaacaatgattatattacaaaacgggtttgcagcaatatcaccgtcctgctgcgatatacccttaaaaattggaaatttacttacggctctaataaggcgttcaataggcagctcagtagcactcggttttccagatgtaattgtcgaagaatttaaaatattcccatcaggactagtaaactcctgaaggagaggagaggcagagatccctggagtgccaattgctagggactgaactacaccttgcatgccggttgcttgttggcgtgcaatatttcccattgacaacgaagaagaaccaggtttctcagagtcaacttgcataggggacggagccaagggggttgaagaaggagatgggacaacaaaaggggaatttgcaggttgcaatggagttcccatcttgttgacagtatttttctggtcaacctgaggagacaaatgttgtgacatctgaggagatgcaccttgcagaagttgaggcgacgaaacagctcctggttttaactgttgaagaggataattcgcacgctgaccctgcatagaatgttgctgaaacatcccacgactgacattcatcccctgcctcgatgttaaatcattcatatcattcatctgctgtaattgtgccgcttgctgtcttgcttgcaactgttgctgttgctgttgctgtcttgcttgcaactgttgctgttgcatctggcgctgttgaaattgctgtttgagctgcatttgttgatcttgctgttgcttgaggtgctgatgctgaagcaaactggaacttaactggggttgattcacattcgactgcagtgtgctcaacccactttgagcagaggcagaactgttatttactagttgagaagtattttgttgcatagatcccatggcaacctgctgtccattgttcaaggtatttccttggcctgattctaaactagaagccggtatggaactgggaatgttctgctgtggagctgaaactccaggacgagatgatagaacattgctctgcatatttgtcatactactctgttgtgcccttggcccagcaccctgcatgctcattgattgcatctgcggatttgtttggttatcatgggattgatcttgaactgtctgagattgtggttgctgcataggctgcatctgagattgcggaagctgcccttgctgtactggcttcctcggcctgtgcatatttaagaaacctataatctgcttctcataataagccaccttatcttttaatgcgggcatgatgttgctctttgaaacagatagaaattgtatcattcgctccaacattgttttgaattgtctcagtttctcaagctgatctgatctttgttgctgtggcatagaatcctgctccagatacaaaaataacttactaaataaaaaagaaacaaatacatagatgcaagctacaacttctgtaggtttgggaaggaacataaatatcagcaggttgattttctagtaaactgtaagaatacgagtctcaagattctttttctttttctttgttaaatgggtaacaagactccaaagttgatgacgttcttatgcaataacgaaccgaacttgcattgaattcataaagcttctcagaaggtactcactactgttccagaggacatagacgtacaaacgattctcctagtataaaaaagaaaagaaaattgtaacttacttgctgcaactttgctgcaactctctggtagatttcattcagatctggtaagtaagtctctttcatagatttgatctacaaagacaagcaatatggtcatatgattactcattacaatgatatctatcacttgaagatttaataagtgtagccataattggtaaagatatatagcaaacacaaaaagagagaactaccttttggtaaacctcctcttgccaatcacctccatttgcactttccgtctgtgctgtcgaatccagcgatgctaagaattataaaaacgaaaatatgttcagcatcatatcctgctgagagattatggaaaatatcagaacctaaagtattaaaaggatcaaaagcatacatgatggcatctccggaagggttctttgggattgatatagttgtctctgttggtccacaacattttgaggtggaagcagggaaccagtgacttggcctgaagcttgtagcctttgttgcacatcctgttgtagcagattaggttgttgttgcaaacccagctgctgatgatgcgattgaagctgtggcatcatctgctgttgtgatggctgattttgtgactgttgtccctgagaagaatacaagccatggccagcctgatgtgttcgttgcagcccaaccgttggttgtgataacatgtgcaccgagtgctggttattctgcaaactcgaattgccaacctgggaattgagcatctgttgttgtggttgctgcaatcctgcaacattgctttgagtgcccagtgggttctgatgcgttgcctggaggctgttttgttgagacatcaactgctgctgggccggtggctgctgtttctgctgttgctgtggctgctgcagtggttgctgctgcgactgctgctgttgtatgttcataacattattttgttggttcagtaacctttgctgatgttgctgctgcatatccccaacaacatgctgccccatcatctgcttctgttggatgcctgagctatttgcagcttgttgccgcattaattgtgtaggctgctgctgtagaggagaaattgattgttgcggcaatgaagattgctgctgatggataccagaggcttgttgtgattgcggatgttgccttagcatcgacgattgatgctgacgaagcatagattgtgtcgtctgctgagaagacaattgcggacttgattgctgattggtgtggagaccttggagaggagctgagttcacagtggagggctgagtcgcagatgttggaacaccaggttgttgagatgaatgcagttgattaggctgcagcacattttgctgctgttgttgaatgtgtgatggcaaaagcgaattgggattgggaacattccctgactggaagttctgcttgagaagttgctgctgtagctgctgctggtaaagatatggctgctgttgttgctgtgaagacatagcatgtggcctacccagcatctgcctttggggtcctgaaaacatgttcgaggaaaggccatgctgcccagatgaatcttgcaacattccagctacattttgcatattggcattctggttcacaacgcttgtggtgttattattggttatggaagaaacaggtggcatggaagatggtaaagcagtagaacccgtcattccagaggcagtattattctgcatggtttgggacagcaacggctgaggtgcttgagattgattggttgataacgatcctggaagaagttggccttgattggtgggtactattcaaggaaaggttaaacagcatcaaataagaggaacaattagccataaaaccagataaacagacttaagcaattcatgcttgagaatcgtgattactcgaatctatggatgtgccattattagcggcagggatagctgcggaagaaccagctgcattttgtgatttagtctccattgtcagcatcttcattgatattttccgaaggtaatcagtctgaaaggcgatataaaagagtatcaggaaggtatacatggatttcatacccaacatattgtggcttagctttacagataccgaaagtcagttcttttccatgttgtggagtccattgcctcacaaatctctatatttaccatactaacgaaacaagaatatatgttcataataacctggttaagagcaccgctgaaaattttctcctcgaatctagctgcaattctcctgagctcgttaattccctctggtccggaaaatggaaggtgcttctttagtgtttccattctgcgcaagtggcaagcaaataagtaaaacaaacaaactaactattggtcaaggaacataataaccttctatttctgtagtatttgactggcatagacaaaacaacgccgctagagtgacttacatcttgttgacgatcttctgacgagaatcaggtggcaattgcgttctccagtcacctgtatccatggcaggctctccgtttggaagagaaggcctccaattgttattatccatcaagttttctgtgtttacaagccatgaagagcaaagtatcaatagtaagtatacagagaaaccaaaacatgacaatataacaactgattatcccaaatcaacaggaaacaaatgaccacacaacatggattagattaacactcagaatttcttattgatcagccaaaatgttcattctttctaatgttggtagcaaaaagcaataaactcaaaacatcaaatagccaatcccaccggaacgagaatccaggaactcaaaataagcaaactttattacatcaacaaagttcatctattctcgtaattgtaataaaccagacccaactacaaagggagatactttatcttctttggaatcccgatcaaaagagaaaactctaaaaagcaaggcttaagaacaacagaaaaaaaaacgagattcgaacatttcacctcaaattcagagccaatcaaggagatttggcgtttgacggagtcaaggttggtacaacgattagggcttgatattaggaaaacagaggagaaaaaggggaaattggagctggatttagggtttagcttgatcgaaaaacgaatgaagaatataggatcttctaggtaaagagacagaggaaacttgttcgcgtcgtaaatcataatcgagcctaccagttcgcttataacaagtttttttttttttcaaaataaacaaaaaaatctagtattaattaccacatgtataattgtatagttttcccagttcaaatatggtagcattggtgcaaaatgtattagaaatttgttaactagataatatgaccactatttttcaattttaaataaattatatatttttcgtttcattttagaaaacgttttagaaaagtgattataaagtgataataaaattagatataataaaagtacattaagtcacatatgttgtttacgttttttttaacaaaacagcattttttattaataattttataggttggaaaaataaaccttactagattttaacccgcgatacaccgcggagacaattcatttttaaaaattaatatatataaaatttgtaaattattttatagtttaccattgttactaagtaacgtcctgccaaatccgtcctaccaaacatgtcctgccaaacccgtccaaaaaaaaaactatttattttattaatgttgatcttatttataatatgtttatgaatcattgtcaaaatattttagtcgttgcgtgacattgaacccacacatttttcgccaattggttaatatatgttcattcttaaaatttcgaatcacaaaatatgacgaatttttttttgagattttttaaaactctatatattatataatgatgttaatttttttgataaattaaactttttataaattcaaatattgataatgttttatgaagtttaaatatacaaataataatatttaaaaaattaatattttttgccttttaggtaatgatataataactctaaaagcaagaatttagaagatttaaatccttaaataaatattttcatgcctaaataattaatgtcagtagtatgacattgtaaataagttcaaatacatgatttgtttatttaaacaaaaaacgtttagtaagaataatatttatttaaacaaaaaacattgttttaaaatatagttaataaaatacgtttatgctaattttaagggattgatgtgaagtttgtttggattaaatttgattgataatgtgattgacaatttaaattaaaaatttaaagtaaaattaattattttggaaaatatttaatgttaatggcattgggttgtaaataagtccaactctaagatttatttgctaaaatgactgcaaaaatgtatatgtagatagttaaggaataaaatccttaataatctgattttaaaaataaaagcaaataaagacgattttcaattaattttgaaatacatttgtgtcctttcttaattcaattattttaactgttttgttaatgaactatgatataaatataatcagactaaaaatttttttttttttataacttttttattataggggattttagaataatcatcacataatattcatcaaacaaaacacaaaaccggttgaaggttttatacatatttaacaaatgtaaatttcagtatcattacctaagaaacaatcaaactcacctaacttgtcaagtgtacatgtcctataagtcaaaagagaaacttttcttatgacagaggttgtctatgtgtaaatgtgtaatatgttgatgttttctgcaatatctttagccgccaatgtttgaaagagttggtgcgtatcaactgctcaatatttcagtccagtgaaacatagttttaagttttcgaaacgagaaaacaactagtttgtttttttacttttcaccaaacaatgtcttttttttccttgttgattctggagaaacgagaaatggtgtttgataagtcaaaccaatagatacattagacatatttatctatgcattaagtttcaatgaccgcttagaacgacgccacttgttgactatagttgccctcttacatagtccgcatctttaaggatatcttgccaaggtaatcctcctgaaactccaaataaaactgaatatatacataaaaggaatgataacaagaaagagttcacatggtattcaatcaaaaatgtaataagaaggttcattcataggccccaaaaggctaaatgttttttttaccaatgcctttgaaatctatctatttgatcacactaaagaaataaaaatgatgagccaaaaatattctactaacaaaaatgatgaaggggaaaaaactgaaacctggtttatagcagagttgaaaatcaactcctctaagctgacagcaattctcatgagctcgtcaattccttctttcccagaatgtggaacaattttctttagtgtgtccaatctgctcaagtgacaagtataatttagttatacattaacatatttataggtcaaggcaatgcgacaaaacgttataacctcctatatctacagaattttggaggaggaaatgactatgacaatgtgtaatgaacttacaaagcattgatattcttctggcgtgaatcctgtggctgttgagttctccagtcaccagtgttcacggcaggttcattgttcggaacagaaggctctgaattgtaaatgtccataagaacacacccaaaaaaaagttcatcttatgtgtcaagtctagggcatatatatacataagctagcaccaaaagaaaacatcaaaattaagcacaccaaaacaagcttctgctatacgttacatgaaggactttaaaatgtgggagaaagaaaatgcctttactaacctggaaccaacggtggggtgttatcatcagcggaggaagaaccagctgcattttgtgatttagtctccatattcagcatcttcatacatatttgacgaaggtactcagtctaaagatcgaaacaaaagtaattaatctcaagccaaagaatgatcaatgatgttaaaaaaataatgagctttatgagtagcaaaaaaaactcagttcattgccaaattgtggagtcactgcctcagaagaaaaacagagaatcacctgattagaggcattgttgaatagtttctcctcaaatctgactgcaattttcctaagctcgttagttccctctggtctaataaatggaagttgcttcaactgtgtttccattctacacgagcgatcagtcaaatcaacaaagtaaagtaaaaaaccttatttgcaaatttgatgtaacaaaaacacgaggtttaataatcataataaactcacatcttattgacgattctcgagcgtgaagcagatggaaattgagttctccagtctcctgttgtgtccatggtgttggttctcttctctgtatataactcaacttaaaacagatcaaatatgtgaaaaacagaccaaattgtcttataacacaacgattattgaaagcatagatttgatccgagaaaaaacttgaggacactaaatcacacaaaaaaaaaacctattgagttgaaaaattataccgatcaacaaaagtttcgtacagtgatcggcgaaagaaacttaaatcccagtaacagagcctatcgacaagactttgggtttcaggggtcaaggtggcgacgattggagtgataaagagagcgtaacgagattgaaatggttaatttgaaagtcaacaataaaaaggtggctcggcccattaggcccaaataattaagagtttcctttgtttcactgttttttattttttaacgtcccttttgaatcaaactgagtttttactttttacatcaccaaaaatattgaagacaaatgcatttgaatgcattaccaaagtatcaaactaagtttttaaattcaccataattttttttaatttttttcgccctcttccacagtcaacaactcaacatcttgaaagatttggaacatgtttctctagtgcaattctcatgagctcgttaatccattgtagcccaagatttggaacatgtttctctagtgcttccattctgctcaaatggcaacaagtaatttggacattgtataaacatctatgtttacaggtcagatccttgtacaacacattctgtacaatgaacttacatcttgtgggcatttctttagcgtgaattcggtggcagttgagttctccagtctcctgtgttcacggcaggttcttctttcacaagacaagtctttgaattgcattaatgtaattgcacaagaaaacaaaactattgacctagaaaattagaacgatgaggttccagtttccttcatttatcggccaaaaacacttaatccattaattctccgaatcaaaagattctttttgttaaaactcaaagcgtaaataataacacaacgaaatccaagatttgcacctcaaatccagaggctatgggagagattcggccaggggtggcggagagtcaaagagcgtgacaaatatgacaatggggaaattgaatcataaaactagactttatataatcaaaacttataatatccgagtaaactatagaggttggttatacggccactgactgaaggtgagaggatgagtacattaacaaaagatggaaagtagaactgcaccattgtagaactgtagaagataattagtaattattagttacatacatctcatcttataaaaaacataacaagagtggaaaaaaaagcgagagctagacaagagcaaaaaacttgctacaacctaagaactgatagctaaaaggaaaaacacaaaaaatcattaaacattcaactcgtctcctctgtcattagaatctttgtatgcttctgcaaagcaaagggaaaggggacgactattacctatctataaattcttatccaaatcgtatagttacatagttacgcgtagtctagagaacgtgtcactgacaaaagaatattgatgtgaaaattgtgtcgtagttatatatcagctggttccatagagactttcagggctcgagttgttatccagagctatattaaggtcagggagcaagaaggaggaatcatcattcttttgtgactcagcctgcacagagatatgatatgttatttatactcaaaagagtgatactgttttagtataacgaatcggaaaatgaagttaacctggagtttctttaaagactcgtttcttgctctttgttgcttgagcagatcctgcatagttgcgagttcctgattcaagaaaacaagaattatattaaagatttggactttttttatatgagaacaaaatgggaaagaggttttacatttctcaagccattcctttcctttaagagcacactctcctcctctttaagttgagcaagtgtctgtggacaaccacatacagtgattaaactaagacataaaatcatacaacgttgtgattctaccagaatctgatattaattattcttttctggtttacctttttctttcttgatctcttgaaagggcttgttgtaacactcgtttgagttatctgcgtcaaacccaccaaacattcagattgtagcatgtcaaaaaacacatatagcacgttcattttctataatcaaaacgctaaatctaagacaagttaaacaccaaaaacatttaaaaaagaatcttctttcttggtcaacaacttatacccaagaaaagcaatatgaataagaagtgcatctttttctcctacctcgagacatactaaattcgaaagaatagaatcacgtgaatggagcgtgatttggaagacttatacgcgtgtctccccatgaccacgaccccacagttttgttgtcacgaattatccacataaccacttgtccttatcacgttcttttaatcacaaacccaaaactgatgactttgtgggttctactttggtaagataattcagcttcaaccatagagaaaaagagctaaaccaatatgaaaggagttagtgattttgaccaagagatgcttcggagagtttttgactttcttttttccatgtcagcccattattacctatgagacttattatgttccacgccgcatctgattacaccacagacgcaccaaacccccaaacctaatccgccacgaaaacgcctctcgacccataaaagaggcaaccctcattataagctattataaataacgccagacataacttctctcattgacccaactacccctaaaacacactgcgtgaacgggggtaatctcgtcattgaatcggtgatgactgggtaatttaactggcttgaattcagcgaacagtttcaggaaccaagcatcgtgacgtgaaacttggccaccaacaccaatcaccatcatctcgatgtgaggaggcactagattgcaaaaataggaaaaagcaaagaagatagataggttttgagtttcatctatgaagaaaaagaacgtgatcacgtcagagtaacagagtgatattatcggtcaacgctaagtcggagtatagatagaaaggccaagatggcgtgaccggcgaagaagccgatcccggactaaaatgacgtaaatggcctcaagagaaacaaataggcatagaggggcaaaactggaagtagttgcggaaaacaaggaagactgagattacgtgaaaatggatatcaggtaaaaagtacgactaggcttcgttataacccggtggctagtcaccgtcaaaacgccgcatcccgaggggtatagttgtcaaacacacagaacagagtaaagcagaagtttcaaaaactgttgaacatataaaccaaagggaaattatcgaacgaaccttagatctaacggcctcagacagtttcacaacgccacttgactcctcaaatccatcaacggcagcagcagcaccgcctccaccgccgctaaaagaggttgcgccgctccatgaaagtggggtcgtgggactagcacgcgtatcatgatctcccttcttccttaacgtcgccgccttggtcctcggctgacgcacgctccacttcagcttgagatccgacgcgccgccgctcttcgtctcaggaagtgacggctcggcatggaggagacagatcagagcctccgccactaatgaatcatcacccatagcctcgtgaatccagtctccgccggtcatagtctgaggttggaccttccaccgaatttagatagagagagagaaagagaaggagaagaaatggtggcgaaaagtggagaagaagaaaaaatctcccgtggcacattaatgggtggatttttattatatataacgttttcacacatacagttattagattgaaaaattatttttaaatctgtcttttattttctttcttggtgagagtgggacccatgggaatacatacgtggcatatagtatttgtactttgtgcaattgcaaaggtactagggttagcgtctgaatacacgcgcggttagtgacatctttatggcttgcgtgccggttcagttacatccattactcttatcatatgcagtttcgggataaatttgtggacgtgtgaggtcattcttacttgaatcacattttcgtacttcatgattgtagatagatgccatattgcctatgtaggataaagttttacgaaattaggattagttaacttatgtatttatattaagtatgcattgaactcgttttctttttcttttttggctaggattgaaaattataatttaatgtccattcatacagtatttactgtccataatactccaaaaatttgaaacaaattatccaattattaaatggtcgctaaattcgaaaaacctaagggctttgttgtgggtacatgggtcgaaaacagaaagatgaattgggccttttcacatgtccgtcatgttgcaatgtaagaattatatccggttcttaatcagattttgcctgaccatttctgattcataactaaccggaaaagtcaacagttcaatgcacttaaaccggttctaccttaatctgttatcgtcatcacttacactctctcgcaaacacccaaagccctaaaatccttaggagcaaccaaaatcatggcgcttcatctcgccagacgccaccaaaggttaccatcaaacacatctttgattcgatttttctccaattcctcatcggactcacctccccaattcacgaacgcaccggttgaaaaaccgtctcagtcaccatcttctccgtcaccgtcagactcttctccgatcttcgacatcaagaacactctgaaactgaaattacagaaccagcaggagcaaggaaggaaaccatttgacagatccgatgcacaatctcagaatcgcggatcgactagtttctcccaaaacttggggaagaatctcgccaagtttcagcggagatccaccgttccacctccgagggattcaggcggcgtacagcctccgtcttatatttccttagcgggcctctataagcagagcgctgcaacaaactcatcggatcctagaaattcgaaagctcagggtttcaattcaaacactgtaagtgaaactttaaagaatttgaggacgcagattaacacttcaaacaacatggggaagagaggaggggttttaggaagtttcaagagcactgtaggtgaagcattgccaaaatacctgttcgaaacacaaatggatgagagtaagggaagtgaaggtgaaacagaggaggcgatgacggagttcttaatgttttataacgaagaagaattaggtgagaaactaaggacgcttaggccagaaggagagaaaaaagaaggatggttctcattggaggagttgaatcagagattggttaagctaaggcaagttgaagagaaagaggcacaatatcggactaagaactttgcccaactcagaaatgttatttcatcatttaagaatgagaattctgaagctagttcccgtacgttctgagcctctcattactctctctctctctctgtgtctaatctttgcgaattttaattggttgtctttgcttaggactcgaggtgttgagatcttggtttgatttttgttgttgaaatgatgtttatgtgatataacgaggtttctttgcttgcagagcagaatgtcgccattatgggccatctcggtggtatccctgaatacaagcttcttcctccaaaagaggatctagttgacactgtaagcttttcgctcttagactttagagctagtagcttgtcactttaattagtcatgaaccaaaaggcttatatgatagtttctacaattctgtgttgatctgttgtgacaatgggtattgatctgttttgtttgactgcatcaacaaagtatttccacccagataacatgtcctctgcggagaagatgaaaattgagctctcgaaagtcagggaagagttcaagatgtcagaatcagactgtggttctgcacgtgtgcaaggtaaactctacataaggccagtggtctgatcaatgttgactttagccatttaaaggtttacacgttctaagatagattgtcttgtgatgtctctggtctctccttacagtggcacaactcactactaagatcaagcatttatcctcaagtttgcacaaaaaggtaaaacttcaaactgttttcgatatttttgtgaagctatccatcccagtttcttgtggaaccttatgtcatacctgttggtggctgtaccgtaggacaagcattcgcggaagggacttttaggaatggtgcagaaacggaagaaactgttgaaatatctaagacgaactgactgggattcttactgccttgtcctgtcaaaactcagccttcgtgacaacccggattacaagtgctaagctttattgcactagagacccgatgatggtatctgtgcactcttttggttcaaccaacttactgttgtgagtgagacttagctgttcaaaccctgttaggcattttccactctagggaagaaagtcgctctattctattttgtcctcttactccagtgtttcagctggagctcttcaatcatgcatttgtggcaaagaaatgaagttgtggatctctttcattgatgtttagtattccctttcacatttgagttgtgataataaagttatctacgaacaagcctcatgatttcattttacatttatagcaatggtttgatgatcttttcccaaatgtcacattgaagaagagaaacattaggtttttggaagagaaattgtatctacagaatcaaaaacatcatgccgttttctcacaaaccaagagcaccgagaggcgttttcccctgcccggcctcaaagtaaaagatcaacatggcaaccattgcgagcctcgagtgcttaatctctgccaatttcagcctctccagcttctcaaagtccggctcataaacaccgtcgcggtttttcccggcgagacccaacggatcgaagaatctcccaccggggtatccctgatcgccggtatagttcgcgaaattctcggcggtcttcgaccatggcgttgcccactcaaccgattgagaatccgggttgaagaaatcgacccatcgtttgctctccacccaacccatgagaagcaattgggttccaagaagcgacccgaacgagaagggagcgatcgcgtctggctgggctccagcttcaaaccatgccacaccgctccaggcctggccgacgaagatcccaagaaccgctgccatcgcccatcggccatggatcagctcagcctctctgtaccatttcagaaaagccgggtctttccccaaacccaatgggtcgaacccgaaatctcctggtagcctgcgaatatcacacacatttgactcaataactgggtaacaaacaattcgggcttttcatgctctcttgagattcagctaacaaattagaaccaaatgagtaatcaggaccttgaattatcataatctattgtccaagctagtttatgagagatatgaatgaaaattcagcattgttcatgctagtaactcagatataaaagagaatagacttacgagccatcgagccattcagggtcaaggaagttgccaccacctttaacggcagggatccaagatttcttaggctgagcagccgcagcagcgacaataagagttttcctgccaactctctgagctccagtgcctacgccgcttgccaatgcggtggcacctctcttgcctccggtgaggaacgaagaaccaagcccactgaggacagctccggagaccgccatcgccatgagatctctaatatacttgctctgtttttttctctcaagatgtggagaaatgagtgtttggttgttgttctctctctctgtttttcggagcagaaagaatcaaagagaggagatttagagggacaatgtgagataatgagaatctatagacgaaatctcagaggctgtcgtggatagatttctgaccaattaggagtcagaaactacttcaccatatccacatcacccacactcaccactgtcttattctgccaactcagtatttacatttttctaatactttacttatctaaatctaaattgtgagaggaaaataaaatgacacgtggaaattaatttattttcttattgaaatgtaaatgacagcaatgaatttacaaaatggctgcattatgtggcttattgcgtttagattacacattacatgattaactgaaaaaaaaaacgaaaatttaaaaatatataaagagaattaacgattaaatggcggggaatcccaagtaggcggaggaagctcaacaaacggttgatttgaacccatgtccgggtttggtgtaaccggaaacggattatccggtattgttgggatggactctattggtggtgcgaatgacgtcaccggcggttgccatggatttgtgacctctggcggcgtggtaaagtcgggagtttggggtgggaaatctccgaggactggtggtgtggagaatactggaattgtcggtggatcttgtacggtcggtggtaatgtgaaaaccggcgggatctcttgaaccggtggaggcaaaatcggcgggaactcttcagccggtggagtgagaattggcgggaaatcttgaaccggtggaggcataatcggagggaattctagaaccggtggaggcaaatttggcgggaactcatcagccgggggagcgagaattggggggaaatcttgaaccggtggaggcaaaatcggagggaattcttgaaccggtggcggcaactcatcagccgggggaggtaaaatcgaaggaaggtcttgaaccggtggaggcaaagtcacgggaatgactggtggcgttaatgttgactggtcaataggcggttcaatggttacatcaggtggtggcggttgtccgatgactatatccggtgggagattgtttactggtggaggagatcccgtgattataaccggtgggagattgtctacaggtgcagctggtggcgttaatgttgaccggtctaaaggcggaggaaggaggaaaactggagatggtggtggtgatccagtagtaatatcaggcggcgaaaaccatgctagtggtggcatgggcgggacgtctgcgactagaggcggaggaggtgaaccggtgattcccggagctccgccacctaatagaggaggaggagaaacggtgattcccggagcaccaccgcctataagaggaggagggggtgaaccagcgattcctggagctccgccgccaaaaagaggtggaggaggtgaaccagtgattcccggagctccgccgccaaaaagaggaggaggaggtgaaccagtgattcccggagctccgccgcctaaaagaggaggagggggtgaaccagtgattcccggagctccgccgcctaaaagaggaggagggggtgaaccagtgattcccggagctccgccgcctaaaagaggaggaggaggtgaaccagtgattcccggagctccaccgcctaaaagaggaggaggaggggaaccagtgattcccggagcgccactgcctaaaagaggcggaggaggtgaatctgtggttcccggagcgccaccacctaaaagaggaggcggtgtcattgtaaatggtggctgtgaaaccgtgccgccaggtagaggtggtggtggtgataaaactaatggaagaggtggtgagggaagagaggaagataatggtggtggaagaggcgcagaaggtggaggaaggggtagcaccggagaaggcgtcacagatggtggtggtagaacaggaaataaaggcggcaatggagggagtataaaaatcggcgtagggacaaatggtatcaccggcggtactggcggcggtgaagctggtgctgggatgcaagttatgcaaggctggggaggaggcggttccggggctgctacacaagtaatgcaaggctgcggaggaggtgatgctggggctattacacaagtaatgcaaggctggggaggaggcggtgctggggctgtgacacaagtaatgcaaggctgcggaggaggcggtggtggtggagatggtggaggtgggcaaggaaccggaatcggaggaggcggtggtggtgagcaaggaaccggagttggcggtggaggtgatacttgtacacaagtaacacacggtggtggtggtgcaccgttgactatgatcggaggcggaggtggtgagcaaggtgtgactgggagtgacggtgggggcggaaggggaagaggtggtggtaaggtcgccggaggtggcaagaaagggttttgaggacaagggtcaatcgggaaattccattgaccgcaagttccgaaaatgcaccggaaaaacacgtcacaccttgttgagaatgcttctccgtttctacttcggcttcttcttctgcttttgactcttctattccttctatctaaacctttcttgttttcgtctctgtgtctgtgactgttgtgtggattctcaattgcttctgttattgtaacactgatcaaaagaagtgtaactaaacatcttagtacaagtttcttcatatttttcgtaaggcatgcaagaactaaactatgcatgtgtatgtatttatagtcgaatcattgattgtcgagtatgtatgatttttggcaattcttatgttttgtctctctaccaaagactttagttttgtaaggattcaatgaatacattttggtaataaaggacaatatttatttggttacacaatccaaggtaacgaggcaataactaaaactgacttggaatttagagctctgaggtaagtgttagccagcacacggcctcaatgctcaaagaatattgaagtacatatagacagaactattttgtttctgttgcaacaatctataaaacaaatacgtaacacagcataagaccatatctctaaaattcgattccggtttagataaaaagttgggtcaatgtggaaaacatacgccattctaaaactttctagttgttggattgagccaaaatcatagaaatcatgttctataagcccggtttgaacataaccgagtgtgcaagacgtcacaacatctaaaagaattgactgaggagtgaggagatgaaatattaaggagttactattatacagaatggatatgaacaagcaaaaggttaataagagagtagaagaagtaagtaaatgcgaagaaggataacgtggcataaaattttctgtataatgctgctctttactcgaagaagacgcattgaattaaaatcgagtcttcttacttcgagacttgttatcttattccacgccgttgcttcagctgctcttcgttattaccacatttaactcagctgacccacactctgaattaccgttttaaccttatacactcatcgacagttttttgggcccaaagttttataaactgtcactaagctcggcccactagatcatataataactttttttcctagacaaaagaaatacgtatcccgattgttgacaaaaagtcaaaaagaaatccgtttaagtgaatttatcaatttacttagagaaaaaaaaaattgctacgttgtttacaaacaaacaaaattgtttcgttaaatctacgtagtttagtaatcgtacaccagctgctaaacagaaacaaagaaaagagaaatcagaaaatgattagcgtttgagcagaggggattccatgaacagtggaggaatctgatcaaaggcctctgcggacgaggtttgggcgggaacatccggaggaggcaaccatgttattggtggcataggtggaaactcatccaacggcggtggaagagagaacactggcggcgtttcgtctccaaatggtggcggaggtagccataacggcggaggttgtgtcgtctgatcaccacctggtagtggcggcggaggagacggcaccaaagggggcggaaacactatcaccggcgggggcggtgaagggaagaagaaaaatggtggcggagagggaggaggaggtgaaggaacgagcggtgaaggaggaggtggtggtggtgatggaaccaaaggcggtggagacggcataagcggtggtgggcatggggacggccttggatgcagtggtggtgggggtgatggaaccaaaggtggcggtagacgtggggatggccttggacgcggtctcggacgtggtggtggacgcggtggttggaatggtagaaaagggttttccggcgaaggagttgtaggaaaaggccaatgaccacaggtgtcgaacaagtattgatacagaggatcgcagcttctgcgtccgcgattacgactgctaccactgctgcgtcttcctctgtttgattgcttttgctcctctacggttaaagcttctacgttaacgtttgacttcacttcatagtctgatatggactctgttgtgtgaatgattaaaaggagtagagacaacaaaagtccaaccacgagtagttgttttgctttcatcatctctttgtgttctttggttacgttgtcttcttctttgatagaaaactcctacgtaacaacaacagttgtatatatactacaagattaatcaaagaccattttaatatactaaattttttgtttgcccatttgatataaaatactacatgaataatgcattatgggaaaatgtagctaggaatcataaatgccgagagaaggatgaggattatcctgataacacaatttattggcaaagtggcagatcacaaaagttaaaaagtggtgactaaaaatgacctcatttatgatcacgcatggtctaaaatacatactttttttttttgtatttgcatcttctttttagtttttccgataaagaatattgcctttctaagtaattgaaagagatcaatatttttttttcactaaatcagtgttgataactaactacataaataaatgattgtgatttattttgtaaatttttcataaaactagtctgagaataaattttggatgtgtgtattaaaaaggctttaattgcttagaatgatgtgccaccgttgtaattgaatgcattgcgccttcacttcatgtttatcttcattttcagcaaaactctattttccttcgagaagttgacttcagtatagctagatgctattgtctattcccataatgttagttacgaatgctaatcaacggttgaaccaaaaataagagtgctaatcaactttcacttctgaaataacaaaaaaaaaaaagtattgggaggaaattgaccgataacatggattatagatgctattatcatatctagaacggtgtaaccaatatgcttcataacatgctattatgtgagatatttccttatagattgattgtatgatgcagaaatcattcttacttcaaagttttatcccagcttccagtaacaaggagattcattccagggatccaagctatctgattgaaaggagcatcgtgcatagcaacagtagatggttgagcaccagacaacaatggccacatttttgcctgcttatcacatcctccggtaaagactgtggttccatcatctttccaagcagaacacaaaaccttaaccacaagaaaaatctttcattagaatttgagcaaagagaaagcaggaggacacataaactcagaaagcagttgcatattaccggctgatcatgagacattgatacctttggttcactggctatagagccgtcactacgggttatttcccaacatctcacctgcaatcagagtgtcacaacagagccaagatttgatctgagtgcattatgaattggtgtattacaccgaacatgttaaattcttaaagcagagtaaagaagaaagaagagagaacctgacaatcccatgaagttgccacaagtatatcggcctttggactaaaacttaagctcgaaatagagtcggtggctggtggagtaatctgcaagtaaatgaaattcatattgaaattctccttagaggattcccggatcaatcatcggaaccactcaaacctaaaccctaataatggaaatctctttgattaacgaaaagattcaatcaagattaactatagcctgaacatccggtagtgatctcaagtaaatcggtaaagtttccaacacaaaacttgggagaaaacagagaaaagaaaggttacctcgtaggagttgttagggttattggtgctagaggtggctttatcaccggaagtagacattgtaaaagccaagagaacggagaagattctggtggagaagttcaaatcaagagcacaagaaataacgtcaataatggtcgtcttggtcgaagaaggcagagaaagaaagaaagaaagtttatcaatgggtgaagagtgagcaaccgtagacgagagacgtcggttgttagttaatccgggctgcttcaacagttcgttatttttccggtgacagaaaaaggagggaactagaagaagtttgcgagagagtgaaagaatgctttatatacgttcaatttttgttttgtttccgtcaggcctttgcttatttagcccaataagtttagtaaaggcccaatatacctttgtatttttctcatggtccatcatctactgaaattgtaaatttaactataaatacataaatgcaatttacaaaaattaaacatatcataaatataaaaagatatgatgaaatataaacaacttgatgattgataacttaatatttagtatggaaaatttcttttaatacatctttaattgctttttttgtttaacaaaataaatgaatcaagtgggaaactaaaagaaaagtaaaaaacaaagctgtaaaaaaagaagaggaaattgagtaaaatacttacatgtgtatgtatgtagatgagataaaaaatacatagacatataaaaagggtgttatcgagaagaatcatcatataagaaagaaatcaatcgtatatcttccaatcaggtggcttcgcctttcagattatttccccatctagaagctctctctcgactctctcgtctgtttctatctttcgtggtacctcttctcttctctttccttttctgagtttctgttaattttactctctctttttttttttcttctctgttgcttatataataagatttgtctttcttttccaaaaactcgttttctctaattcttctctgcgattctaatcaaattccgtatagatgcgtcgctcttcatcaaagaagaaatcaggtcaatcaactgaatcagtcaccacggatctctttcgctcaggtttttttcccaattcaatcaattccgtctagggtttatgtaattatctgctcaatagttgaactctttgttcttgcttcggattctgtaaaattttctgcgattggattgaaatctcagtaccctttgatgggttttggggttgatgaacgaattattgtatattcatcaatttttatgagaaagctttcaaaatcagtagaattgacttcttctgcaatattctttgtgatcactatcgccgtagcattgtatcaacgtttctactatgttttgacttttgttttttgttttggttcagcttcgagcaaggcctcgaataaagagatggatcgaattgatcacttatttaatcagtatgccaataaatcttccagcctgattgagtaagtatctgttgatgcacgatgaatcaatttttcttttcatgcaaaatcaatatcattgttttcatgtcataagttacgattctatgagttacttttggtactaatactttggtataactactactacttcaacagtcctgaaggaatagaggaactatgctccaatttggaagtgtcacatactgatatcagaatcttgatgcttgcttggtaattatccatcaacacttttattaatgtttttcttccttctttaccagagttacatatccttttaacttttaaattgtcgctatcgcaggaagatgaaagctgagaaacaaggttactttacacatgtaaggaaaaatttgaagcagccataagagctagtgatccttttttttttgatacttgaattaagtttgtgatttgtgtttttgatcttaactcactgtccatctgtaggaggagtggagaagaggcctcaaggctttaagagctgatacgatcaataagttgaagaaagcccttccggagcttgagaaagaggttcaaactcttatcctttatattttcattttgattgacatcttctgagtatcagtttagactgaatcattcttatttctgtctcttgaaggtcagaggccatcaaattttgcagatttctatgcttatgccttctgttattgtttaacaggtaatattaaaatttctgcttctgcatgaggatatatatattgctgttgtttctcttttctacctttcatgtgtatgtgacctatgttttattgttcaatgcagaggaaaaacagaagagcatagacatagagactatatgtcaactcctagagatcgtcatgggatctacatttcgagcccaagttgactactttgttgagtatttaaaggtttggatcactcaaaagtctcacattgtataatttccagaatgttttcacgcaatgttgtcatctcacattggttatatttgtttggcacagatccaaaacgactacaaagtgataaacatggaccaatggatgggactttaccggttctgtaacgaggtatgtttcctaattcttatagttccccagcttggcagtttcatcaactaactctgattgtttgtaatatttacagataagtttcccggacatgggggactataatccagagcttgcatggccattgattcttgacaattttgttgagtggattcaagaaaaacaagcctgaaatcatttctgagtcccctcaagtcgaagcttcaaatctctgcaggatgatcagtgggctctctcatcaaacagattcagcacatttttacttcagttttcatctttcaaacattaaaaaaagacacattatatgattcttgttacatgtgattaacttcaatagagggaacacataatgtttgatttattacatcaagttctgttagtagtaaccaatgatttcgaattagcttgtaaacacgttgttaccaaatttataaccatcagattcattctgaaatggacggtgtagatcagcttacaccattactaaacaatcctaaaacctcaaaaacgaattctccatctcttaaaccctaagaaaaggctcatctttgcgactgctcccgtgttcttcgtctctctgtcaatggctcgcctcctcagatgtctgagaagaagtttcatatttagttcatcgacttcgattgcgtacagaaaccctagaatatgtgttcagtcaaatcaaagctatattttcttaagcagccgcaagtttctcagctcggggagttacgtttcagaaatgcggagaacagctttcgagggtaacattctcagattaattcgtttggagattcagtccgagcttgatcactcgcctattcttcaggtattctgaaactttcaatttgtaattgttaagcatttggtaatctgatactacaaaaagtcgacatctttcgaaactggaatctaggattgaatcatctcatacgcaaattgatgatccggaattatgtttgttcctcactaaattgagtttttgttttgagaatcatcaatgttgaattcataatggaagaaagaaactttagtttgtctgattggttgattcactgcctgagctgagctgagcaattgtttgtacacaaaatttcagcctgaagagagttttggtccattcacggtggatgagcgtccgggggagcagtggattagcttgagaagaaaatttggggagaaggaagatattaagattgaagcaaccatgtttgatggatcagttccatcatcaaaatctactaccagcgaccctgaagatgttcagcttcatattactttcattgtcaacatctctaagggtgatggtgagaccttagagatcatgtgttctgcttggcctgataccatacagatcaccaagttctttgttcgtaaaagcagccagaactcaccaaatgcctatattggacctgaattccagtactgtgatttgatcacttcttttttaaacataaacattttctttttgtttctgatacgatggaactaaactgtcttttgttcaattttacagggaaatggaagatgaacttcaagactcggtttatcgatttttggaggaaagaggtataagtgatgatcttgctgagttcttgcatcagtacatgaagaacaaagataaagctgagtatattagatggatggagactgttaaatcttatgttgagcaaaaataaaatcttctgccgaccacattcttaagcagccaatgaatgttcccttggatatatgattatatggcttagatggacttttattggcatggttcttagtttccagaggtaatgtgacatttaaatctaatatggattagttgcgagcatatatatgataatgattatattaaagccgtattgcatgtaggcgccatgtacccttttcaatgcagcaacatactcccacaaataaaaagttacaagatgagagaaacagatggttgtactgtatgtgtggcatctccaaaataactcaacatttaacaagctcgtctagactgcaaagacagggatgaaattttctgtacacaatatttatgtttttgatctttagattctttactagaacaccgataattgcagaacaaattgacatcatgggaaaaccagacgtggcccaacataaagatgaaacgaaagaaatgggcaaattctacttggttatccagtaaatgaatatgagaaatgtgcatacagccgcaacgagtgaaagaatgattgtatccatcgactttttcctctttatcgctgccagaatagtgttcacctgcagtggttttaaccatccaattgcagggtgagatataggataaacacaggccataaccgaacataaagaaagcaacgagcaaaagagtgtgtaaataagactaggaaagctcttcgtaccgtaggtagacggctggcgacattgctaagctttgagttgatgcctccaaaagttgaacgttgaaacacaagcgtaccgagtgttgcctgagcttgtgaaatgacaccgtccatctgcaccgtttatataatagtcagctcacataagtcatgacgtgttcgattaacttgagaaagccaggcctattgtacgctacagctgtagagtctaacaaaggttaatcgcaaaggagagtttatatacctgagctgtattgcggttgattcccatatgttccttgatcagggcttgttcagacccatatccatcttctaaatctaatctagtccgatcaaattctctaaagtcctcaagaagtgaagcatgctcttgttttgctctaagactggagcggtgtcgataaaactcctgcattttgaatgagtcatacatacaggaacaagactgatttacaacgaaggttgagtcataaactagtccaagagcagagtgtgaacagatggttaaaaagataacactcatttcattactaatcagtatataatcaacacaagctatagaataaggcaaatattcaaatggtatgagtcaggaaaggaacagtacctgtgtcagatcttgaaggatctcttgatgtcgagttaaagtatgggagaccatttctgacccaccagaagatacccatgcttgcatctgagcattaacttgttgcagttgcctaagaagtaagtcaatcccagcttcaagatcactctcattaccatctgattttgataaagcctttgtggaaacaagtctacgatatgaatgcatctgctcgtcaagctgagcttcaatctttctagcctgtgggattcaatacaacacaaagcttattcaaatatcaattggatccagtaaaaagataaatcattgagaattagccaacaaaaccaataaattccccaattcgaatcgaacccagaagattgatatcaattcagacctcaaatattcgaaattcaagacagattttcagacactaccagcttccccaacacaattacctagtagcttcgaatcaaacgacacaataattttataaaaagaaaaatacctgtttccgtaaagcatcccaagagctaggcacatccatggcgtctactgaatctgtcaaaatctctcctttatgaaagcggatcgtgtcctttccggcaagagacctttttccgatataaatcagatgcgacaatcttcttcctcgtcctcgtcaccaaaggtttgagcccctaaaagatgcgatccaattggttcgaaattgagacaagtagtgaacggaacggatcggattgagagaaggatagagttggttcggagacgcagacagaatttctgcgtaccccttcaacggaaaattgcttttcagttttgcgtaatcacaaattaattaattcgatgacctgagattcggcgggtataatccagtgttttccaccctacagtaagtttatatataagttgacctacacatttagtcaaacttgcaagcgatacgtggataatagtaaaccttaacataaacgacatcgttctccagtaaaaatagacccggctcgatggctcgagtcctagaagcttaccgggttctctcatcaaactgctccattcggatatacttccactctcaagtctcactccctcacaatcaattcaagcgattgccgcccgtcgtcgctttcaaatttgttcttccgccggtaactaattctctttcgctttgactacgcttttgcttcactgcttcgatctcgttcggtttccttctgtttgcttcttcagaaattcctcgaattgcttttgatcaatctcaactcaatctgtggattactatttcatcgtgttttcacttgttggtgctcgggaaaattatgcaatttttcgagttgttaatggctttagttcttcgtgtttgctctttaatgaattacgaactttttccaaagagaaataaggtctattttttttggtgaaagtaggagattttttatggcggagggacaattgacgaacatatcggagatgatactgaagaagaggaagaaagggatgagcttgaattgagtaattacggcaacaattacagtagcagagtgttacattagttgaaagttgaaagatagttgtgctcttcatatttttttatggtcaatatcattttgtggatagaaaactttatcttatagtttcttaatgtttgatggtcaatgtcattttgtggatatctgaacacgcatcttgacttttcgttgaagctgccactttcaataagatattagaacttgcagtctgacttttaaattttctaatcaatatcaggagggcacgattgtactctttttcctcttctccattcagtgctccttatcttgtgttgtttcctgcatcgtcttgatatttgaaagtttgagtaagatgggaaactgtgtagcactagaaatatcttgtgatcaaacgttgaatcatgcttgtggctgcttatttggtgatcggaattacattctcaagatggaggctaatctcgaggctctgcagaatactatgcaagagctcgaggagagaagagatgatctgttaagaagagttgtcatagaagaagacaaaggtttgcaacggcttgctcaagttcaaggttggctttcaagggttaaagatgtttgttctcaagtcaatgatctgctgaaagctaaatcaattcaaactgaaaggttatgtctctgtggatattgttctaagaatttcatatctggccgcaattacggaataaatgtactgaaaaagttgaaacacgtggaaggacttctagctaaaggagtttttgaagtggtggcagagaaaattcctgcgcctaaggtggagaagaagcatatccaaaccacagttgggttggatgcaatggtcggaagggcatggaacagcctcatgaaagatgaacgaagaactttgggtctttatggtatggggggagtaggtaaaaccacgctcttagcttctattaacaacaaattccttgaagggatgaatggatttgatcttgttatatgggttgtggtttctaaagatttgcaaaatgaaggcattcaagaacagattttaggaagactaggtcttcacaggggatggaaacaagttacagaaaaggagaaagcctcttacatatgcaacatcctcaacgtaaagaaatttgtgctgttattggatgatctatggagcgaagtagatttagaaaagattggagttccacctctaacgcgagaaaatggatccaaaatagttttcaccactcgttctaaagatgtttgcagagatatggaagttgatggtgagatgaaagttgattgtttgccaccggatgaagcctgggaactgttccaaaagaaagttggaccaatcccattacagagccatgaggatattcccacacttgcaagaaaagtagcagaaaaatgttgtggcttgccacttgcactcagtgtcattggcaaagctatggcatctagagagactgttcaggaatggcagcatgtgattcatgttctgaactcgtctagccacgagttcccaagtatggaagaaaaaattcttcctgttttgaagttcagttatgatgatttaaaagatgaaaaagtcaaattgtgcttcctttattgttccctgtttccggaagattatgaagtaagaaaggaagagttgatagaatattggatgtgtgaaggatttatagatgggaatgaagatgaagatggagctaacaacaaaggtcatgacataattggctcgttagttcgtgcacatctattgatggatggtgaactaacaacaaaagtgaaaatgcatgatgtcatacgcgagatggctctttggatagcgtcgaactttggaaaacagaaagaaacactttgtgtgaaacccggtgtgcagttatgccatataccaaaggacatcaattgggaaagtttgagaaggatgtctttgatgtgcaatcagattgcaaatatatcttctagttccaactctcccaacctctcaactctattactccagaataacaagttggtgcatatatcatgtgacttttttaggtttatgccagcactcgtggtcttggatctttcgaggaactcgagtctctctagcttgccggaagcaatttctaagttaggttccttgcaatatatcaacttatcaacaacagggataaaatggttgccagttagttttaaggagttgaagaaattaatccatttgaatctggagtttactgatgaacttgaaagtattgttgggatagctacaagcctaccaaacctgcaagtgttgaaattgttttcttctcgtgtttgtattgatggcagtttaatggaagagttactactcttggagcacttgaaggttttaacagcaactataaaggacgccttgattttggaaagtatacaaggagtggaccgattggtgagtagtattcaagctttatgtctcagaaatatgtcagcaccggttataatattgaacacggtagctctgggtggtcttcaacaccttgaaatcgtgggctccaaaatctcagagataaagatagattgggaaagaaaaggaagaggggagcttaaatgtacaagttctcctggctttaagcacctctctgttgttgaaatattcaatttggaaggtccaagggatttaacatggctgttgtttgctcaaaacctcaggcgtctatctgtgacgctgtcattaaccatagaagagataataaacaaggagaaaggaatgagtattaccaatgtgcatccaaatatcgttgttccgtttgggaagctggaattccttgaagtaaggggtttggatgagttaaagagaatctgctggaatcccccggctcttccaaacctgagacaatttgatgtacgaagctgccttaagctaccggaagctgccactgagtttccgcgacatgccaatgaataatgggaggacggtgctccggtgctagctgatggtttctggcttatgtactagttttggagaatgaagctatcgcagatcgcagatgtactgcttttctatctccctcattcttgcttgatttgacactctctgtttgactatatcctttcacttcttgatttggtttctgtttgtgcactgcttttgttcccgattaacttgttttcaaagttttgaaagactatttcctttttcagttttcacttgtattttgtttttgtctaataagttcaaaaaattccaagtgcgttatcattctctctttactctaatctctctgagtttattactttaaaaggtttcctaatctttgtaacgcggaaaaccgtttttagccttccagtaagaacactagatggagacgcaatttcatggcggcgatggagaagatccttggctagctcgagacaaactataccatgtaatattctgcttctcaatctctcttatcttctctactctcgcctctttctcccgctactcctttctacgccgtcactccatctggatcggatctgctttctcactcgccgccggtgcggctaaagaagctgccgatcaaattggtatcttcccttccgcaggtgcttccgttagagacgccgtcgcggacgccattggagttgtgatagctgctttggttctcctcctctggaaatctcgaagatcacgtacccgacccatccttccgatttgaatcttctttcttattgctgccgattcgattcacagtagaaaatattccgttgaagcttgtcagtgttgtatccacggataatctcgcaatttttatcaaaagtttgatcatcacaaaattttggtaatcagtctcctttgattttacttgttgaaatgaaaacatgcaacaaacagtttatgagagtattgttgattcaagtaaatcagttttgaataaaactgtactcagattattgctgctaaagtatat

SEQ ID NO: 1123 - DNA, 93485 bp, Arabidopsis thaliana
gaattctgtatattccttctccgacagctctcgccggaggtttgtgtctatgtcctcgagtcttcgtctcatactcctctgcaaagaaaacaaatatatatcacaaaattcaccaaatccttttacaattcacgaaattcttacctcctttgagagcatttttaacatcttcaacattggtcgtcaccatttccacgaaaccccaaaaaggttgcgacttcttgctcggatcaggaagacttttcttacccatcacaatgaatcgtagcagaagctgtttctcgatgttcactttctacaaaaaaaaagacccatattattaatcctgtaataagagctcaatccgtagtgtttttaattcttcttctacgtacctcgacgccgtgtcctccttcaccttggttcttggcgccggaggagctaccactcgcctctccgtcaccggaatctttatcggagccttctttacctgaaagagggtcttgtttctcttcggtgggattctcaccagactcaggacgcatcactatgtatagcctttgaacatcgtccacactgtgagcttcttctttgttaacctttggtctataaaagaagaatatttctcctctttcctgattaacaacaagtgacttagctcatcaagaaacagagagattacaactcggataatcaacaaagaacagcagagtaatgtaataaaacctgaatctcaacttgaggatctggtctcgtcttaacttctttaccttgtcccatcgttgcaaaattctcctaacttgaagaaaaatactgctcttttttaacacccaatttataaaagacttgtttttttggtctaacacatgacaacgtcagaacgttcccacgttgttctttactgtgagttacgtgtcgactaacatgtaattcttagtcaaatgttaaaattcttaagaaaatatataatttcacttttttcttcaacagaatgtgcattggaaattcatatttcctcgtatatatacatattgtttctttaacagaaaatacaaaacttttatacacaaatccgacttctctctaataaatcatagccacctttcttcttcagctcaaataagcaactgatttttttctatataaattgctcttggcttgctttctactcaagttatctcctgcaaatcaaatcttaaccatgagtgtttttctcaataaacttggtacttaaagatgaaacaagatagttgtatcttacccgcagattcctcaaaactatgggtttgatatagaagatcctgtattcgatattaaaggagcactcctaccttcctgtaatacccacaaaaacattaacatcatagagagatcacatccaatctgatgtcaatgtcttgccattaaaaactcttaccgatgtataagagacttgactaggatgcgaagatcgtccttgtccagcataatacacagaatcaagactctcttcaccaatctctctaagtctactaagctcaggcatcacttctttaccaagatcaggcctatcttttcttctcaactcagcacattgtagcgataacttggcaagagacaaagcttcctctaatggccaatctggtactgcaggatcaagcatatctttcaatgtcccttcttctatcgcttgttccacataataagccaaacccatcggctgttttgccgtcaaaagctgcaaaagcatgattcccagtgaataaacatctgatttcacacccaacattccggtttgttgatactctgggtctatgtaacaaaacgttcctgcagctgatgttactctgtactgggtcacgttttcagctaccgcggggacgagtcttgcaagcccgacatcgctaatcttgctgacgtaattgtggtcgagaagaacgtttcctggcttcaagtctctgtggacaattggctctggtttggtctggtggagaaacaagagtcccgtagcgatctcagcagcgattctgaaacgcaattgccatgaaatcggcggcgtgtttccgcgtctgaaaagacgatcatctaagcttcctctggccatgtattcgtagacgagaataccgtattctggacaagctcctaagagaagcaccatgtttggatgccttatgcagcttagtacttcaacctgatcgtcaaaactcatcaagttacaaatcatttcattcaacaacctttttcttgtaatacaagtaaacaatagtgaaaacagagtaaatggagaaaatttgtaaagaaagtgattttgtcacctctttgtgaaactgtgatcttccttgagcagcatcagggcgtaaaaccttaacagcaacacttgtgtgatcaagatgacctctaaacacaggcccataccctccttctccaacttttcttgactctgcgaagtttgctgtaccttcttcgatctcttgaacactatattttctgtatcgaacaatgctatgtcgagaaaatgaatcgctttctttcaataccttcatctctgcgtgtacccgtctctttgcttccacttcagcaagcctgtttgcagcttcagcagcttccaaggctgttttcgcttttgctctctcgttttccactattgacattgctgtttcctctgtcatctttagttcctccaatcgtctttcctcttctgtcctcagcttttgcagctctgtcgcctaaaccaaattttaaccaatttatgaatcaacctcttgagattaagaacaacatggagatatctatatatataataattacctcgttccttgcggttaaagcttctctgcaagctgagctatacatatccatagtttgtttcagctccaaacgcagtctcttcatttgagcttctacatcattctgcaacaaaacaaacattttcattgagtgtaacggaaaaaagaaatcggatttaagaccgataagtaagaaacatggtttaatttcaacttataccaagctctgagatgaaaatgaacaagaagttcttccactttcatcagaaaccgaagaagaaccattgagataactcaaatctgtaaacttgattcctaatctatgagacccaatgctctgctctgagctcgttgacattcttgaggttcttgctgattctggtaaatcgtaggtgaaggaagatcggtctacactcggccttccggagctgatgaaggaaaggtcggatgattcttgttgagaagcactgatgaatgagaactcggactctgaatctgaaaaatcccccattaatttcatatgtccatgtggcggtttcggaagccctaatctacaaaaatcaaaaccaagatttaggaaattgtagacgtaagagattctgaaattttcaatgctaactgaagaaaacctggtaacatctgaatcaatcgatcttcgtcccttaggcaaggccggtgtgttagctgttgaaaacaagggaggtggaagagttaagaatgtgtttgagatgcttgaaccgcaagcaacaaaatttcccctcaagatgaaaactctgacctgttttatgttttctctcaatggcaatagtttcatgatcgtctacttcgctgagaactgatggatggtagggagcaagacgcgaggcgtttcgtaaggaagagattttgcctttggaaatgacgtaaacattgcagaaatctggagctgcctttgacacactcgttggtaaatccgttttgaatctcctgttgattaatgatcataattgtaaaagaaaccctagttttggttaatacttcttccgcactcaacctatcaatgaaaaccctaatgagttttattacctcataaagctattccgtgatggagcaccaagaactaaattctcaatcgcagagaccgtaacatattcaacaatcgctttgactttgtctacgtcttcaagcacaacgtccagacaatgaatctgcatgcagatatgccacacaaaaaaagcttcaaaacttttgatatctagttaaccaaaagttaagttcattttaatttggtattataattacctctttgcggctgcaataacagtggaaggatacaaagagatctttcgtttgtttctccatttgctgcttatgtgttattccttcttcaatgtctgcatgaaacacacaaaagcgaaagacctaactgaaaactttgcgcaaaaatcattacgcaaaaaggaagcaataaatatgttaaactaaagagcaaaaaatcattgagaatgtggggtaatatcaaacctaaagaagattgagatttgggaaggacatgaataagagcaagagtctggccacgagtagcaagattctccaatgtccatttaatagcattttgactacttttgtctttgtctattgcaatcgccaccgaaccatttcttgttcctttctttgtcgcgtctgctttaggtagccacattgttgttcttcttcttcttctttctttttttttttttttttttttttttttctaaaggaataataaaagaaatggagaaatttccttacttttcattagttaagtatttggaggaaaattttcttaaatgttagataatgtaatgggtgagagattttctaatttcttttttatctgatggatactatttgaaggttccatatttggatgaaattctaatttcggaggccataactcaaaccacacatattaataagtttctttttggtagaaatttatctaaattctattaaatatgtggaaactagaagagtgttaaactagctaagatacaagaaatcatatttctttttacttcttctatacctttcaaaatggaaggtgcaacaacaaaaaaatgaatttctttatcagaaaaagaaaacaaatggttctgattggtgaccatttttgaggaaaataatgagtagaaatgtgatgttcctcaaattatcatttataagaacttttgtaaggaatattcaacagaatatatagagtaatatgggccggacctgaatgtttcattggtttaaaccgggtttgttgttctaacttagtatttttcaagaaatttatcttcttctactcttgtatgatggtcacaggaggctacttcataatgttatgtcctatgaatacttgatgtcatcctctctatcttgaaattttgtctccaagaaagtattttgtgtgatttaatgattgatgttagtgttgacatttgggattcttcctctatttaaactttagaggtgcaccatctttatcatctctttgttctctttaatgctttgtatcactcactcactttaacacaagcacaaagagaaccttaatctctcattctctcaagtctttggttaggttcttgttaaaacacaaagacataaaaaaagtttagtaagagagaagagagaaaacattaattgatcaacaaatactttttttttttttttattgatcatcaaataccttctatactttttcatgtagaagtaaatgataaatcacttcttttacatatttgacaccatttatcaatttatttatggttttatatgtttcgacaatagttcataaataaactgaaaaagaaccaaggaccacttagatcagtctttttttcatcttaatgatgctttcccttttttgtgtgtgtgttgaatttcagaaataccctttttgatcattttccaatcataaaaatttcgattggcaataatgactatttttcctgcaaaattatgaattaaagaagtaaatataattctatttcattaaacagtaaacatagattataaatttacgctccttttgtctttgagaccacaagaaacaaacccagtcgcaccagtagcgcgttttagcgcgtgagaccaaaacctgtggactatataacccacaatattgggctttttcgcataatttagaaagtgagatggccgagggcgcgtgataggccttctaacaacactcttaatattttttctttcctcgggcatttattttctgtagaaaagaaagaaaatcgcattcgttactttcgcatttcgatagaaaaggatacactttacaaacaacatttatttctacgctgacatttgataaatacttttggtttatcatttttttcttaatactatattctaaagaagtttctgcttcgtttttgttacgagcgacttgcaaatttctactaaattaatatttggattcacagaataattactttggctcgctccacttatctgaaaaaaactgtttccaaatgggatcattctcttttttcgactggagacaataatataactataaaaatgtaaacttgatttgtgtttatggactatagtacatgtagtgggaaggtgcttttatggagattcctcaactttgctaccattcttttttatatatttatttgtatattttttactttaattggtaagaacatttattgctgctcatttatgttatttggcttttaagccttcaagatcaatcatattttctgatatttatatcaaaaaagctatctcctttttatatatcccaacttccataacgtgaaaacaaacaatcaaacacacatcattatcattttttttttctttttaaaaaatcctaacaataataatcaaaaacttttgaatttactcgagtagttttaaagttttgtgggaagataaaggttgaagctttaatatttactctgtttttttgggtagaacaactcgtgcaatgggggtctgtgatgaaagtgacaaatagctaaatattttctcatgcatttattgagtctctctttggacccgatcccattcaactcatcttcacagatgtctcaagcagctctctctctttctctctctctctctcttctttctctgatcacaagggttatttgtctgaatctcattctattgagtcattattgacctctgcagagatccggacaaagttttgaaaccgaccacaagtccaagaatcatcgatcatacaacaatgtctggagactctctgctcacatctaaacagtaatgtttcattccttttctccagattcttttcttgtctggttattgattcttcaccctctctgtttcttcctaattcgtcactgttgtgttatgcagaggaggaggttctttgtccatatactcacaggttctgattcctccatgaagcatatttcattaacttgttactcaagctgtcaattcacttgaaacttactttcttctaactctgttttctctgaaaatcatagccaaagaatgttactaaagagttcaacggtcgtgattcccccaagaacagcaaattccaccattacagatttgagctcgagcacgatgtgagtttcgctcacctctcttttaaccatatagataaatctgtaaataattgttaaaaaagctcaagactcagttctggtctgacacaggtgaagcgattgaaaaatcaattgcagaaagagactgcaatgcgcgctcttttgctgaaagcttctgatcaaagccataagattgagctgtctcacgcatcttctcttcctcgcagtgtatgtttctccaatttgtctcaagttataagcttgccaatgttcagagatgtaagcttgaaccttacgaatgttcctaaaaacaaaccgtttgcaggttcaagaacttctcaccaatatagcagctatggaagctacggtctctaagctcgaacaagagatcatgtctctgcatttcttgctgattcaagaacgaaacgagagaaaacttgccgagtacaacctcacccattctctatctccacctgtatgttaattacattcttctgtatgtttaatatttgtctgctgctgcgagtggcactgactataaaatcgtttcccagaatgctttagatttggttagactttccgaaaagaatgaaagtctacgccctaaagaccacaaagcacaacctagaagcaaagtggcaaagtccttgcagagttttgacaatgctaatgaactatccaaggagatgatcagatgcatgagaaacatatttgtgtctctaggagagacatctgcaggatccaaatcctcacaagagactgccagtgtttcttctcgtgagaatcctccatcatcatcaacgtcatggtggtctccttcagaacactcacggatctccaggtgggcacagagtccacggatcgatattcagaagaactcagatgttttagccacagagagcgatgtgtttgatctttatacagtccaaggaaagctgagctgggctgacatcgggagttacagatctgcaactgaagtggcttcaatgtctgttgaggagaaaaggctcggatatgcttcagatgagttatggagattcaggtattaacacacagttcaagcaacttctgaagttatggtccttggaacttgacaaactcttatgtggtattttcaatacaggaacctcgttgaaagacttgccagagtaaatccagcagaactaagccacaacgagaagcttgccttctggatcaacatatacaatgccatgatcatgcatgtaataaagtctttggaatttctctaaacttagatttgcagatacaacaaaacttacaatttcctgattgtctgattcaggcatacttggcttacggcgtaccaaaaactgacttaaagctcttctccttgatgcaaaaggtttgatctccacacaaaaaaactacttaactcttcttggtttggttcggagagaggttagtataagtctctgatttggagattctatcaggctgcttatacagttggtggccattcatacaacgcagcaacgatcgaatacatgactttaaagatgagccctcctctgcatcgtcctcaaattgtactaaactcaccttctttattttctgcaatctcttcactttctactctataactcttacctaaaccgggatattcaggctctgcttctctccattctcaagctgaaagtatcagacgaacagagacaagcggggataagtacaccggaacctctagtgtcatttgctctcagctgcgggatgcactcatctcctgcggtaatatttccatatctatctgcattttacatcagattcttgaaccgatattgcaaatttctcacagaaattgcttgcaggtgagaatatactcagccgagaacgtaggagaagaacttgaagaagctcagaaagattatatccaggcgtcagtgggagtgagcccaaggggaaagttgattgtgccccaaatgcttcactgtttcgccaagaaatctgtcgatgactgcaaggttgctctgtggatttctcgtcatttgcctcctcgccaagctgcatttgttgagcagtgtattcacaggcgacaatggtggggttttctgggttcatctagtagcaaatgcggcatagttccttttgattcacggttccgatatttgtttcttccgtagcaaggcattgattcacaatgatgtgattaaagcaaatactgttccgatcctagggtttagatctatgattatttaggtgattcaatcttattttctcaaactaataaacaaataaatggatttagatctgctcaacgaaataaagaagacgaaatacattctctcaaattgcaaaagtatagtaatatcaccggggtacatgttattctgacaaataactaaatattccgtgttcataagaaggacaagattaaactaacttggtcctaactaggcattgatggatgaaatgtctactttccgagatgcttggaccacgttcttgtttccagggaacgacttgcgggagacatccacaagtgctttgaaactgtaaggttcatgcatagataactcagagaggactttgcggttcagctggatgttctccttcatcagtccatggatgaagttcccgtagttcacctgtttcaagttttagatgttaggattccaatcaaacatgtcatttccatcttattcaaaagaaacagagtattataatagcatatatttagcttgttacaaagctaaaacgaggtaaccgagttagaaaaatatgtttctctacttgaattaggaagtaatcattgtttcagttagatcaaaactattgacatgaaatgtgtttttcctctaatcaatccgaaatgattcacttctttaagcatatttgagtttcaaattaaacattcacatccaaaatctccattggataaatatctcaaactcagatattggaaagctccaaattgatcaaagatacaacagtaaaatctgaagaaaataagctaatctaaaatgcactttaattcaactattcaatctaattctttcgcttctagttataaccaacaagttttaactctatcactaggtagatgcaaacatagagtgccactgcataagaaaaatctctagaatacagcaaaaaagttaagactataatgtaatccatcaagttctgtttgaaacatcaaactagaacttgttatactagcaaccacagactctggagaaatcaagcacccaaatttaacaaaagaaaaccctaaatcccaagctccatcctaaaagaaactcatcatagattgcaaaaataaaccaaccaatatctcagaagttttatttataaactaatcatgatttatcgaatcaatgcaattagcagtgacgggaagcaaataggcaaaaatctaatcaatattggggggaaaacgtacaccgtgctgacgagaaccggcgttgatgcgctcgatccagagacctctcatctcacgtttcttgttgcgcctatctctgtaagagtactgcagagctttctcgactctttccctcgcaattcttatacaattcttagctcttcctctgaaacccttcgctagcttgaagatctccttcttgttcatcttttctctttattcttcttcctcctctatctattcttcgtccttctctcactaatactgtaactccatttccttcttctaacgccgcctctgtgtatcccccttctgtttcaattccgggtcgatcgggtcgggtcgtagacaaatccggtcacacaattattaaaaccaattctccatctactgggcctttattatataacatcacaaactaaacaaagcccactatcccatccagtaactcccgacagaggacacgtgttgccatgtcattaccacgtgtcacaagctttccaactctgcttcattttcccgggaaacaaacaaaaacagaaccattattacttttccggaaacagaatttaagtggctttgctctgttcttctcgacccatcacacagaaaaaaccaaaaaaagaaagaatttcaagttttcaactgtcaaaatcttgtagtagtaatggaaaatcatcaccgaatatccgccacaaaatacaacggcgaagcagtgtcggacgatgtgggccaggggaagctatattctccaaaccacgcgatcaaaatctctccagaatccgacgaaaacgtgggccaagggaacctctactctcctgaccacgcgatcaaaatcgcaacgaaccctgattccgtggattcctcatcagaggaagaagaaggagagaagcagaggaagacgatcatgttggggctgaagaatcttgcggcggttaaggataaagtgttagaaaaactatcggctgcttcggttccatctgagtcgcttgaaaacgctaaacagtttttggaaggagccattaaggatttcgccggagcggcgcagggtatgacgaaagacgcgttgcaccggattaaaactcagctcgctgttattgttccgtctgtttctcctgccgtcaccgaaaaggtttagttttaaaaacaattggtccaccgggtaaactaatttggactcttttttggctgacttgtgaatttacttttgacggagcagatagtggacgatgctgagaaagaagccattgacggagaggaagaagatgagagcaagtcaaaagaaagctccggaaagttgccgtttgtttctccgacatcttcgtttttcagctctctcgccaaacctttctccaagctttgatgggtttgtgtcgtacgccttcatgactatctgagataaataagacaaagtctgagatcttctgaagtttcaatgtttacttataatgaatgaagatactttttatgtttatcattcaaaatattatgagttttgtgtaatagaaaactgggtttcacaccctttttattatgttggtggccttggattgtttgtattagcacacaaattttaagttgaatataagaaataaatggtaatggacataaagagaccaaagagattcttgtatgtacaagttatacatgtacgtatgtatatatgcatgtaatgcgtatcagagcttgagatgtgtacaatatacaaaatggaatcaatgattcttcttctcatgtgttcttctcaagtacagataaagccggagtcagatagttgttcgccttgtctggcaaatgagccacctgaaagagacaaacactatcagatgatgtaatgatgtagatgtgactcttattgcaagtgattgtttactcttttaccagctcatagagttctattccttgctcagcaacgtattcatggcaaacctgtaaaaaccaaatggaagaaatttgagagatccatgatgtgatttcttctttatagatcaaagattgaatctttcttagttttggttcttgaaaagggtcaaagattgattctttctcagttgtttctctataaactgcaactcacatcaaagcttttgtttctggcggttgaatcgtgcagtgccttgacacatatatcagccacatccgcgcaactaatgccctgaaattgaaagaaaatagcgcattgggaagttataagtggctccatcagagaacttttgctaggtggcttgagtttgtttttcgtgattgaaataacctgagaaattctgtttccttgatcaaatatcagagctcgttgcccgcctggttcctcctatatcagaaaatatgtattcagagccatatatatacaatatggctggagctcaaagaacattaccttcaagggaccaggacgaatgattgtgtatccaaggcctgatctccttaaagaatcttcaccagcctaacaaatttagcggacatcaagagagaaggagatagagatgtgaaaagatggaacctactggcacaaaagccctgacaatccatagcctcgaaagattcaagagttattatgatgtgtaagacaaaatggacttaccctcttagctttcaacacttgctcccttctgttggcttctactcccgaaccagtacacgataccagaataaagtctgtttcttgacccgcctgcagacaaaaatgcaggaagctgatgatgtatctgttttttttttccgttctttcaggtgataatcttcagtaagtagacattaagttgggagtacttacaggcaaagcttttatgtactcaaatacaaggctaaaacttctcaaatcttgttgcgcaccagcaagtccatcaacaggcctctgaaagaggaaaaaccccaagagattgctaactcagacaccaacgaatgaaagttttcggttaatgatcacacagatcaatccgcaaaaccaactgctgaagctttgaaaagagtaagcaaacctgtcttttaggctcaaagcgtattgtcaatgtgtgaacaagaaatggatctagcggtggatcttctgggttgaccggtcgaaaagctgaaaatggcacccttacctgcccaaggaaccaaagttttagccaaaaaaataacggaaaaggggtcagactaatgagtaagaccgatgatgctttatatacccgacaaaaccctgctttggtactgatcctagcgaaatactgtttgctctgagacatatctgatgatggaccagcttcaaggattacaacataggatcttccattcccaccaacagaaagaactaagccttcgtacctattgatataaaagcataagcatataaaagaagctataaggctaaatgagtttcaggaggtgttagaaatttcatttaatactcctttctctaagtttctatcattgaatcatttcacagaacaagctgagagtaagttgatacgaaatcgcgcaatacctgtcaagagtggtacccaatggaagtgaaagtttcttcgacaactcaacatatcctcctcgggtgaaaacataacctgcatttgaaaactgattaaaccactatacctcaaaatatacatcaaaggaaaaaactttggcaattgccatattctccggaaagataatgtgtacctgaaaactcagctctctcagtttcagtgaactcaaacttagcatccatcccaccatcatatttggaagcggttgtgtcctgaaagtaagttccttgacgaatttcccaaccatcaagtgactcagctgacttgaacttagctaatagaagcttgcttttgctgcttttacccgcccttaattgcgctagtctgttattgtaatcctgcaaatactcaaaacgacacacatgaataaactactctctgctcaacaaaacaagaaaccaaattaaccacggttgagtcatggacaaatcttactatacctgaaaagccttggtgaggttataaacacccaagtgatcaacccgcgtaaggtctgcagtaatcgtagaccgagcagtcgcacagtagatgatcttgctgcagctttcaacagcggatttgagcgttgacggttcacccacatctccaacaacaatatccactgaccttggcaacatactcatcacttcctcatcttgtttcctcaccagtgcctaaacggtaacctcaaatctcttaaaactctaaagcatttgcataaacacaccaatactactttatattataaaaatcagcattttttgaaccttgacggtgtagccacggagcatgagtttacggacaacgatacgaccgattctactagtagctccgacgactaaaacggtaacgttttgagcgccgggaacagcaaactcacacataggtccttctctaatgagtagactatcaagagtctcttgctcatcgggtcgggttgtcctcgacatctgacctaatccagagaatttccgccacacctcgtcgaagatctgccgcgatcgtcgtcctaatcccacaggattcacatcgtccaacttcagtgtaggcggagacggtggtgattgaggcgaaggcggagcaacgtcgagcttcttcgcaaccgtctcttcgctctccttagtggttatggttccgggtcgggttttggtcttcttcttgtcggagggtggagatggagacggagaagaagaagattgagccctagggattacgatttgggagcgatcatggaatctgtgaattctggtgttgatgctgaaactgttgccaaaattcgagcttagaaacctcgcatcagtcgcagccatgttactgccaacaatactacccaccatttttgaactctgctacacaaacagagctcaaagacacaattttgaaaataaattttttggataaaattatactaaatgcatacaattgtttgttaaatgaatcttatttgcatgctagactgtcattgagaacactcttggtcgaaattgggaatggataacgaaagtgagatttttcaagtttttttttgtcgttaagagaaaatagagaagaataagaaatggttggatcggaggattttgacatttcggaaagaaggagagaagaagaagaccacagaatctggtttatgtgttttcggacagtgatatgacttatgagccaattaactagccacgtacactctctcttttcctcttcttttttttaaaaaaaaaaatatacttcttcaccttttttttttttggagaaacaaacaagaaaatttcattccaagttccaactatataataattccataaaatttcatatctgtatatttcaagcgttaaggaagctgcgttggcttctccttcctgcacgattctattggtgatgggaattggaagcaactgtgacccttattgcagcaatggtcacaaaggccaatgcaataacaaggattccaaagcaaatattagattatgaattatgacttggagctaacagcctaacaatagcatttgcattacaaaactacacaaatttagaaaaggtagcagtgtcgtgataacgtttaccttattaatccaaaacctaattcaatgaaacgatactaaaatgttaatacaagttcgcccaaaaatgtaagagaaggaaacatccttaaagagacacacttcatctttcttacttatctagcaagttatctatttatatgtatatatattacattcctgccacatcccccaaagggatataagctattttacaaattgtaccagactacaaaaaaaagacggagaggtagaagacagtaatcagtcacagagtaatatatgtatagtcaaagaatcaccagccagatcaagccactgaactaatcgaagagtctggaatctcatttcttccttttcgcgaccttacacacagcataagttagcatctacgacgattcttctgcttcaattggcacttaagctgagaaactcttcaagtcactcaagttattcatcatcatcactccacgacttgcgactgttaaataggaatccatctaaattaaatcgttatatggctgtttcatgtcttcactagctgctgttattcactttttcttcaccttcttcaagtggagatcataaacaccagtttcttttatcttcttaaccttcggaagaagattacatttccacttctgcttagatcctaaatgaaattagtatttacaaaaattaatcaacccgaggttccagcgacttctgcagctctctgtctcatcatctccatgacggcagctctccgcctagaatctgattgctgttgtaaccttctcagatgttcctttaggtccctgaattgagaagatttacaatgatcaatacaaatcatgcggaccatttttttcaaaaaagctttgccatatgttatgccccggttctaatatatccaaaaatgtcgtttttactttcaattttacgtttttacttgttgaaagaaaaggcaaatactgaatgatcccgttaagagatcgattgcaaaatgttagacagggacagaagttaaagagattacccgcatcgaggtacatcacactcggattccttgcaggcccgagcgtggagttgcaacagataccacattttcttgcatagaacacaacctcctgaagcacgtactttgcagcggagaccatgtcggaatagccccttcactttgcggcagttgggatatagacaaactggagaacggcattgcgacgcatgcaccagaagatcgagcattttcctgagctgcatattttagataaatgaaaactttagcacttcagatacattgtgggagctatatgacctaacaaagcccaattgttttctcaaatcagaagaagcctaaagcaagagaagaagaggcagttttttcaagaggatctaccatgcacaacaacaacaacaaaaaactgaatattacagtacctgcaagactcgcaattgcctagcttctttattctgagcgttttgatcagctagagatggatgagttgttaacttatgaggatgattaatacaaccctctttcttgtaacaagcattgcacacatcatagtctgggcaaacttcacagcgccagcctagaccactttcaatatcgaggtgacatacgttacatgttgtcacaaaggcaggagcagtaggattatgcagatgataaagcaccatcatggaagaatgttttgcccgcctcagtgtatcatactgataatggttcccttgacatagactcaggaatgcttgccttgtatcaaagaattcactttcaagtatctcatctctgtccttagtatccgtaggaatatcggcgatctcaacctacaatatcaaacacattatcttttgcgatacaataaaatagagaaacgcatgagactaagtgacagaacctcgtcacagttcctgacccaaaacaagccaatgcaacttacaggaaaaatattatgtttatctttctgattaacaggatgtctttctctgtcttctcgtttctgctcagcctcataacatctgaaaggtataaaaataacacaaagggttaccaataagtttcttccacaaagataaccacaaacgcttccaagttatacaaaccaattcacaataacaaaagcgccaaaacgagcggaaaaaaaaataaacaccagaagtgaaaggacaattcttacccatcacataactggaaatctttgcattggctgcaaacccaacgatttccagttaccatcagcgtacagcaatgtgtgcaactatgctgcaagtgaaccatgataaaatcctccttcattggatgaatggtctcaccaagctaaacacaaacagaaataatattaacacgaacacaaaggcaaaaaaaaaaaaaaaaacgaattacttaagctgatatgcaggaaaggactagtgcatagaaagaaatgactactttatgcattagtagcaggtctttggaagcattcccagagaaatccgactggccagatgctttaagagccctctttgtaatgggtttcttgagtattccttttttatttccctttctaccatcatcttcttgactcatttgggatatgatatcctctgctgcacctggccagtagtcaccatcgaagtacgggagtctagctgctgtaaccttagctctacattcaccagtttgcaagaaaaaatggtcatatagatttgtagtttccgcaacaattccttcctttgcagcttttctcaacattgctaagtacctgtgtagaccaggagcaaattggaggatgtaaaggattttcctacgaaaactgtatgaagaaaatcaccaaagacaattagactgaccattcccgtagtttatcagactttggtgttttctgaatttctggatggcaatataggatataatcctcacccttcagtggtggacaagcccatatgtagcagctcgtgaaaccacgcaatttgcagtattccagataaccaatctgaaaaagcatcagggtataatacccttgaatcatccatgtaatgtagaagaccacataaacctaggttgaaaaaccagaacttacaagaatttcgtggtaaacgaaagtgcgcagagcctccccattagcagacttgatatcaggtctaaagtacttcacagaatccaaatacgagagataaacacggcgttgattgggatttgaacattcggatccaaattcttggacatacatcccaaacaagcatacttctacaccttctatcttctggaacagcagaaccacctgataaataaaatgtggagcacgaacgatattactacaagagaggaatcctgaaaatattaaatgtggacatgaagcaaatacaatgatggtgtgcgtcgatcattcttaccttggacttgtatggaaattctgtcggaaaattatcctcccgaaaaatttcaagaaatcgagatttaacttctagcttcttgtcaacagatgaaacaactctaaccacaagggattcaacagttggaatctgttagtgccagtaaaagaaaaattaaacaatcagtgaccaaccagtaagcttcaatctattgtttccagtgaagtagcacttcaacaaacaatagaagataggactcaatgcaaaatcacatgagactttaaaaccctgtattccaccgccagattacctcatcataacttgttccttgaaccctggctctctcagtcctttcctgcttcagccttttaaacaaccgctgctctatatggtcactgagaattgttcttggcagatctttcgctccaagaacagcactctgaagtaaaggctttctctcattttgctccacatcaattacatagcaatatgggcaggtatactcagcttgccccccatcattcctccgcccattaaatagagcacatatttgatgctgccaggcctgacatttatcacattggacccactacaaaaaacatcaaacgaaatagacaaactcagaaaaaccaacaaaacgagatgcaaatgacaatacaactctactgataggatagtcttaccgattcttcaatctcttcatcgtttttctttttctcgagttttgcctttggcatggaagtcccttcagcgagaatagtgtctcctcgggattcattataacagggaatacaaaagtaatgacgagtttcaccacctccaacagtatagtacatcgcattccttttgatacgagcaccacaaggagtacaataaataggtggtggctcaaatgtaagcttctccaccgcacataactggcaggaattctcactcattgaattctccattgcctgattcttttctgctttggctttactctgcacacacattaaaatttaaatgacaaggtattcatcaatgatcacatagctagagattcatcttagatatatgaatagacttgcttctctgtaaactttttgtaaataaaatagcaaacctggccaacccactgacgaagaccacggatatgttctctcacttgttccggagtaaacaattcagttaaagaaacaccctttatctttggttttctagattttgaggtaagttcaggagactccaccagttcttctttctttggacatccaggctctttcttcggccatccaggctctttcttcattttgatgttttcttgctttggcgagtcaccagataaaccatgtttacctggttcactgacaggcttaggcttgggaacattttcaaaaggttcacttttcgtttctttgatgccgaatcctgcttgaacagaattatcaggaatttccactttcacttccatggtctctgacttcaatggcctatgatcctttctttcagcatcctgagataagtctgcctctgttgtagaaacaatggagcttttacaactttcagtcttagggaccactggttgaaaagattgctccaccttcaaccgctttaatgaaggttgcaaattatctaaagtatcagcacaacgaggggtaccagaaaccgctccagcattagcgcttagtgaatcatttgatactacagatctattcactgagcccacagcactgctttcgttttttaaacgggccagggcacgaacattagcttgttgctgataagtcttcactggcacacagacggggcaccgaggatccttgcagtttttatagtggccaatcaatgcctttgtgtgacgacagcggggatacaaacactgaggatcagcacaattgtccatgtgactccatagtttctgaactgttacgcaattttgatcttggcatctccctcctggcggtttgcaactccgtgcatgacgtagaaacagtagccatctttgttgatttttgaacttgggatcgtgacttacgtttccatatctacatgtggtaccaatagaattttgcagattatgggattccgatatagtagaagtatgattttgaccaataacagacccttcagtcaaattattaggttgagcttcatccattccggtaattctttgacggaaatcctcctgaatgtgctttccacttgaaatagcattagacattagagtattttcctgagacttggaaggccattgaccctgtggactggattctgattttactccaacagcaagattgctaaaactgttactagaatcagaacctatattctgcgggtgcatcatttgctgaatctgctggctattttgggggagtgatgtacatatatcactctgactttcgactgggagaagctgagcgtctgcttggcagtcttctccagagttctgatattgattctggagctgagaaagctggaatcgttcagatgcttgggactgtggagcctgactcttgttctccattccaggttcacatttcaccttcgtaaccatgtctgaatccacttgagttttccccaagccatcattgcttattaatctatgttgctgcggagtctgctgcttcaatttcctctgattgagaaattgctgctgctgctgttgaatctgatttggttgttgctgaaatcgattaggcggttgctgaaattgttgttgatgtgactgcagataatgaggaaagaagattgaaagtctaaatactcaaagtgacaagtgtttaattggtctacattgttgcatgcaaagtaaaattgactgattgctcaccagagaagagttaactctggacacaggctggaaacttgctgtattgatattatgagcctttgtccctgtcccagccgatgttatagctccatcgaaggggtcaggatttgttgtgctataaccttcccctgaaatatgaaacgtgctttcaatatgctgacctgaaatgagatcatccggacagaaggaaagaagagagaagttaccctgctgtaattttttggacgcattggtgtaagatgaacctgagtctacaattttttcgttcgctccaacatcaccatttacagagctgttggccgcacccgacggctttgattgcatgtcgggtctaacgccagcagccatatggttggacaacatgtgactgttttgaccaccagtatgttgcctttgttgttgttgctgagactgaggaacaattgtgggctcagcagaaaatccaccactgttgttgttagtaacactgttaacgaagccaggtgtaggaatcatttgggctgtacttctttgagcacccatggatgtcatgctccctccagaaccaagagaaaagtttctcgacgagtgctgatatccattagacatattacctgcaaaaagaagattttaaggtgtcagagaaacaagagataaaaatttccaggaaaagtatctatgatcactttaacgaaagaacctccatgcatgccaccagcaattagagggtttccagtgttcaaagcagtgcttgtgatgttggtgttgccaactatagtagcatcaacagaggatgtaaccatcaaattaggattacccgcagtctgtgataatcctggagtaggtatcatcgttccaactgaagaagaattagcatgtcgctgattgtagttatttatctgtcttccttttattaggcttgtaatacgagattcaagggttgaccggttcatgtaatcctcctgtagtacacagccaacatgtaaaaaaaaatctatgctaagtaccaatcaagtatttttcctttagacacacaaaaatatttatacctttgtgacagccatcttaaacagcccttcttctaaacgtctagcaacatccatatactttgcctttgatgcagcatcagctggagatggttgccgttgctgtaacatgttaaacctggaaagaatgaaagaacaagaagggcagttagaaatagtcccctatgcagtaaccatcaagacatctcagaaagcagaaacactaagttcttaagaaatgaagcagatatgccgtaatgcagccaaaggagtaatacgttggtccattccccgcccacattgaaacaacattaactcaatccataacacagaggcaactaacaagcaagcagtgctatagctgaaattgaaggcttacacaagagtttgcatgtactgtcgaagtttcataatatcatgatccatggcaccaacgatgttacgtgaaggccttacaccagtaccagaaccagtagcagcaccagcaccagtaacagcagtagcagcaccattactaccaactaaattctgcatttgagagtttccattattctgcggcactgtcccttggtttggaacctgcccagaccgttgaccagacatgtgagcctgaacattcatgttatctcttaaatcttcgtcgtcgtctcctaattcgtcttgcaactaacactaacaggcactgcataactcttctgtccccgagaagccaaaagatcgaaagttcatctcctgctctttattattcttacaagtgatctcagtgtagcagctcaatacacctagcaccgtcaagtgtcctgcaaaataatattccacactttcaattgaagtgacatgattgcaattcagtcgaactagaatcatagactatgatcaaagcaactaaaacccaatagcaaaaccaacaaaattgtaaacaattacgaaacagacaacaggaggagcaataaccttgaaattgactcacaaagaaacaaacttcagccgcaaagagcaaaacccagcaaaaaaaatcttccccaaaaacgttactaaagattacgatgatcgaatcttgaaaacgaagtagaacggagcaataaagtcgctgaacagccgatgtcgcacgtgtgaactcacacaagccaggataaaaaataggatcaaacacaagtacgtagacaaatcccagaacgagattcctccaaaacctagacgacgaggaaattgaaatatcgacaaattatttcgaaatcagagaagtctgaattcttcgatttggggattttgatttattttttttggctatttagggatttttggttttgattttgtaagtaacaaaagacacattaaataacacttaccttatgttacttatgtctgaatacgaatcatcaaggaacctctgtcaaagttaattgggggaaccaaggtcgacaatccaacagccaaggagaagtgtcggagatacatgcgctcctatccgtccgatcaaatgttccagtaatttaaatcttcacacccttgtagtttttgctctgtttactttcgcaactacttttttttctgtaccgattaccaagagtaactaataataaaccattcaaattcatacatgttccaagtctaaccggaaacaaatcataaccggttttaccattcctactttagatcttacaattagcaatacagtagcaatggagaaggcagaagcgttagtattgtatatgttatcatcttttccttgtaacataagcaatgaaaacgtttccaaacaagtcgtaaaaagaactttctgataatcttcatggctcaaggctcactgacttcagattctcagcaatctctgtctcgcactgatctctgttctcattatcctgctccaaaccaaaaaaatttggaacatcacaaagttcagaatgtttataatattacatttcgaattatacgcctcttaattaaagctcgtgaataattcgatgtatgtaatgtaccattgtgggttcagcagagactcctggagtaggtgttatggttgttccaagcgtagaagaatcagcatgttggtgcttgtacttattcaattgcctgccttttattaagcttgtcaagcgagattcaagagttgacgggttcaagtattcctcctgtgagttttgaagttaaaagtgtcagaaacgaaaatatttataagggaggacatatagcaaacaagctggattcagtgacaacatgtcagaaggcatcaaccagtcttgtttagttagaacttagaaattctcagtaaatcaaatcctaaatgcttataactaatcaagtaaatataattgatgtacctttgtcatagccattttaaaaagtccttcctctaagcgtttagcagcatctaaatgcttcccctttgatgcatcatcattcggaagtgggtttcgcttctctaactggacgaagctggaaagattggatgatcagttaatttgaaacgtttcctcaaatgaggtaacaacccatcaagaaaccctctagtgtggttcggagatatacacgcagagaggaaaacaactatgaacaccaatgtgacaagactggaatccaaataagtaacatttcagtagtagaaacactaatagatgatattgtttcttaagaaacaaagcagaaatacatgatcacagagccaaaaagcagtaataagttagatcattcccactttcccagacacattaactcaatccgtagtacagcagcaactaacagagaaaaggaaaagagtgcaagaggaacgagtgaatgtgaaaaattgaaggcttacatagcgtctcgcatggaccggcgaatctggaaaacatcattgtccatgggagcaagtgtaacgtgaaatccctaaagcaacaccaattaaccagcataatcataatcagtagtaaaaccaagcataagcaaagaaagaagatacatctaaacctcagatgataaaacctaggacttcaatccaactttaaaatttgatacacaaagaaagaagcaatcttccaccgcaaagatcagagcctagtgaggaagattcttccttacgagatcaagaaaacgtaacctatgattacgatgaagaaacaatgtcgcacgtctaaactcacgcaagccaggaggataagtaaaatgagaaatctctgaaagagatcttgaaaccgagaagtaaaagaagatgagaaagcgaatttaagacgaaattccaaatagagtaagttcctgagctggagtttctgccaatcagaggtttttactagatatgcaattatgcatgttcatgccagtctattaaactaccattttacccttgtatttctctgtattttacatcattaatgttctcttcagatattagcaattttttgttagacacttgaccgaccgacactgagagtaacaacaccattgaatcatatcataatccatttaccgcacggtccagctcaaaccggaaacaaagccaaatttgattttgccatcggtatgaactcaagaaatacagatagcaataacagtgcaaaggctgaagcatctttatttgtaacagaagcaaacgaaaacgtttccttaagaattaggcaaaaggcattttcggatcaatattcagcggtagaggctctccgacctcagattctctgcaatctctgtctcccacctatctccattctcaagaagcttctctttgtcatacagaagttcctgcacaccaaaaagaatcagaatgtcatttatcgaataatacacatctaactttaagatcatgggcaatcttatgtctttctgaattgtttatacagacctcatgtgtctcggttgcaaactcaaagtttggtccttccacgattgcatcaacagggcaagcttcttggcagaaaccacaatagatgcatttcgtcatgtcgatatcatacctgtacagctccgaacaatcactacactacgaaatatatagaagaaccatagagacaagacagtattaaataatatatatatggttaataaacgggaacttagagggtgacctagtggttctgcggcttccatcttcccgctcctctgcctctattgtgattgcttgagctggacatacctgatgagcaaaagaccagtatccatgaaaaatcacactttatgtcaatattgtgctgtggtatgaattctcgagtagcatagacttcaaaaactcacagcttcgcagagtttgcaggcaatgcagcgttcttccccagttggataccttcgaagagcgtgttcaccacggaaacgagggctcaatggacccttctcaaaaggataattgatctgcacaaaagataaaacttgagaatcagaatatttttctttcagcctaattactagagtcaagggagacagccactcactgtaacttttggatcaaagaagtacttgagggtcagtgacaaacccctgaccatttcagtgagaaatagggtgttcatgctccgttcaaagactgtaaaagtaagaaacatcaggaatcgctaagactcgcagaaggaagtaatcaggaaggaatgctaagagaatagaaaggttgaaaagtgtctggatcaaatagcttaccagtactccagtccttggagatctctttagcaagctgctcagcttcttcatcatctacatattaccagaggcaaaggattagtaacctatattcctgaaaagtcatagcctaaattaaccaagagaacccaaatggaagcaacaaaatttatacctttgttgcttccataagatatagcacgggactgtagcccacagagatgagatccctgtaaaccttgccctgaaaaagcctatcaacaaagacaaggtagatgttaaatgcgagaagaattccatagcatagccaccaaaagagctattgaaagtaaaagttaactaccacgacgctctcagttaaagtatttatatttgcagagattgagataacaacatttaggcgatacattctctcttcaaggaagagtatatgatctaaaggaaaaatgaagcttcacgattgatgtaccaacgcaatacaaagagatgcatagaggaacaatacccaggaaaaaaaaagacaaaaacatgtatagcagcaccacttgcacatgcctagagccggccggggcagacaataccaactagtgatttcaaaaaacttagcagcaattccaaatttctaggaatataagcgatataaaatggaagagcctacgagattcttacgagatgtcgagctcggagagcactgaacgacctgcgagctagtagcgaagccatcgatagaactcaaaatatcaaattagggtctctcttcttcgatgtgcctgatgtgagagaagaaaatccgattagctgaaaagcttaatcaagcaaaagaagcattgaacaagagaatgaccaacgaaaagcctaaaattccatccgaaccttaaacgcgatactcaaaaaagcaaagcttctgcacgaacccagagaaagttcgatctcacaagaacattgacacgaatcctttgctggtgattcacggtcgtcggaacaaaattcgatcagatgtctcttaatttacaaattgacccttctggttaactacttactcagctcataaccgggcaatcaaaccggttatatttggtatgacagtcaattccttccaagtttcacacatttcaggatccaggttctcaagacgtggaccaaactagaccattgctgaaaaaagttaatacctgatcaatggtcactaaccggacctaaagttcacaaagtagccgagattgatcaataaaccgggaaaaccaaagactacacaaaatttagaggagatacaaagtgttttggtgacaatcttcaccaccactggggaggaactaacggggataactctttacaatgaagaagaagaaaactagttgagatgttatggtgctatgtagagagtgttgccacagttaatgtgggcttggtttagaggattccatctatcaaatacaatccgaccgcctctacccattcttccttgaaaccgagctcttccacttcttgcatctgatggagggatgattcccgcagcagccagtttatcggggaccaatgctttcgtgaacagcataactggctcattaggattctacacagaaacaacataaacagtgaacgtaattctctcttttttatcttgtcaccagaatgtagtaacctaatagtctcaaatgtttcaaatacagaggttctgaagaattaccagtttgtggagccatccaagtcttctcgcctcttgctttatgctcccggcttgagctcgagcgaggtttgagtcggtgaaacgacgatgaggggtaaaggaaggccttgtacatgtttgggtggtggtcgggtcatcggagtccatgaattcatcttcgcttgagccaaatctgtaagctgtagagagtggaaacccagccagagccaaactatcttccaaaagttcggtttcattctgcaaacatatcaaaaccccacaaaaaaaatcagaggagatcgaaatgcacaactctttctggtaacaaaagaacactcgatgcaggttgtagaggactaccttatatttcagttggattctctgaaggctaacctcactcgccatgaaatccctctttttctcttctctctataaagataacatgtttttaatcaagttaatacctatggagtctgcaggtatctcttaagatatcaataaaattacattcaagtcacaaaatatagatgtcatttagattaccttaataagagcttctagaatggtctttgcttggtcaagattgcgcctgacctaataataacatatcccagaacagaagagaagaacgtttgagaatccaggaattattttaagaagttaaacacagattcaggtcttcccttacctgtcgcagcttctcaaatgactgcgcattgttttctctctgctgcatctgaagtgaggtcaactattgttagtaagttatggtgcattttccatactcacacatgtaagataaggaaattgataaaccacagacaacaagacagcctactcttcttgcgtgtagtctatgagctttctcccgtggcctaaacacattgtacggattggtatcattgaccggtggtggaggctgttccaaacaaaaaacacaagagtagctaattttcagtacatttcagaataaattcatttcttccacatgtaagattgagaccagtccaaatgatatacctgtaaacgccgcaagataggcttctgccatatttcacgctaaaagaatacaaaagtcgaagttacttaatgttttaagcctatgcccaaagaaccattaacaacttttcattaaaaaaaaaaaaatcaattatcatcaaactatacgacaactatatcaaaccttatttttccaataactgtatatagcgtggaaaactccatatttgatggacaaatatttcagcgcctgtaaaaaaaatggaaatagcacaataagaacaatgtaaatgtcctgctctgcctctgagtaataaccccaggagaacacattcctctagaggaggcaatataatcactattactagatctatgctcctggctcctgctacagttttaggcagtgaggaaaagtataatcacatcctttggaaaactgtccccgttaaaagatggttcactatgatgagaactagccaatcaaccatcatcattttattcctccttttgagttccataaccaaatataaatcaaaattagataaacaaaagaaaataagtgtatacctcaccagcagcatcaggctgcaaaagcactggaactggcaaaccaagggtaggagtaataactccagctctttcccgcgccttatgatccaagacctctagtttaaatataacgatctcaagcctgtatcaagtaattaagcatgattacgggtagcaggtttttgttttgaaacaagagaaaagttgagcactatctcaactcaatgttaggggaatatcggatataagtatagaaccaattcttctttcagtttccacttgatcacatagtttttgcactattggcaaaatccaaaataaattgaaggcaccagaggagagacagaagaaaaatttagattctagagctaatagatccatctaccacacaacaaagctcatagaaatgtggataatataaactatctcaatggttaaaaatatggaaagcatgttataaacaaacaattaacaaaatctgaataagaggtaggaaactttacatttcaggtgagagaatcattgtctccttattatactcataaagccagtcatcatcgtcattgtcaagatcatactccacaaattctccaagctcagcccgagctgcaaaacagattttcatttcccatgttgaaaagataacaaatgttgaagagcatttcaggtattaaaggtttacctcctctagcgcgtaaatatgaagcaggctgattaaaagtcctagagtagtctctttcatatgtatcaacaacaagatactgaggtgttgggatttccgaaatcagtttcttactaggcactggaggctgcacctgataatgtgaatacaagaaacttttaatcatcactctacaacttcacatccaaaccgatacaccgagaaaaaaaaaaaaaacttcacctcattgtcaacaacctctacggcagatatacgcagcaactgagagtttctagtaatggaagaaggattatcttcgtcttcaaagtctttaaaagactttaaaattggaagcttcttgtgtatgtccagtggacggggtcgaaaagatagcctactcatttcactatcttcctcctctctactaaacaatatctatatagctattttgagtacgaaagacctcatcaacgctttgctcctatgagacaggaagaaagtaaaatctgcaaatggaaagaaacaacagaaatcgcgcagattcaaaatcccagaaccctaaactggtaaatgtgtaacaatttcagtgtaatatcggggggaaagcgaatgagatgtgatatacttacaaggcgagttttctattcctccggacgaatcgtaccggctaatcaaaaatcggggtctgttctctttttcgagcttacccagaaacgttgaaattcaaggaagagagaagctttataaatgtccgaaaacgaattgaaaattcctctctagtctcgacaattgaagtaatggatgtcgagtttcactaatactcgattaacagacgaggacaaacagttgaatcgaggagggaaaatatttggtaataagctttggttaatgtatgagaacaatgcaacaacaaaacataagaacatcaaatttcaagcattaccacgagcttggatcatggatctaactaaaatgtttctccagaaattttacttgtaataaacttaacctttagatttctggttaactggtcttctttgtagctttcacattacatagtttagggtttctcagagaaaaaccataacaacatcacagtacacaggatccacggattctatttacagagaagggatccaacaagtgatcaatcaacatatggtttcaagctcccatgtcctttacttcttcattatcaccttaaagattgtttcctttttatgctcttcgttcttatcttcgcccattttccattgttggaaagaacaagccattcagccattgttgttgatcttgccatccttgttgatgtcttcttttggtcaagtcgatgttcttcgggattgtttcttggttaacttgaaaggactccagctttttctgcgttttgatgtttcacagaatagaccggaagctagagcttgttgaagccataactcaaactcttcctcatcctcgtccatcatctccacatcaagatcccacgggaacctgctcgactttgatctctgtgttgccttttctaaaccgaccatgttcacatggaaacttggcctatgtgtatttggtctacacgccattcccttcaatggatttgaagtatacatatcaatatatcatcatgttcacatgcactaacacaaaagtcttagacgttatcttaaatattctctaagtgcgaaaaaaactttcgatttttgagccatattagtctagctaattatgaacagagagttatagcattggttactactggtcaagaatgagaagataccaacctgacaaatagcccattctgagacatcaaagacttttccctcagcgcaaacaaaagctcgtggtatttcaatctacaagagatgatatatacaataattattcatcattaccaaaaagcaaaattcggaccaaagaactgaaagccaaaccttatgtgctttctcgaataccagagtccctttgtgttcaacccatccgtcaccatctttggcttgatgatattgaccacactcctataattttaatggaagcaataaccatttaacaaattagatgttctgcgaaggaacttgaagtcaatatgtttggtaatgagaagtgtaagttagctaacctgacaccatctggcctttgccttactcctgttggtacatacccaaatgtgtgaattcccgcattttgtacagtgtatgcgccttgactcttctgatcgataagcagcactattctgaagaaattagaaaatctgttcatcaccttttataagaaaacaatagaacaacacatgacgcattcaaaatctcacacattatatctactaacctgatgagaagaggcgtgcgaggactgacagacaatcttggtccgagattcttccttctttaacagctcatcataatctcttcttttaacagaatccgaaagaacctgtaaattcaaccttccatgtcttaatattcagaatataaataaatagcgtaaaatccacactgcaaattaccaagcacggatccatctttaacaattacctcgtaggcactttgaagtttcttgaatgattcacttgccaaaggacttcccatatttttatccggatgaaccagcattgcctaaaacaagggtaacacagcacataaaattagaaccaacttaattcaccagagacatagtttccaagccaagaaaacagaccttctttctatagtctttcttaagcaatgcggcatcaatctttttaaacagagggagccccaatgcttcatagtgattcaaactatcaagaattcgtttcatctcatccgctgaatctgtttctattttgactaccttaacagtagaaatctccttcatgttactgacaacagttgacgatgatgctggcttagtggacgacttatcttcatgaacctttttctctgcttcttcagcaggaacagaagaatactcaaactctcctggaaactcttcgtctattacagtttcaggtttcgttggctcctccacttgtgttttttcactaacagtatcacaccattgaagaagacaaataaatatatcgttggacaagaatgcaagattcatcgagagaataactccaggccatccaagtctgactttgacacagtacattgcatacattgtcgccataagaaccaccacccgtgcgtgattcaaagagaacaaataacctgattcaaacaacaatagacattaacactagatgaaaacttcattagctttaactacaatgggaaagagacaaaaagagcaataagatataactatgacatcataaatcgttctggaaaagaaaatggacacttgcctccaactataaataatgttccagtgatccaaaaattagcgtacatccacaatatcaaaattccaaatagtcctacaatgaagatcccaggtgtgcgacctaagtacaagacaacagcaccggcagctccctgcgatggtaaatcaagtataggtgagactcaactcaaatatgcataactcgataccacctgataagtggtgagattttcataaaatctacactatttagagatctagaacccagaataaaaataaattaaaaaaggggtcaagaggccttaccataccgaggagaacataaaccaagcaagatactgaagtcaggctaaggaagcaactccacattatgaggagcaaagcagctgaaccaaatttaacactggactggaaacccctcaaaatgcagtctttccagtaaacaaacgataaactaagtaaccctaatagcttcccacatccactgcacactagtggccaatgacgctctgccaaagcttctgtcttttccccaaaacattgtgttgcagtacaaaaccacaaacacaaatgtttctgagactgcaaccatatccaaccttgcttaaccaatcctatatcctccataactagataaaataatcaaaccctaaactcttcctccaaagctcaggccaattgatagaagtaagaagaacggtactgaagaaccaggactctcgagaaaacttgcttctcagccattgctttgatctggtaattagatcactagaaattacaaaaggttcgtaacttattcaactagctttcctcagaaagagagagatagaagatacaacaagagtacaagacaatagcagagataaaagactgcaaatccggctttaagcttattcgttcaacgcatatcccttcacaaacaagtttccccagcaaagaagaaacatacaaaaagaaaagcaatcttcagaatatacgaatcaaacagaactttccaatttctgcttcttaaaacacaaaaccctaaattaacccaacaacaatccagtctagtacatagcctcaaactcagatccgagaaacttaagcaatcgcagaatcttccatacgcagacccagaaaacaaaatagcttcgttagagcatcacaccgcaccgacaagcatttcaccgcttcggtatgtagacttgagagagagtgaagaaaaaggaagaagcaatgagctttagttaaagtaaattggttacactaaagataagctcgggaaacatgaaaccccaaaaagagctcatgagaaagcaaaaaaaaaagctaaacgaaaaaagagagaacttttaaaagattcaaaaaggtttttggaggagagtaagaaagaacactgtggcgtatagagacagagattagagacgaaggcaacaccaaaatataacctttattacttcttacttcttagcgaatcgtccttttggaactggattaagggcttgattggttctccctctgccacccgcaaacgctgcgtttgcgggtggtagcggttgttagcgattgacaccaatcatagaaaccgctagatatcgctttggaccgctcgaaatcgccagatttcaaaagcaccttcccgcaagcgtttgcggttgcggacggtagcagttaggttaaaaaaaaaaataatttaattaattaaaataattatgtcttccacccaaactctatatatcttattcttattagaaaaccctaatcaatatattgaaaccctattctctcaattatggcatcgacccaaactgacgaaaatcaaaatcaaaatcaagaatcaaacgtaagtatgatctatcctttcatccattcattagctagtgtaattctctaagtatttcatagcatcgtcatttttttattttgtatttttgtttgagttttttgattgaatacatgttttgatttgctttctcgattagaaaatcatttggtcagacgagatgacccgtttcttgttagaactttatcatatgtatagaggcaatccggaaaacccgcgaattcaacgttatttatagtttatcacactacttgatgcaatttttggtgatgtaccaaatgcataaagtattaagctttttcttaccaaatttatttatttttgaatttaatattttatttatggttttaattattaaacatgtttaatttttctaatattatcaatttatcataataatatattgtattttttcttttaatagtaatatattatatttattttggttattttttatttaattaatattgcacccgctggtttaccagtcataaaactcccgcaaacgcatccattatcaaacgctcaaccagtcgtttaaaacgtttgataacgcttaaaaccgctaccgcccgtttccgcaaactcctgcaaccgcaatcgcacccgctgcgtttaaactagtcaggccctaagtgaccataattattaagggcctgactggtttaaacgcagcgggtgcggttgcggttgcgggagtttgcggaaacgggcggttgcggtttcaagcgttatcaagtgttttgaacgactggttgagcgtttggtaatgggtgcgtttgcgggagttttatgactggtaaaccagcgggtgcgatagtaattaaataaaaaataaccaaaataaatataatatattactattaaaagaaaaaatacaatatattattatgataaattgataatatttgaaaaattaaacatacttaataattaaaaccataaataaaactaaaaattcaaaaataaataaattttgtaagaaaaagtttaatactttatgcatttggtacatcaccaaaaattgcatcaagtagtgtgataaactgtaaataacgttgaactcgcgggttttccggattgcctctatacatatgataaagtttcttcaagatatccaaacgatttttaacacatcttcaactcaaattttttccaaacgttaatattcttaagaatattttctttttgaacatcacttagaaatctgattttggggtctttggattcttccgtttatttctccacaataacccgttgaagtaacgcaaatgtggtctcgtttgaccaaatgattttctaatcgagaaaacaaatcaaaacatgtattcaatcaaaaaactcaaaaaaaaacaaaaaaaaaaaaacaacgatgccatgaaatattccgagaattacactagctaatgaatggatgaaaggatagatcatacttacgtttgattcttgattttgactttgatttttgtcagtttgggtggatgccataattgagagaatagggtttcattgattagggttttctgataagaataagtataaggtttgggtggaagacataattattttaattaattaatatattttttttaacctaaccgctaccgcccgcaaccgcaaacgcttgcgggaaggagcttttgaaatctggcgatttcgagcgatccaaagcggtatctagcggtttctatgattggtgccaaccgctaataaccgctaccacccgcaaacgcagcgtttgcgggtggcagagggagaaccaatcaagccctaagttaccgaaattttctgggtccgacagcctaacagaaccggatctcatgagtttcttaaaaccgttagaccggaatttgtttaacctctcggtttaagctcattcaaggtaaacacagaaaaacagtttctaactcaaaccagtgaatcacaaacctgctacatcaaacttgcttgatcggatcatttagattcaacttcaatctataaatatatttacatacatacatacaacactcaaatctctctgtttgcaactgaagactgacttgaacaagagcgaggcagagaccgccttttctgcagtcagctatggattcagcaactaacagaaaacctctgtttgaaaccatggacgagaaaaaaagaagagagactgcagaaacatcaaactcttttttcttatttacatctcaaaaacagaaaaacaaaaagcaaaaattttaaaaaggttttttctttctttctatatggtactgctgaatgtattaccagcattagctgatgaagcccctgatgagtaagcatttgagtgatctctagatgagccattagacgaagaagaagggtttgtgtagttttgtctgttcacttgctctgtcttcgtcgccacaggtcctctcactttcaaatccatgaaatcagaaatcaaacccggtctgcttattttcttgtagtctatatccttctcccctgttaacaacctcactacggtggacatacttggtcttagcttgggactgtcttgtgtgcacaaaagaccaatttttaggtaccgacaagcttcctctgcgtcaaacactccatttaaccctgaatcaacaagatccacgagctcattccgctcataaagttcccaagcctgttgaaatgtaaaaagaggttataattccaatacaagagtttaaaatgcaagaatgaccaattctgatgagtagcaagacttactctttccagaagatattgatactcagtgggtaatcgggtgtttttgttacttcttccactgactatctccatcagaaggactccaaagctgtatatatcagctttacgcgtcaactgtcccctaaccgcatactctggtgctaaataaccactgccgagaaacagatgtgaacacatataaagacctgcaattttcagagggaaataagaaaaagagggaaaagaaatacatggaactcacattgtacccgcgacacgagtgctaacatgagtcatgttaggtggcataagtctagcaagtccaaaatcagagatcttgggggatagatatttgtcaagtagaatgttgcttgctttgatatctctgtgaattatgtgtgggcgtacttcctcatgaagaaaggcaagacctttagcaaccccaacacaaatattggcccgactactccaatcaaactgtatcccactacgagtgtagcccccagctgaaaaagactttcactcggttaggaatacattacaagaccagagaagctgacacttagagagtaagaaactaagagaatcaatcacctagaagcgtcttatcaagactattgttctcaaggaaattgtaaacaagaatcctatgattcccctccacgcagcatccatacaacttaaccaaattctcatgctgtatttctgatatcacattgatctcagtcaagaattcttttacaccttgtcttgactcagccgagaggactttgatagccgcgagttttccatctttaagacagccctaggaatcgaattttgttcccaaagattaacaagatgaagagagaatgtgtaaaaagaagaataagcaacagagttttctcatttaccttgtacacagaaccaaaccctccttctccaattttattttcagcactgaaatcatcagtggcctgacgtatctctctatatttgtatatctttacattgtctatcgctgcgatttctgtttgcaaattacacacttaagttagaggaaaccaccaacaggactatagagaattaacattccaaactcaaattagtaatcctggtataataagaagcctagataatgtatctcagtacctccatcaacttctgtagcttctctcctgtgacacgataaccaggagcaacccatcaatgtaactatgtaagacagacctgtgacctgtttctgcaattaatcagaagcaattcagagatttgacttgtaactaactagtaaagcaggcatagatccatttcaattactactcaattcctcaatagaatctatgtccaagtcagaagggaccaaaaatcttaaacatgaaaacaactagaaaagatgtgaacttggaatttgggttttgtcaagactcagaacaaaacctagaaacagacgcagccaaaagacgagaaaggaaagaaagaaagagaaacccacctcagaaacttcctaaatttggaacagcgatgaagctagaatcgagagagagagagagaaaaggattcagaaatgggagattaaaaaaacttggtatttgggtagagtttgtataaaaagcatgtggctttacgcgatcagagtcgctgtctatctctattctatatgtgtgtctcgccgtgtgtgagatcagattaaggatttgttgaaatggaagactgaagacgaatgaataaggaaggaagaggaagacggtcttcttatggtggcgggtaaaaagtcaatgggtcaatcgtaatctcacgtcacctttttaatacgttgctgcccccgacgaccaaatctactaccctcttcttttttccttacttttctttttatctattttcctcgtgtttcaattatgaattatgagattcgacttttaattatttgactaattagtattattaactttatgcttcattcatgccttcatgggcaataattcttcctcttcttgggaattaattcttttttttactataggcgttcaataaagatgaaccaattatttgtccacttgattataatattgattttaaaaaacaaattccagcatttttcgtcaaaaaaatccaacatgattttcttttctacgattatttcaatagtttattcacatatatagattcctcacacatttcaacacgattagtatattatattagtaacattatttttgtgaaaattaatatgccaagtgaataatataattacaaaatagtgaaacattggaactacaacactaaaaaaataatcatatgatgtaattaagttattatataatatatttatgaaaatttacgttcaatgatttgtatactagtgattactaagtagatatgaacagaaagagagctcaatactaaggaagaagaagatccagaagaggaaaatgtaaggagacgaaagtggaaaatatttctgttatcttattaaagagtgaatacaagacattatatacattttctctatctaacctaattaacccggaacaaaccggttaggtattaacaaaagaatcaaaccaatgtaaatcaaagtctattagtccccctcaagatggagcataaatgttaatgatgttcatcttgcttagaagtcgtttaaactgacctgaaaatagagcttttgtaaggaatatcagccaactggttctctgttctcacatgaagagtccttatcaaaccaagaatgatcttttctctaatatgatggtagtcccgctcgatgtgcttcgtcctttcgtggaaaacaggattgtttgcaatgtgaatagctgctgtgttatcacaatacaaaactgaagcttctgaaacatcaatccaaagatcctcaagaagaaacctgagccacatcatttctcgaacagccatggacattgccttgtattctgcctctgccgaagacatggagatcacttcctgcttcttagatttccaagctactaaggacgttccaagaaacatacagtacccagttgttaattttcttgagtctgagcaggaactgaaatcggagtcagcaaatccagacaactttaaatccacattcgcagagtagaacagaccttgaccaactgttcccttcaagtagtagatgattttgtagactgctttcaaatgaggaactcgaggtgcagatgtgaactgacagagcctatgaaccgcataagtgatatcaggtctggtgaatgtgagatacatgagtttaccaaccagcttgcgataatgttctgcatcatcaatcagctcaccatcttcttgagataatttctgatttggttccatgggaactgaacttgacttgcatccaaggagaccagtttcagccaacaactcaagcgtgtacttcctttggcagattgagattccatcagtatttctagcaatctctaggcctagaaagtatctgagggttcccaaatccctgagcttagaggaacgctgcaatgcgtctctcagcaattctgtctctctatcacagctactagcaatgataatatcatctacatagaccagcactgccatataagagttcttagattttctggtgaaaagagtgtgatcacctgaagattgtgtgaagccaagggccttgagtgactcagagaacttcaagtaccattgccgagaagcctgctttagaccgtatagagacttcttcagcctgcagactgcatttggcggaaaggagtccccttgtcttggtgagtatccaggtggcaaggtcatgtagatctcttcgtctaagctaccgttcaagaaagcattagagatgtccaattgactaagagaccatccttttgcagcagcaactgcaatgagtaacttgacagtggtgagtttagcaacaggagagaaggtatcaacataatccaacccttcagtttgagtgtatcctttggcgaccaatctggctttgtatctctccaagctaccatcagcattcaacttgattttgtaaacccatttgcatcctacagccttcttacccactggtaaagagcaaacaacccaagttccattatcttcaagagctgtgatttccattcccatagcatcacaccactcttttatttgtcgtgcttgagcatatgtgtgtggttctgggatcttgttcacagcattgataaatatcatgtaggggtctgagagagaggagtaagagagaacctctgatataggatgatctgtagaggaggtaacagaattgcagtggtagtccttgaggtaagctggtggccttgatactctagaattctgtttctctgcaggcacattcgacgctgatgtttcttggactggcagtggctgagaaggatgactgtcgttcctatcaacatagatgtgtggaaagaaaacagaagactcttcattctctgcaggtttggtcttgaagggaaacaagtcttcataaaagaccacatttcttgagataaagatagtgtggctctcaagatcaagaagtttgtatcccttatacccagaaggatacccgagaaaagcacacgtacgagctctgtcttcaaatttgtgacgctgttttggagaagtactagcatagcacagacagccaaagctcttcaggtgagtataatcaggcactttcttggtcagcatctcaaaaagggtcttgttagagataactggagatggtgtcctgttgataatgaaaactgcagtaagtatgcagtctccccaatatgagagaggaatttgagactgaaagagaagagccctggcaacattcaggatatgttggtgctttctctctaccactgagttctgttctggtgtttcagggcaagagtggtatgccacaatcccttttcttctatatagctcctcaaatttaagttctggagcattatcagaccgtactgccttgacctttgtgtcatactgtgtctctaccattgtgataaaatcaggaaaaatggtgaggacatcgcttttgtatttcataaggtagacccatgtcacacgtgtgtggtcatcgacgatggttaagaagtaatgatacccctcctgtgttggttcagagaaaggtccccagacatctatgtgcagcaaatcaaaaggtgctaagcaaatattatgacgactaggataagttaacttcttttgtttagcacgttggcaaatatcacaatgtaacaatcctttattcttggttttaaaaattccaagtacatctgtgagcaagtctatgagatcaaaagatgtatgaccaagtcgttaatgccaaacagatgcatcaacaacagagtttgcaacaaaagaagtagatacaacgtcttcagacactgaatcttcaacatccagcaagtatagatttccaactcttctaccgcttccaatcgttgaccccttggtaagatcatgtaccacacaacaagtcggatcaaacacaactctggcaccaatatctgtggtcaaagcactaacactaagcagattcagtctgaactcaggaatatacagaacattcttcaatatcagatcagcatttacagcaatgttcccaacacctccaactctaatggtagtgccagtgggcagattcacatgatgttgaactgaagtgtcaagattaaggaacatatctttgacatgacatacatgatgtgtggcaccagaatccacaatccatgtaccatgtgtcatttcagtctcagagacagtgagaataccaatgaagctgaaagtagaggatgagaaagtaataccagatgggtcattgttgtgagaagtggacattggagcagtgttcagaaccggagaagcaggctgtaactgagagctgaacaaagcaatgagattctgtatctgatccttgctcatgttcccaatgagactttccagacctgcaggagtattctgactgtttcctgttacttgtgcagtgacagcagaatttggcttaggagcctgtgaagactgagaggcctgagcaattttctcatagaaagactttcctttcttccagccaacaggatacccatggagtttgtaacatctctcagaggtatgtcctgtgtaaccatagtgagagcatatcgactttttgtctttcttttgaacagcacccaacattccaggttgaggcatgttagaggacgaagccaacgcaccaggctgaacatcatccttagtaacttgaaaagcagctgaagcaacattgttactgaactgtctttgactatcatcttgatccaggatgttgtaaacttctgctaagtcagggagaggcttcttcatgattatctgtccacgaatgattgagtacttctcatttaaaccagcaaggaacttgataatccttcctctgttcacattagacttagcaaaaatctgactttcacaagttgatttcttgcaacaatggcagggtacactagcttctgcaccatcgagattatccctaagggttttcaaagttgtgtagtaggtggaaaggttcatagagccttgacgaaggtcttggatttgttgaacaagctgaaaggttctagggagatttgtcatgtgaaaacgattgtgtaaatcgttccagatctgagcagcatcatcaaaggacaaaatactaccatagatttctctgttaacggagttaagaatccaggacttgaccatgctattacacctagaccagatgcgtaagagatggttaccttcttcagggcgagggcaagagccatcaatgaatgcgatcttattcttcgcatccagagctatcttcatcgcagagctccactggttgtagttcgcgccgtctagctgcacagagacaatcgatatccctgggtggtcggcgttatgaagaaacagaggagagtgaacactgtcagggttcatcagaacggaggagccaaacggagcaaacaatgcttcctgaatgggtggtaagcttcctgctcgagaggtgcttcctgcgcgtgatgagcttcctgtcttgcgagtgttgcgacgaaccacagctttaaccattttcggattttatgaaaccaaatcgaaggcacaacaaaatcagagagaaaagcgagctaagcgtatagctctgataccatattagaagtagagatgaacagaaagagagctcaatactaaggaagaagaagatccagaagagaaaaatgtaaggagccgaaagtggaaaatgtttctgttatcttattaaagagtgaatacaagacattatatacactttccctatctaacctaattaacccggaacaaaccggttaggtatttacaatgtaaaccaaagtctattaattacttatttgtattagtgatgttgttgcaccaccatccacatttttcttctttttttgatagaaggcaccatcaaaaccgaaatattgcatgttaaattttcttacatgactacttggttttaacctttaacgatgccgatgagttaaggtttcttttaaacgttataatgtgaaaacgtgtttaacaaaaacaaaacggaatcgcttattaaattatgtgaaattttcaacgaacctttaaaatattaaataaaatattgcgttagattgtgaaatccgtaaacaatgatataaatagtgtttttttaaaagcaacttcggtcaaaaagtcaaaggaaaaccttatcacattttattgttgtacttgttcgtcacgaacgacaaggaagaaatggtactctgttcacactacgaaatatgggtaacggtaaaagcagagtgcttaatcttatactactctttagatgagttctcttcactgcaaaatgtagtttgataaatgaaacccaatgcataaaactttcaacgtcagttccaacagaaaaacatttcacacattacccaaatttttaagaaggatcaaaagaggaaatttttaagaaggatcaaaagagggcttataagctttagggtcaaagtcttctagcaataatggccacattcctaggtgagatggtgggatcaaagatgggaagcataaccacttttatggagtctccttgttcttggaggaacataagtctatcaagcaagatcaatgtctcaagcactggtcctaatgcggctcgaatagaccagtaaggccctatcagttcctgcattttttttgagtttgacaataccaaagacaaacatccatcaagttatgagaatctgagaccgaagagaaagcgagagcattgaggaatagcttacagtgaatgcatcagcttcattccatgtggcattcaggtcgagatctcgagggtgttctagattcaagcgggaaaatgctgacaagcagaacttctcaaaagaagaacacatgtcggaattcaagcttgtctgcctcatgggtttcttgtcaaccgtgtctacagtgaactatagatattagcaaagtgatcttggtctcacttataatagaatttagtctatcaaactcctgacctttcctagttgtatctactgctgctggagtttcaagggattttcgttgctgttgacgacggaatgccttaccttggcgcccaatggatggacttgtcgccaaaacctctggataatgttttgacagaaccttcaaagggtaattaggtttttacttcttaaagacaatcactataagttaagattctattaacaactagtcacagatcttggaagaaaccacataaccaaaaaccatattaccatttggaaagcagcacgaaaagaatgcaactcgaaattctgcagaccagcatcttctcctaaactgctccatctctcagcactctaagaaaacacatgtaatttctttacacaaatgggtcacagagaagaaacaaaatgactcaaaacaacaatgttgcaacatccaaaacagatacaatagtggactatacctgacaagctaaatcacgggcatttttgccaagggaaaagcccaaggatctgagaccagcgctcatcggatagccacatttggaacaagaatcctcactacttttttcagataataagttgtaacaacagccaatgctcactaatgctttaacttcttcacactccataaaagtcctgacgaaatcaagttgcatattggttcagctttcacgggctaacacagcaatcaggaccaatactgtattcagaagataacagatatcgcaaatgaataattgcagcaaacattttaactaaccttagcattgtaactgatagatctccacatgcatgaaggccagcaagaacaagtgaacacgatctgtttgcatcacttgatgattgtgatctgctttgaccttcttcattcaatgcacttccactagaatccgtctcatccttctccagatgaacatcagtcaaggccttcaacatttctgtggataaaacacggcatgtaatcgtcattggaacatctgggcacttgtttcctgaactaacagagaagaggttaagtagcattcacaagtctaaaataccagaactgtgcacaaagaattaggaaaacaatgagcgactcttcaagctaaaaatggaaagagacatctgatacttggtaaaggtttgaaataaacttataatgagctaaccccttacccagatttacgcatctgtgctgcaaaatgcttttttatgcgtgctgcgcgtgcatctgttacctttccatgatgagaggaagaatcgattgcaaccactgagtgcttatattggaaagagagaacctgcgctagataaccctggacaaaacatttaccaatgatgttatttaacacactttaggaaagctataatatactacaaagttactaaaactctgatatgaaagaaaaaccatcactcgaaatattccttaaacagccaaaaagagaattcaccaatgcagacgagaaaaaggaaccatgcaattaagattgatagttaaacaagagaaagggattgaagatacctggccagcaccgacatcaacaacagtaggagctccaacactcttaacaactgagctaacaacagaggaaagaacttcaacctgcatgataccataataagtgacctacagatccattcaaatgaagtggccagtataagatacatttgacaaataccttacgtttaaacaaacataagttttgtactaagaaacttttatataaaatgctatgagctgttaatgatcctcaatttcatgttttacgcgtgaagtggcagataactttgccagaatttgatggtaaaaagacttgaacagctacaaaaaaaatatatactctcttttgaatttaaggttcttggattgggattagtcaccagatgcaatctactgaaattcctaccaaaacaagacatcattgaaagacacgacttgcacctctggatagtgaagtgtgaagataaaaatgtacctcatgttttttcttaagattcatgccctgtgaaagaacggtgctaagaggtaccatatccacgtctgcgagtatctgccaacagtcgaaaatgattaaactttatttagtctaggatctaaaaatactaatcctgaaacagcacaaacaggtaaagagaatacaataccgcctgtaaatccgcttgctctcgaggaaacgatagagacctcaacgtgtgaacaaatttctttagtgaagcaggccagtgatcctataatcaaatactataatcaatcatctcctttccaaactaaaataaaaatctaccctttctatcaaatatctcaatcatgaagactgagaccagaactttacctggacaccaccggagggaataagaagaatattttccggcttctcatcctttaagcaactcatccattcctcattaacagcttcccattgcttatcctggaatacaaacccatcaatcaactcataacccaactcgaagctgaatttaaaattgtttccgataatcgatcataccttgaagaaattgacaacgtgagcattgattaggaaagaaaacggtttaaggaaatcgataatggctgtgatccattctagggtttcggctctcgttttgcaagaaaacttattgctcttcattatcccgatgacctgagtagcagcaacgattctagtttccgccgccaaaagccaaccaaacagcaaacacttgcttttaaccgtcaaaatgttttctaaaaatacctcgtaaattttaatttattcaatttagcccacatttatttattctgttgtcaatacacccatattgtcacgtggccgagtcttcaagagactctaactgcaccggaaggttttgactcatgccccctcctacacttcctctcattctcttgtattaacactctacttcaccaaatacaattatcacaaaaatgatagcaatacacagtaaatcttttaaaccatgttccaaagaatgtagcagaaagcaaatactagtattcgtaatatttaaactaaacaactggttacataaatccaacatgaaaactgactacttaaacttaaagcaacttaaagtagacccaaattttagttactgatgtttgtcttgatcgtcgccgtcttcttcttcttcaccgttttcatagtcatcaacctctactgcgacttgagggaagtctctatattcgctacacatgttatgaccatatatgataacataaaaggtcctgtcgcggtcatagatgaactgcaaatacttgccatcttcgagattgttatcttttacaaaattctcccaaccaactgtaagaaacactttctctcctcttttcttcatcctaaccgtccaagatctcccactatagtccaggaggtccacagttattggaaatggtgctgggaagtattcgttgaatcccaaggggatttcctaatcaaacatttatatataaaaaaacaactctcaggagacattccaagagcagcaacgtagaaacaatggacttgctatttttcacttttcagccccgcagaaatgtttggttcaagcagcctataacaacaccaacacataaacttcattctaaatctagcaagattcagtaagctttcatttgctttttgctaatttaaagctaacaaaagcaattaaaggacctaagttattagctccatgaaaatgaactaaagcaatttaccctaaaccataagtctccaaatcagaacactaaacacatattttgaacttgttgaaataagaaaataaaaaagaagaaagatagagagccatgctcaccaatgatttagatgacttttctgagatgaaaggcttcataaattgaacctcaccagtgtcagccatggaatagagtgagaccaaatgtagctacaagcaaaatccagaaattgaaatgaagaaaacaaagagaagtgaaagagagaaaccttgaaaacaaacactttttgtaatgcagaaacagagagagagcttcaatggtcccgagtggactatttcaattttctctgtaaatcaaaaagatgaaatgaggaattgatgtcatagtcaaacaacttgccaccttttgaccaatcactgcttttctattctacaaggccacaccatacaaaaagtacaaaaccaaactcttattactattgggccaaattatacagcccaatagcccaataacgagctgagacaaatcctatcgacctagaagatccaacttaaaaccctagagttctctccactatttaaagacctcaaatcttttgatgtacgactcagaattcttcgaaacagcgtctgctctagaaattcagtgttttctcgaagcttcattactattttctagggaaaaatttagaagttattttgtctattgtgttgtgttttcttagatttaaagtcgatgttttactcttaataaagaggagagagcggtgataatgatgatgaaagatgattccatagaacaatccaactctgaccatcattgatgatcttaccatcatgcactaccatctgaatctcgctctcccttaaatccttttcttttagtatgaaatcgttgattttgttttctcagaatcggattttgtcggatcttttagttttgtctcaatttgccttaaatcgattgagaaaaattcatcattggttgatttggttctaagtatttcataccaaagttctgattgttatttctgttgttaaattgatttggtatttttttcttcgtttgcgttcataagtcataatgcagatttaactcatatcaacaggttgatattcaatagcaaaaatttggcctgaaagaaggaaaagtaatcccctcagaattcaattctcatggactaaattaatctagaaacgtaattgtaacaattgtctagaactattttgatggtagttattccgaaaacgattagttctgcaacatgaacactcatcttaattaatcactttcgcagataatcgcaaaataagttataaatccataaaattatgaaagatattctgatttgtgtcgatgaggttcacacagatgtggtatttgaggatgacttttagaaaaggattttatttcattggaactcagaaaataatgtaaactgggcctatttagttagccgatgaccaaattttctttaatgtcagtcaaaagcccgttaagtaaaaaccttcaacataattggtgctttcactttttccatcagtggacgggcccaaagcctgcttttctgatttacctgtctttttaataggttgattaacgtctcttaccctttacgagagcccataacggctagtttattctctgcgatcagacgtgtcatcatcgtggcggcccagttacatcgtctgctctattttccggctacagaaattgaaattttgttttaatttgaaccccaaggttttgagaatcattaatttcttcccactgtttctacattgtccataaatatccacgtttataaatttaacaactttacaggaagaaagaggaatcaaatcttacgttgtgaagtctttaataagcatggggcatttagatagatcttaaatttatggggagataacagaaatttggaaaactagggtatcagtgaaaaatggtcaaaatcagaatcaatttgcaatacttaaaattattagggatttttctatccactatgtataaataaatcgcaaattggcaactagccgttacgatctctctatctctctctcttttaaaaattcaaaaacttaggaactttttacattcacaatcttgcagattcttgcatattttctttcctttaacgagcgcaaaaaatctgagatttgttaaataacccattctgatttccggagtgattttcattcatggcgtcttctccagcaaagaacaagatctctgtttctccttcttctctattctcttcctcttcgccttcaatgccttccagaccaaaccctaagcaaagaaactcggaaaccggagatctgatgcgtcgcagtttccgaggcaatccattttcggcagatccgtcccggagaaactcaatcggtagagaatgcagtaatcgtgttgagattggtgataaagagaatcagaacgacaaggatcaaatcgctaatgtcgtcaaaggtccaacaaaaggttccaagcatttcatgtcaccgacaatttcagccgtttccaagatcaatccatcgccgaggaagaagatcttgtctgataaaaacgaagtgtctcgatcctttgacaaatcccatcaccaggttcaggtaaagtcgtctgtctcgttttctgatgtgataagcatcattggggaagataaagatgtagaccagatttgcatcgatgaaactaagcagcttcgtgaagaggaatcacatgatattactgtcagtgatttcgatgagattcttgagaggaagagtaatgataattcaagcttcaagatcagtcctcttcctccttatgttccatgcacatttcctgtgtttgagtctcatgaagtggatccagtggtggcaccttatgatccaaagaagaattacttgtcaccgaggcctcagtttctccattataagccaaatccaaaaattgagcatcgttctgatgagtgcaagcagcttgaggagcttttcatctctgaaagctcttcttctgacactgatttgtctgcagaacgagaggaggaaggtcaacaagaggaggaagttgcttctcaggaaggtgtagttgcagtagaagaacaagaagatgatggtgaagagcgtttggaagccgcagaggaaattctggatgttgatggtgaagagcgtttggaagctgtagagagtgatgatgaagaagaagaagtagtagttggcgaaagcattgaagaagaagaaactcatcagatttcaaaacagtctcgtttcagcaagacatccatgttgcttggttggattttggctcttggtgtggcgtatctgttgttggtttcttcaacgacgttttctcaacaaaccatcacagattcacctttctatcagtttaacatctctccagagatcataatgtctgctagcgagaactttgagcagttgggtgcaaagctgaggatgtgggcagaatcatcatttgtgtatcttgataagctggtctcaagtctacgagaagaggagggaagtgttccttttcaatttcataacttgacagttcttttggaagacaaaaggttgtctgatgctgttttccagtcaactagtgttgaaatcattgttgatgggttcatagtggatagcttagaagtggatatagaagaagtgaatgttggtcatcaggaacctgaagaagaatcggaaaacagtggtgaaatcagtcttgaagctgtctacgaagaagatgataatgaagtcgagcaggagaatgaagaaggaaaggtaaacttagaaattgttgatgaatgtgatgagcaggctgagatcaagatagctacagatacagaggtgaacggaggtgaaaggtattcagaatctctttctgaagaaggacatggtggccaagaaactgatgttgttgaagggcaggaagaatatgaagaaaatgaccagaataacatggaagaagctgaatccgacgcacaactgcttgacgatgtgcagtctgctgcaatcagtagtaaccagcaagaacaaaccggagtagccaatgttgaaactgtacaagaagaagaaggtgttggggaaattgctggaggtagcctcagtgtttcagaagaagctacagatgttgaacatgacggtaatgaagtagaagaagaagagagtgggtttggtgaagttgttaatgatgcaggttcggaggacattttgttgagtggccagaagaaagtgttagtcttgttttcgactatgatggttatacttgcagcagtagcagctggtttcctattagccaagaagaagacaaaacctgtgatgctgcaacatgaagatggcgaaccaacagcaatctctgcaactaaagttgtcgagcatgtgccagtagagaatctgatcagagaaaggctttcttcattgaatttcaaggaagaagaagaagaagttggtgatgacagaaaaagagaggtatcatcattcccttctgagatgagtttcagcttcagtaagaacaaaccattacacagctgcagcaacaagaaagatgatcttaaagaacatcaaagcggaggaggaggcaagaagagtaatgatagcggtgaatccatggcttcctctgcatcagagtactccataggttctgtttcatatggaagtttcacaacatatgagaagatacaaaagagaagtggtcacgaagagaaagagatgataacacctgtgagacgttcaagcaggatcaggaaccatcaacattctggacaatgagttagaattagcttttgactttatgatctactgatttgtaggaaggcttttccatctcactgaagcttaattagtatgttgctttcttaattagtaggtttgattctcttctttaaagtttctggctttactatttgtttaagacattgtaccccaaccttgtggcctagttttaataatattgttcatgttatctgaatcctcttctttgtatcttgcaaaaacgatggacaattttcaaacaccatgattcatgattgtaaaaggttttgcaagaataggaccaaatggcgttggaagtgttttatgatgataaatcagattagtttatatagatgtagaagtgtcaattgggctgtccaaagcccattggtcatgtccacttggaccatttttttcatgggttttattggttggtctttaatggacaatggtctaaaaatttgtccaagaccattaaagaccattgtccaatggtcagcccatggccagcccatacaatgatgtttatatacaatgcattttcacacaatctcgtcaaaagctctatttataaaaccataacatcaacatgaaatcaaacatgcatgtacctgttcttcccagtcttgtaatcaaccgtgacaactcaaacacgcatctaagactctctatatgcacctacaagtaaagaaaaaagcctacaatggctacatggagaatgatttaacagagaaacccatttcaatactactccaacatctagaaattggaaaccagaagtggccatcttcaataagcttaggtaaaacaataagcttaaacaacatttccacaatgtaatcaatcacaaatgattataagtaagagacaaaatccagaatcaattccaaaccaaaatctgtcatccaagttgcaaccttagaccggataccatcacaacctataacaatctgtcaaagacatacatcatcaaatcagccatgtactgagaataataaacacataaccataggctcagagcttaagagaacaaccatgtacttgtttcttcccagtcttgaaacgttcatgcaagggtggtgtttgtgtcctcttgaccttggatctcatcagtttcttcaataagaaaaaccgagctattaatctaaaagctgcagtccaaaagccatataagtttactattataaacgagttcaagatgtgaatattaccaacttcttgaaatccacgaaaccagtttctagtacataggagggcttgcacattagtaggtaaaaggcagcttctatatttgttaagcacacgactacctatactaaaagctgattccgatgccacggtagtgatcggaatgcttaagatatcacatgccatcgatgacaattctttaaaacgcgagacattgtttttccaatatgcaataacatccatatctctaaaagagaccatatctaacacaggctcttccaagtacatatctaatggtgattttccagttccatttctttcagaaaagtaagagtaaaacccctgaaatatgaccaacaaaacaaaattctcactaagtataagaatgcattttcagaagcattatgctttaaaatgctttgcatagtatcatttgcagaagcattatctacagttaaagtaaaaactttcttctcaattccccaatctttcaacagctcactaagcttcattgctatagctactccagaatgtggaggcgggaaagcacagaaagataagatcttcgttttcagaacaccatcaacatctacataatgagctgttaagcaaatataactttcaacagttaaagctctccacaaatctgttgttaagcatattctacccgggattatagctaacttttccttaagcttaattttctctctttcataaatcttgtagacatcagaagctgcagtatttctgctccaaaattctatataagggttagcatatgtaaaggcttctctaattctttcatattcgacaaacgaatatggaagattatgttgaactaaagccactgcaatcatttctctaaagaccatcatatccacctttctgctaattctaggtgtacttccaggagtcttctcacaagatctcatatgacgattcatggtattagtaccatttcgtctcagattcaagtgataagtctgctcacaatatttgcatgtaacctcagttttcccattaggatatttctgtcctctatcgaagtttttccagcatgcagcacgaaatctacttacactacttttacctctctcagctgtccctgaagaagcagtttcatgaggtagtatctgatccatttctggatcttcatggtccatttcttgatcctcaagattaaagttgtcttcatcaaccaagttttgagtatccaattccatatttctgaaacaaataaagacatacacacgtttagcagtgataaacaaataaagcatgaacttgactaaatcactagccttctggaataattaagcatgaacttacaacacaaagggtctctacatattgatgtgcttcaattcataatgaaattcgaaatggcgaaacataaacaaaatctgaaaagtgcccatttgctagctagctctcctcatatccaaaattcacaattgaactttggacaaacccacaagctagtagaactaaccggagtaggagttgagagagaggtcgagcttggtcgtcgccgagagagagctttgtcgccgggagagagagcgtcgttgccgaaagagagagaagagaaaaaaatttatgtgttgaaaaaattgatgggccaaccataaaccgtgtgggctagcccattaaacccatggacaaaattggtctttagaccatatagcccgttttcattacgggccgaccatggactgtccataatgttgtggactgggcttagcccatggtcagatgaccatttgacacttctatatagatgtatgaataaaccttaatggtttcggtgttattcaatgactagattcaatctaagatactttgattttgagattgctcttaagtttgtaccaaggcaacaacaatatcaacaaattatgggacaacaagagagctatagaaaaatggtatctaattgatcctaattggatggtgtacacgaccacagacaatcgattacaacattttataagttgttgaattttttatgggagttactagcttttctgtttgaattttcctgtaggatttgaagaacttttgattagtgacacattcaaatctgatatgaaaaatgggaaaggacacaaattgagctcattatggtatttatactttataaaatgctttaaaaaacatataaatccctcaatttatcaagcaaataaaaacctgccacgtatcatcttcggtttaatttgcagtccgcggaaaaaaaaaggagactggaaaaaaaaagtcacagtctgtctgtctgtctctctcctctaatcttttttatccgctagggttttgaagcaaggtttctcgcgattttctcgatatctctcgcccatggcgaaaccaagtcgtggccgtcgttccccctccgtgtctggctcgtcatctcgttccagttccagatctcgttcgggttcgagcccctccaggtctatttcccgctcacgctcccgttctagatcgctctcttcatcttcatctccttcgcgaagcgtcagttctgggagtcgcagtcctccacgtcgtggaaaaaggttagggtttctttcaatcacttaccaattgttcgaattggatttgtgtaatttcgctttcattcttcttggttcgttcagctcgaattcgaattgatgttctgatgtatcttcttgtgtagtcctgctggacctgctaggcgaggtcgctctcctcctcctccaccatctaaaggagcatcttcaccttccaagtaatatctgactcgttcacataaatatattctagtgtttatgctttcgtcattactgactttacaatcttttatgctttcaggaaagctgttcaagaatctcttgttctccatgttgattctcttagcaggaatgtgaatgaagcccatctcaaagaaatctttggtatgttgatttctcttttctctgtttcttctgcttcttctaatcttactacatgataactgtctacacatgtccgctaatgtcatcagtagtgtatacggcattacgatcatcactggtcttttgttttccttgtgttggctaaatgttaagtcttataacatggcttggtttcatgttattattaggcaactttggtgaagttatacatgtcgaaattgcgatggatcgagctgtaagttgctattctctttactctctgttgtttacttgcatcacttgttgaaatctgctcataattcctttgaatattattaacaggttaatcttccaagaggacatggttatgttgagttcaaggcaagagctgatgctgagaaagctcagctctacatggatggtgtatgtctctttccaattatgaaatgcactgtacttgacatattgacagagaagatttatgcatgttttttttttgttcactgaacacaggcccaaattgatggaaaggttgttaaagcaacgttcacactaccacctcgtcagaaagtatcttcaccccctaaacctgtctcagctgcaccaaaaagagatgctccaaaatctgataatgctgctgctgacgctgagaaagatggtggtcccaggcgcccaagagagagtatgtcaaatccttatattttggttatttataattgttgtagtatatgctttatgttgtgttaattagtatcatcaatatgtgcttagcatctcctcaacggaaaacagggctttctccgagaaggcgatcacctctacctaggagaggcttatcacctagaaggcgatcacctgattctccccatcgccggaggccgggctctcctatccgccgtcgcggtgatacacctcctagacgtaggccagcatcaccatctagaggccgttctccatcttctccccctccaagacgatatagatctcctccaaggttagttatggcaccatctgttttgtctggtgtgtttcagattcgatagctcaccttttatctgtcagcaggggctcccctagaagaattcgtggcagtcctgttcgaagaaggtctcctcttcctctaagacgaaggtatgtctatttggtacctgaattacacccttagtaatcgaagtttaggaatcacagctttatagactatattactcagtaaattagaccgggaaaaatgtgtcagttttatatatgttttgtattcggcgtgtttcaggtctccacctccaaggagactacgcagtcctcccagaagatctccaatccgtaggcgtagccgatccccaattcgtaggcctggtcgctctcgttcaagttccatctcaccccgcaagtatgttggaactcatttaaacttttttctggggtctctctcgtgggttttattttgttacagatgcatagctaagactgattcataacaagtttttaagtctttcataattcatgagtataccccaagatcctacattgtcttatccttttacctaggtttctgacataccagctcctagagacgttgatacccaatatgactaagttatatagatccgtctggggtttgttcatgaattaattttgtctttaactgtaagcaggggacgaggtccagctgggagacgtgggaggtcatcttcttactctagttcaccaagtcccagaagggtaagggcttcttgcagatccctttttagctataaaatttttgatgccttgcgagttatatgtcttgactcttgactttctatcatttgtgcattattaaaccttacagattcctaggaagatttcaaggagccgcagtcctaagaggtaaacactttctgtcttaacactaatcctcgtcttaaactggaaacactttatagtctgtagaatgcattaattgaagaagttccaatgttaagttatgtatagtaaagttaagggttaccccaattcctgataaaagacatagcataaacatctgggacctatactttcttggtgagtttggtgatgaaacagagaaaaatagaattgttgtgtagaaattttttgcgttgaagtctaataaaagaaaatgggttgttgttgggtatgtttaggccactgagaggaaaaagaagcagcagtaacagcagcagcagcagttcaccgccaccaccacctccacctcgtaaaacttaaaggtgataaaaattaaaaaaaaaaaaaaaaaaacttgagtcttgatgtagctctctttctccatctttatcgttatcatctgtctcagcctcttttcttagaacagataaaatgtttaccagtgaccaaatgagagttgtggtttttgtagtgtttggatgtttaatcttcttttgtggatctcctcattagatgcaacgataatgacttggttcttttagctggttgtaattccctaatatattcagtcttgttgaagaatggctggctccttcacccttttcttattattttagttaaaagagaaagaaatccatacaaagactggtgatccaaatacacaagaaattggttttttgtttcattcagagaaataaataattataatttaagggctcctaagatgcacaacaacaattttgcatcaaaccatgcatcttaatgagagtgcacaaacttttatttaaaacgaaaaatagagttttcctcaacttcacacagtacataccactcaaagaaaataaatatacataccactctgcaagtgcccatatggggaagatgtttctgtaggtaacatagtttagaaaacagttcttcatgaacactcctgtcatttcctgcacaacagagcaacaactctgtttttataatctaataaatacacacaccattctctgatcctgtatgtattgaatctttggaagagagtgttgaggataatctccgttttctaattgtaaattgatgattagtaattattaaaaatatatataaatatgtagtcaaatttctaacttggaaccaataattttgaaataaccactttcgtttttgtttacacggaaagagactatgcaagtgttaagaaagaagacaacgttgtggttaattttacaactctcttctgctaccggtgaggtgaccacacaatcccaaacatgtttataatgcatcttggcattatacaataatgcatcttgcttcagaaattgggtccagcaaacggagccgaggctcacatgtaatctgacttatgggtcatggggtgcgacatcctcggggttgacaaggttgagtggttcagacaaacttgggtgttccaagtaaagctgcaagcagagtggttcgctgttcaaagacttgactggcgttaaaactggtgggttctgccactgctttgtgtctgttggaatccacagctctgcttctttgcttgaacccacttgaggaagtgacctcagataagccgttacctcccatctacaatctgtttatacgagtgggaaagatcaaaacgctttaaaacatagaaacattgctataagaagagagaatgtacagagggtgggtggagctagagatgtatttacttaggggaagaggtttgactagggattttgagacggaaagcttgattaagaaggacctaagcgcaaactccagttgaccctcttctactaaagcagcgcaagacggtttaatcgtgatcttgaagatgaacctctctacaggaacattatcctcgctgaaaaacacgactgctactctctcaacaagaccctgtttcagtgatcatgcataagaaatgcagcactcccacatatacatcatgttacacttaaagcaggacaaaaagaagaagaagagaccttttcaataaaaggaagaagtccagaagcagcagagtgaatatagtcgcgtagctcaggatgccttgctctttgcaccaccacattcatatatctcctcctttcaaatgccgctttacatacaacacacaaaattgatcaatcacttggagatgcatgtcaatctcacaaatcgctctttactcaccagatgggtaaaaacctttgaggtatacaatcattgtgatggctacttccataaagtccaccagagtacgaccaacttctcctgaatcacccaaaattacaaaatttcgaagccaaactactaactgatgttatcatgtttatgacattaaaatttagaatcaggaacttacctgactgattatcatccttccgactcattagcgtctcacaatctccgagacctcctatacgattaaagaacacgaatcctaacttcgccgtgaaagtgaagtccttcttccgttcttcgtctttcgccggcaaaataatcacgcatgtgacagacacgtgactactttagttacttcatagagtttttttttttttttggtcgggagttacttcatagagttataagatatgggtttgtaactcatgggcctaactaattccctcgggcccaattacgtgttttcattaatgtgtatctctctcctccgcctcatcggaaaattttgcccggcgcatatcgacgggatctagtagatccggtaagattttacatctttatgtttgatcttgtttcctgagatcgtattcgtgtttgctcttggatttataactagctagcttctcatggattagtagagtctgataacttttgagctcgacataggaacgatggggaaaagaggaagggcttgtgtagtggtacttggagatcttggtcgaagtcctcggatgcaatatcacgctctttctcttgctcgtcaggttttgtgcccatttttgcatttgatcaagttcctcttgaattgattagttcctctaatgacttaaacctgcaggcatcatttcaagtggacattgttgcatatggaggtaaggattccttgatcaattttcttgtgaatcacacaatgcattgctgaagtgtttttaaaaaattcatgtacaggttctataccccatgaagctgttctaaatcacccatcaatccacatccataccatggtatgtttcgatcaaatcttcaatataaactactagcaactctgtagattcacgatcatcagtttcttattttgggggggtgctaaaacaggcgcagcctcgattcattcagtactttccaaagatactttatcctgtaactctcttgctcaaggcatttattcagtttacaatgcttctctggtttcttttcgttaaagtaccagcgcctgacattttcttggtccaggtaaaaaatctttattcttgtcactttgaaatttacagtaaattctgttttcttgcgaaatatatgcacaagttacacctagttatatttctacagaatcctccttccgtcccaactctaattgctgttaagtgggcgagttcatggagacgtgcagcgtttgttgtagattggcataattttggatatacgttgttggcattgtctttaggaagaaacaatttgcttgtatccttataccgctggtaagtatattaaccagtggcttgataatggcttaaaactacctgtaggacctttttatttaagggtgaaatattagcatttgcatgattttaggtctgagaatcattatggaaagatggcaacaggttcgctatgtgtcacaaaagcaatgcaacatgaactggatcagaattggggtgtgaggtgagatgaaatttctcatagataataacctgttacattttgattctgaactaaagaaagtgatgtgattctgatttcgtatgcattaatgttctgaattggaaaaacagagccaaagtgttatatgatcagcctcctgagtttttccgtcccgctttgcttgaagaaaggcatgaggttagcattgtgtgattcacaagaaaattgattagtttaatcaatcacttctctctgggtagagtgcggtatctaagaagtaatgtaaaatttggttacttctttagttgttttgccgagtgaggaaggatctttgccatccaattggtgtctatgatttcattagtagaggtatctctcttcaaataaaaaaatccatgttttgatttcttttgggcttctccattcattctgatgccaaatctttcaattcaaatttagagttggaaaaccaagagcttaatgaaaccctttttactaccaaatttaatgctgacatctcgctgaagcaaaacagaccagctcttgttgtgagtagtacaagctggtgaggacacatcatcattctttgttcactttcactcttgtggcatcatccttccgtgatagtgaatactagaatgtgaatttttcaggacccctgatgaaaattttggtatcctactggaagctgcagtgatgtatgatcggcgtgtggctgcaagatcaaaaggaagtgaaacagctgaaatttcagaagagcaacaccattatcccaatttgttgttcatcattacaggtaaagataaacatgataatatttagctgtttctttttctgagctatccatgctgtctatgaaggtaaaggacctgaaaaggagatgtacgaggagaaaatcaaacgattaaaccttagacatgtggcattccgtacaatgtggctcgcagctgaagattacccattgcttttaggttctgcagatctcggtgtctgcttacacacttcctcgtcgggtttagaccttcccatgaaggtaagcacattgtttttatagctcatatgttaagaagcacattgtttttaataaggttaagaagatttaagacttgatttccattgtgtcaacttgctaccgatgtttggcgttttaggttgttgatatgtttggatgtggcctcccagtttgctcggtttcctactcatggtaaataatcaatcacttacattactttcacgaacaaatactataactttaaaaccttcaactttcgtgaagcattcaagaactcgttaaagatgggaagaacggacttttgttttcatcttcatcagaattagcagatcaattattggtaagtaactcgtctttctttttaaaagactatttcaccaagtctacagcagaagacagcagtaatgttcttgtgttttgtctttgtgaacagattctcttcaagggttttccagggaactgtgatgcactaatgtcgcttaaagcgggtgcaatggagactggttcttcgggtcgatgggctacagagtgggaagattgtgcaaaacctttaatcactcaggcaaaatccgtcggccctctctgtatcccgcacacatacttttttattgggctatttctcataagatgtctttatgtctggtctatgcaggtcgtgtctcaaattgcagattcatgaaagagaagactcaaaatcgatgggcttgagagtttctcacacaactgcttttgtagatccaaatttttatacaaaatcctatagattacaagattgtctcgaaaatattgacagaatctgaattcaaaatggtttcgcatgagtctgtgtatgaatgagtaaatgatatcaaaatctttcttaaccaaaagtaaggccaaagaaaaacactgaaaggctcaaagcaaattcaacagttaatgtaacaatataaaataaaaaaaactgaagaaacctgtgaatccataaaccagctagctttaaacaaaagactctgccttcttcgtgatgtttaaatccatttccatcttttgtttttccctcgtgtctgcatactcgtatggtcggataaaaatccttgtaaaacttagcaaagagactcactttgccttcgtcttagttttcttgaggaggctggaagttctgaactcagcatcgtctctaatgaagctccaccagagaatggttaagggaattgtggcagcgtgccagatcgagtgagcatcgaagtagccttcatatggaggaaaatcatatatctctagaagcatggctaatcctccagctatcacaaccacccaaagtttccaattagaagggtggcttgagacagcggcccatcttgcccataggaaaagctgtgagactcccattgccacacacacaatcatgttccagcctgtaaacgacattcaactgatgaattcaccaaaaatattgactcgatttttagacaacggaaagttattgagggtaccatagtcgagtttgtagaagtttatgtagagtatgtgggtggttacaaaagctagtattggagcggataccatgacccttgcagcctcaacccgaatatcaaatgttcgtaaaatggctaagatgagtgagaatccgagaatcgctactgcggatgagtagtccaacctctctgtaaggtcaacatccctgagaaccacagagacggattaccagaaaatcacatatgaatatatgatgcagattgtggataatagagtaatgtgtagatgatttaccggctgtggaaaacagcactccagaaccaagagttcatggacaggagaccgtagatatgccacaaaccaacgtattcatagtacgctgtcctatcttgtttcagaggcaacttatagtagatcatgatgaaaaaggaaagccaaccatggaaatgcattgctaggttgagtacagagaaagcaacagaagcaggctcctggcaaagaacaaggtaagtcaaaactcatattatatggaaacaaccagaataaaaaaaagcgattgaagaaaaaaactaacctgaatcccaagtacacgcttgaagggccatttaccatggtacttgactggggcttgaccgagagtttcccgttcagtctctctattaaccatacattgataacggcaatcaccttgacaaccccattttttccattgtaaatacaaaggttcttggatgtaccatggaccaccatcggatgaagaattgcactgaggaaagcaaagttgtccaacacaaccgcttatctcacattctgaaacacatgtcctgacacaaaattgccagacattcataatctccacgaatcaaaaatgttgcttacatataagctacaacaaaaccaagttcacgatagatactcaaagattaccgaaattctaagattacctgtaatctggatcagcatcgccagcactagcatttgaaatacagaaaaggcatggcaacaatagaaacagggctgtccagtagtggactgccatctgagcagaaagttgaagtgaaatcactgcgtgataataacaatgcaagcctcaaaaaacaaagaaagaaatcgcttaaaggagctgcaaatggaaactatgaatcagagactataaaaaaaaactacaaatgtgaagatcttcatatgatgcttccgttaagaatcctaaagcaagtgtttattccagtgaaagaaattctcacatatcaataaaaatccttctataattcgaccttgaaagactacagaatctcttggttaaggatcgaacttgatttctgtagaatctaatactatgatttccagattcgatcagattatcgaaaactcagaacttaaatcaaatgcagagcttaaaccccctcgagatctaccaatcaagcagggacaacaacaacaagatgagaaatcgatcagctataatgtagagagcaagaaaatagagaaaaaatcgagcagatcagatagaatccaatacctcccgagtctgagtctgagagtctggtcttcgcaacaatgttaaagcttcaaagaatattatcgcactcctgtaaataatggagacgacgaaagagaagaccacgtgtcttataatttaaactaaacgacgtagtttttgcattattctttttctttctagtttctaccattatctgctttacaaaatgtcccccaaaaaagagtaacaaaaccttctttcgtatttatcttatctcaataatataattgttacaagtactcagaagaatgggaatttgcagacataatataagtaagagaggttttagtgcaaggcaaaaagaatgaccctatggtttccttccaatgctttcttggagcttttttgatagttcctcatagtgtcttctttgctgtttgttcacagaaggtgagactaaggacaatgcttgctcgaaatgagtcatcttaatcgtacactgacttgtatctgtaatatcgtcatcatcttcacatgaaattgtggtgatctcctccactgcctggaatgtagctttttgcaccaagtgagcgagatcagctccgctgaaaccttcacaattcatctttgcaatgctatcaagatcaacactaggatctatgggcttcttccttgcaatagcttttagaattgaagcacgttcatcggcgttagggaggggtacatatagaagattcccaaacctaccaggtctcaagaacgcaggatcaattacatctggcctgtttgtagctccaattacgtatacattacgcctctctccaccgtctagctcaacaaggaactggtttaaaagccgttcaacaacccaggcaccttctttgccacggcttgttgtcaaagcatccacctcatcaaagaagatcacacatggcgaacatgtccgggcacgctgaaacaatgtccgaatagcaagctcgctctctccaacgtacttgtttagaagctctgcacccttgatgtgcatgaaattagctcctgcctcgttagcaactgcctttgcaatcaatgtcttgccacaacccggtggtccatagagtaaaaatccaacctctaagtctaccccaaaagcctaaaaagaaccaaagtggcacattcagacctcgagagaaaaagcaagtaatcttgactatataacagttctaagtgacttattagttaccttgtaaatatcaggctttttgataggtctgactatatagcggttgaattcaagtcgtagatgctcaagtccaccaacatcatcccacttgacatcaggcacgatagagaatccttcccttgttaaagatgcctgaactagattcactgcttcctagtagattacagagcaaccaacagagttaggaaccaaggattaaaatctcgtagctattgaagtacagaaaagtagactcatgccatgcctacaattaacatacctcgaaatcagacatcttaacaaagagtttttccaactcttcttctggccagggatgcctcagccaagaactatcatcttcagagtccccagccagttgagattttcttgaatccaagattctctttgtggcaatcctgccagccatgttagcaacaccctccaaatctgctccaacaaaacccggcgttaaacgagctattcttttcttgtcaaagggcccttctagtctaagtttttgggctacaacagaaagtatctcagctcttgcatcttcatctggaacacctagagcaatctcacattcaaatcgtccacttctcctcaaagcaggatcaagaacatcaggccatttgtagctccaataacgagaacaaatccaacactagactcaggaccattgttaccaggtccatccatacaagtcaataattgcgttacaatccgcttttccatctccctttgctgattttccctctttgatccaatcgcatcaatctcatcgataaacacaatggaaggtgcagtcctatacgctttagagaaaagctctctaagattctcttcagaagcaccagagacaccagaaaccacatctgtagctgaaatcttataaaacggaacaccaacttcattggctatagcattagccaacttggtcttcccacagccaggtggtccatgaaatagaatcccactcggtggcttaactccaatcttcttaaacggttcaggattgagaatcgggaacaaaacattcctctccagttcatccaacactttcttaatcccaccaaaatctttaaaagtaggtcctttatcacccactacatccaaatcaccattaccagtagttccactgatggaaagtgagtctttagactcctttctcaaccccattgtagccatcttacttctacctttgttacccacagtttcaacttcaacattcttctccacaggcggcgacccaattggtttcttgtttagcttggcatagttatctcgtagactgtcattgatcaaatcaaaccttggactcagcttctcgctgtaaacagcgtcctcgtcctcagaagtcgaagaatgagacggcgacgaagacactttcttccttttagcagcagcagcttccccatcgccgttgttgttatcatcatcttcctcctcagctttgttgtttctggcgttaaggacttgtctgacgttgagcagaagcacttgccgagtcaagcgggcaaagttactgtatctggaacgaagatcatcgacgatatcctccgccgttgttaaatccttcccgcatgaatcaataacttgactcagatatctacgatttattcctccgcccattccaccacctccgccgccacgaccacgaccacgacctctcctcaccatcatactgcttagagcaggtttcaatagctaaagtctgaaactttcttacttttggaggcgtctgtctaccactggacagaaccagaggaggcagcagagaaaaagaaaaaaaaactaattttgtgtgtataattgtttatgaagcaaaaaggcaattaaccttggtattattcttctctattatagtattacatcaagtttgattttcagtattacagtttttggtataagagcaagattccagagtctgagctatattgttcttctctacaatcttgaaggagtaatacaatggtatacaggtccagtaacagatttgttctcatatgcttttgacgcttctccatatgtttatacttttgatgcttctccatatgtttatttttatgtatagtagacgataatacacacaagcttgaacttattcaatatctggattaacttcttccccaactccaatccaacattgtcttttctcatcaatctcgtatctcaaaagcgttccaaacaagatctttccctgaatccaatgacaacaccaagaaaggttacttcacaaataattgtcaaatacattttttgttaatggaaaagactggttttagaatgttgaacctttactctcctatatgaagctaaagttgttaagggctcattggatttcttcactagtccagcttcattacttatgtttatcatctggcaccggttacaaccgcccaatgactgcattgaaaggaaccaactttttaagaaaacagagaaccatgaagtttatacttaatgcatatgattatggttgaatcttgtgtggatccatggacttactgtgaaatgattgtctcctatcttgacagttttccatttatcttccccgtatggttcacctccagatataaccagatttggtctgaacctatgtggattgagtttttcatgagcccgtttgtaatcctcgtcttctgcaaccaaatcagtttttatcaagcgaaaaggaaaaagatgtaagatgaaaaggacatggaaacgtacttgcttctaatcttctgtttaggtcagcaacactctcctcggagattaacaagaactgagcttcattagcaaagttgatattgctttccaaatctctgcacaaaccaggactcttgtttctgttcaagcagtctttggaagtagagctagaataccgtagcaacttgcattgtcgaccaatggcattggtgaaccaacgattgattctagtttcctcattacggttttcaagtctgcaaccaaaatcaaatttattacaagcagctgatgtaagacagcacatgataaggagcaatgcatacatgttggcatgtgaatcaaactcatcgttcctcgggttatatgaatcagacttgattctgatgtgcaacttgtcttcgcagcgagaagattctacagacagtagtccttcctcaaggtcgataaaggtttttataagagacatctcaggcacctagaagccattcccaagaaaatcaaaattttggtgacatagctgtagatagaagatgctctattaccttcttttgggtaagaatttcaccggtcagaccctgaaccatccattctcgatcatgcagcaggccttttatgtttcaaaaaataaacacaggttatgcataaatgccaaagagatcagcccaaccactaatacaacagcagcaccaatttggagtaaccaagcaagttgaatgaaatacctgttctgcaaagtggccaacgtatcacagaaaatccagcacatgacttgatcgggtatacagtaattgacttaaggtagtggcttggaaaagattctttactttcaaggtctgcaaatcaacaaaaaggggaagagacgccatttatactttatgaagtatttgctatctcgcaagttaagactctgtggttttccaaagatcatacgaagttgacaagctacatgcactttatttgtgtggctaacacaagtatcaattaccaaattacaaaaaagtaagcatgtaaagatggtggctttaattgaagtcacatcccagagaatgaatggcggaatcaactatacgaagtcccttttatgtcaatgtgactatgtgagtgaataaatgctccaagagagttgaattgttactaggaacaaagcactgtaaaagatttcagagcaagtaccttcactaggaagttgaggaaaccttccactgacgacggttccattcccagtcttctttggaggtgaagcaaatgaacttatgatgaaatcaataaatttctgtgaatgaagcatattatatttattaggtagcagcaagtcgaaaatgagctttgtttatattttcgacaatatacatggaattgggaaacatttaaatcaaggaacctacatataccttggcatcttcaaaggttgacatataaccaaacgaaaccctaacagcccctgttggttttccatttatcacatcattgtcatcccagcaaatatgcccagcctgtgttaaattaaaaggatgtcactgtcaagtatataatacaagaactgctaaaatcaggagcagtagaaagaatgataagcaaaataattgaacaattatacctctacattagaccgtagctcagaatgggataactcgagatactttgcacatgcgccaggattgcaaaaacatcctgtctacaccaaaatgaagtaaaatgacagatgtaatttcagcgttcaaaacttcaaatggcctaatgaaagataaccccttgccagcgagtgcaagtccctagtcttacttacataacttcttttctataaggtggaagaattcaaagagaataaaactgaactgtgtttccaaaacatacccgtaactgaattccagataaagaagcaagcttctccacctccaagtagccaaaccaagagccatcaggtcttttcaagttgaatgtaaccgttgggcctgatttatgtgaagataactgaaacataaaacatagaatgaatcaaaaactatggccacacgaagaagtaatttatgtgacttcgaaagtaaatgatgatatgatatttttcaaatatgaaacgatagatacttgttttcttcctatgctctttgctatcctttttgttgaagcatatatttcactcaatagatgaagccctataactaatggaatatgagagaaaaaaactagtttttaatcatgaaagaactgacctccagattttcactgccatacagaacacatacagcagccccgtttccatgtcgtaaagcctgaagcttctttttcacatatatggaaagtgacgttgtgtgcctagtaaatagatacagaatacactttagcttctacaatagcagatggtttggagggaactttaaacttatgaaaatttcaaagaaaaatcaacaacatggagtctctaaaaaaagacaaggcccctactagactatcttccaaggtaaaaatttcgacaaattttaaaaattggagaccctgcacggagcaaaagttttactcacatccaaattgcagaaggtgtaagcgacttgagtaatttgaagccatgacggatggctgctatgctcaggaatgaagcagaaccatcctcaaaaaactcctccaccctttcccttctttttacaaagtcgatgtcagcaattgaagcagcaacagtgcctgtaagtattatgttcatcaaatgccatacaaattcaaccattttacacaactaaatgagatgcatacctccactaaaataagtctttttgagcaatttggctgcatctgtagattataataacgggaaaaatcatgtcagaagctagcatttgcaatatttgtttcattaaatgataaatattgatcttgtttgagatattatctcaaagggaataagaataaaatgaaaacaatatcagagatcttaacaacagaaatgctctgatctaagtaatgaatttaacgagaatgtttctgaactacagtcagatttgatttgtgaagatttacagaaggagataaacctagggaacaatttacgcaccattccgtacaaggagagcgccaagcccagtaggataaccaaataacttcatgacatcagccgaaaacaagaaagtcaaaatttgataacaaaagaacttcatttattttggaaaatccaggagataccttgtagaatgacagaacaacaaaatctgcaggatactccgataaatcaggtggtagtgtagcacaaccctttgcagcatcaatcaagaccatccaccgcttgctccttataaaaagtatataagccatgatgagagatacacaatagaaactaatacgaatgaacctcttcaagtcctatacacacttagaatcaacaaagaaataagtatcaaatcaattcaaagtagttccttcaaaaatttctttgcggaaaaaaacactgagctcacggagttgaattctaggcatagcatcgccaaacctcagcaatatgaatccaagcagacattcagcggtataccaatgcaagaaactgaggaaaatgagagctgaatagagagaatgtgaaacctacttgctaaagggggagccttgtagcacggtctcagtattttctttcatcaacttcaccagatctagattaaacctcaggccagaaaaattgcactccgaggggaaagcaaatagattataggcatttcctgtaaacatacaatagagtgaaacacaggataagcaaaccagaaaagtcgattagatacgcagcatacaagaatataacatgtgatacatcttgaacagattcttttcaggatgaaagaagaaagaaaagattatcaagctaacagacctcttgactcttccttttggagtttagaagtgtttctcatctgcacagcacgatgctttaccttgatagatggtcctgaatttgtaagctggcctggttggttagctgcctcttcaatatccactgcacatgctgaagcaccttgagctaatgcatattccctaataccaagtacactgttgtgattctccatggtatacaaaaaattactgtcttgggtccacggaaaagtctctccgacaagcttcagcgctgctgtggctccggaggtgaataagcaactgtaatcttcaggagatgcattaaagtattcaagcacctaactccagtgtgcaatgaagattgattgaaacatatggaaccaacttataagatgaagaccaataatatcagttgaagaaatgtaaagaatgtggtacctgatgtcgagcatccgctataaggtcactggtggccgaactgatatcactttgactatctaaatcactattaaggaacctctttcaacaacataagctcacaaaaaaaaaggcattatatctaaaaagagcttagctacgttgttttcaccaatcaacatgaaagtttcacatctttcaagtcattaaaatctgagattgaaagcctaataaaagataatgtaaagcctatcctatgaggatcaaaagatgaggatacgtggatttccaaaaacattgcttgtgaagtccttaaaaatatattccatctgcaactcagaatacaaagtagaaccagcatgatccaagtatacaacacctgcacataccacaaaaatcttataagtatcaaattcgaatattgtactggaaggaaaatgattaaatccgtctggatactaagcattgtttccacaaaatcactacatagaacatcattaaaacactatgatcccattcttagcaataacggaattgttcatatgagtactggatcaattaaacctcttcaattacatacataaacataagttatactgttccatcgagaaacactgtaactcaattttaattcaattcgaaattctcaagtagtgagagtggagctgatccaccactgacccaacccaatagtttttgactcatagaaatttcagctcaaaaagcttaagtttcgaaccctattagatccaagagaagaacaactcatacatgattcaaaaaagaacaaaaaaaaacagacctttatctaatctcttgaattcggtgtcgcggatctcttgaatgttcttgggaccatctgggtatccataataatctccgaattccttaagaaatgcttccatcgccgaaagaaatgtttctcgctgtctctctggtaatctctgaaaaatcgccgacgaaagaaagatggtcgttcccggcttttttaaaataaaatacaattttcgttttccacgtaagtataattatatttccatttttacattagaaaaccagaaaaggaaattctaataaaataatattaaaatcatatatatatcttattatataaagtatggtttttaaagttactaactcttaagatcgtgccacgtgtcaagtcaaacgatcagatgtttacaagttactaactcttaagatcgtgtcacgtgtcaaatcaaacgataagatgtttaacatttattcaacaaaaggaaaattaacaaatttgtctttaactaatgtaatcataagtgaaaatagaacattttgagagaaataacttagcttataggatttaacttttcaataacttttagtaagaatattttaatttattaattttaactcatttaatattaatttgtatgatgtaaaattaacttacgagattacggcatatataaaaaatatattttcaacaatgtttggtttctaaatatttttgtagatttctatttttttattaattattagtcctaagcgtttgggtattcgggtcgggtatttcgggttcgggttttcgggcttagaagtttagaacccgttcgggtaatttaagatttcgggtcgggttcggttcgggttcgagtttatttatatattgaaatatcaaattttgtctgcaaatctattaaattacttgaaaattttaaaaattcccaaaacaacacgagtagttttgcttgaatatattttaaaatacacaaaaatatctaaaatatccaaaaaatcctaatattttctatatataagtataaatataactaatatatacttatatttgagatatgtttggatacctattcgggtttgggtttgggtttttcgggttttgaagtttagacatgttcgggtatttgaaaattttgggttcgggttcggatcgggttttttggatcggttcttcggatttgggtattatgcctaagcctattaattatgttttgttaattgtaaattatttttaatactaactaggatatagatttgatatgtcataaatattattttgatatgaaaatgttatcactcaatatgaagtgtgtagaatttaaatcgagtttattatgatgacatagatagttaaactgtattacaaaattgaatggtgtaagatagaaatttattttttctttttcttttctagatactaaattaaatatagaataatggtcggttactttttagaattcaaatatcattgataagattgagtgtatataattaaaatagaatgcataagactgaaattttgtttaaaccaataattattaaattaaatatcaaaaaaatatatagattgctatacaatattcaaatactatcgataaaaatttatttttgtatcttatacccgcctaaataggcgggccttatctagtatatatatatatacaaaagttggtcaattgtctcctcaatataattgccacatcatcattttagcatttgtcatgtgtttattaaataattaatataagctcttcaaattctaatttataggttactgatacatttattattttattttatatattattttattttatatattattttattttacatatttaatgaactattactaaatttattttaatattacatgatttttcaataaaactattttaataaattttttcatactcgaatgtttttttttgtaatccaaactcaaagtatgaatatataataatcatggattagttaatgatttgagtataggttattcttttaaattgatatttatataataaattaccgagggtgcagaatacgtacggagctccatcatcaaattcttaggtttctagaatcgaacactaccatctgttaaattagtttaagatgaacgttgtttatgaattatgtgtataatgaaatattgagaatattgttagaaaaaaaatattttaatactaaaaataatttcttattgcatgagtgaatgattagataaataaaaattatttaaattaaacaatacaaaataaatccaaaaaaaaactatctttatggttcattgtctttgctggactgggacagcttgatatgaacttcaaaattcgaacttcaaaattttgcagcctgtattaaggcttgaacaatgatgttctgagaaattcaattctctacttaaacgatacaattcaatattctgcaaactgatggataagaaaagtccttgaataagtctgatgaaagatataatgttgtagctgggaaatcataggctgatgttgccaaatataagctagagcatatgcttgtcgatctatgcccgtaagtaaaagattagagaaatcaatctctatagttctactattgtcttgctgtgctggaacaacttgatagaaaattcaaaatatctgctaagatcagcctatatgaaggcttggactatgatgtcccgagaaattcaattctctctacttaaacgatacaattcaatattctgcaaactaatggagatatgatattcaatactctgcaaattgatggagcataaaggttctttaataggacttatatttgcttatatttaaagttagtttgttgtggctggggcagcataataatattcaatgttctgcttgtaaggattgtctaaagacaccccaagaatgggaaatacaaagttctgccgaatctctactgaatacggatgagactatacgtcaaaactctgcatactaacctgatgtctaggcgaggaggtatgtatttcttctttaactagattctacttattatcttacgttacatcaaaccaacctctatattttgtaagttctttttatgtttttgtacatctcttataaaccttaggttatttaagaattaattagtctatgcttgccttactgtgttctaagttctaaccacatcttttgcagattcgttcttaacagggaaataaaggtagtgtagaagattcaacttgccgacggtatctttccctctttttatcaggtaagtgtctatttcatcttttaaaacaaggtcatattttcttgatggagttgtagtcttttataaatattgatctatctttttagcttcagaagaccaagaactcgagtgtgtgtacatgaatttctcaggttcgacttctctccctcagtttgaaatattatagtgttattagttgtgtttgaattcttgtagtagtaagggttgtggggagcattttggtaacttttggtgcacaacatgattagctgaacgagtttctcaggtaacttctggtgcacaacaggattaaagaatcaaaactttggtttctcaggtacgtcctatgtatatataatactttctatattcaatagtattaattagtgatgcaattggctttgtgtagtagtcgcatgagtacgtctgaggtttgagttcaaatactgtagagatagtcaggaataacatctcatgattgttcaatatcatatagtttttctttggcctaacaacatcaatgaattttgtgactaatgctcattagcttctatattgaactagtaagacttaaaataaaacacggttagaggcacttacaatcacgtatttttttggcctaacaaaatttgcacttaccatttgcatcagaatttgaaatttcgtatgtctttcttcacacatatatgtggtctaacaaatttatgactttatttgcagaaaacagagagaaggtgctctgtatgtgggtaagatgctggagtttggaggagaaataggaaatccgacccctttcaagtatgtaagtatttgaattttgaatccaattattcatatattgtttacatagcttcaaagttcagttgagatctcataattttcgacattctgtgatttctttgtcttgctatactcatttaaggtttatatcacagttgcaggttattatctctccaagtccacgcgacgctgaactactgactttgccatacattttttgtctaaaacctcattctcttctttgaaaccagaggtattgcctacaaacatcttgagttccttacttacatttggtacagtttcgagcctttgatattcttaagcaaaacataactcttttgattcttttatcagatgcatgattcgaggctctgtgttacacgtcgtcttcctctttctaattaagtaggtatgcatgtgtagcttataagtaccttagctcaagctatgaaaacagacaactgaagttacagagagaagcaagaaaccttctttcaggtatgttcaatcttgtttttagtcttcagttttgctcttatagtttaaattataagtctatttttttgtgcagtggcagatttatagtcaatgtggctatatctcacaaaccaaaagatcttacatagatatgctggccgagaatacgctatcgacggaaaaaaatgattattgttaaagtatttgaatgtgttatataatattttcaaatactttgacaatgttctccttgaattcctgcgatagcgtgatctcagccgacatctttaatctccgaacacagttcatgcacttaggacacattacatatacacacacatatattcatgcataagcattcgttgatatatgcttctttgattcctttgcttacatgctcaacgtgtttactaattaagcttgtttccttctgtgcgtttattgcttacttcattgtttgctttcttaattattggtttctttgattcctctacttagtgtagtacttgtttctttgcttgtttgattcctctatagagttgtacttgtctttttgcttgtttgattactctgtttagtgtattacttgtttctttgctttttgattcttctgcttagtgcattgattgattcttttctctttttttttgcttctttgttttctcgattgcttccttacatgcttagcggctttgtttatttgaatctttatttcagtttcttagtgcattgcttaattctttatttccttaatgtatttgtttgcttccttgattcctctgcttacttcgttctttgctttttcgtattgtttattctgtccttcagcttccttattttttacttgattttgtagtgtgctcactactagctctctctctctctctctttattcaatatatttaagctccctcatctttggtgctaacataaacgcaattcacgaacacaaacactaaacataaacatacacatacacatacacataaacgtattacacaatgacatacactaacactacactaaaacgtaaacatacacataagcgcattacacgaacacataaacatgcacacatacgtaagttttgtgctcacacttatacaaacataaacacattacacaaacaaacatcactgatacagaaatctttcaatgtgcgactactcttgtttcaatctttgctgctcgatccaactactctatttgggttttcaaaacaaaactcagcaatttatgaaaatgaacacttatacgacgaaatcccacttcaactttagaaaactgagaacagattgtatttctgccagaagttgctcgttaaagacacaataaaattaaatacatatatatatatatatatatatatatatatatatatatatatatatatatatttttctcccagaaaagtaaatgaaaaactattcccaattccaattgtattgaatttttttgtcaatgattataatcgttttcaaagtatttcaatatctattgggtagaagttataacaaccgaccaagaacaaccaactattaattacgtgagcgtagatgtatcttgatatcattcaaagatctttcgtttggtattaatatacattgtttttgaacttcttgcagaactaaaacgataatactataatagtcactacactcaatagaatagagcccaaaatagtggtattcgtcgattttgaattacttgaataacaacttacaattataaacgacatggtttgcatgttgtacgttgatttggggaggtgtcaaataatcaaagtattatacatttatactagtagtagacaatattagcaaagacagcatttgaaaattcatatcaaaacgatttcttatgatcataaagaaaacaagatcttgattcaccggtgacattccatacccgaccaaaacaaggagtaaaaatagagaagtaatgttgcgtcgacttgcaagaaacaatagtgcaaactatatctgtatagtattcaattcaatatacagacgaaacaaaaacctattcaacatatatataaatgaataaaaaacctgagaatttataagtgggccaaagaaatcttaagaatcagagatgcgattttttgtccaaacaaagcaaatctaatgacttatttacttttgggttggacccacaagaagatttgatgttttactttctcttcttttctatataaacacaagcacacactattcgttaaagtcttcttctcttcttgttttgctctcaattctcaaaaactctctcttctaaatgagacaaaagggtcacagacacggaagaacagtatcgccttgtgccggctgtaaacttctccggcgaaaatgtgtgaaagattcatgcgtctttgctccgtattttccggccaaagagccttacaagtttgccattgtccacaagatttttggtgctagtaatgtcaataagatgttgcaggtgaaaattcacttctctctttgtttaaatttgggattttagccactttgttaaaaaaattgttgtatatatattttccttttggtcactattttgttgttgtatattgcaagtttataaacattatggtttctttattttggtttttcttttttttccttgtggtcgtccatgttgctaaactcttcaatttatttttgcttcttgaaattaacgtttaagacaattagggcatttggatcttgtcagatgtgatatttgctttttgtaagattttttttgttgtttttggaaagtatcgaaaccgcgtgtaaagaatagtgtatgaagtcactttcgagttttctatcaaaagtctatattgcatgtcacgttaaaaggcagaatcatgacattatttctttttatttgttattttatgacaaattatgacgcggtgaataattaatccatgtctaaacgcaacttcttactattttctactattgaatattactataagatcattgacaaaatcattacaaacaaaccatcatctcttgtaagcatgcacttatttattacataaaataccatgtaataatacatcatatgacggtatgacccatcactaaaagttccaaataacaccatcaaatatttttctcaatagaattaaaccctaaaataaaatagtttccactgtgtatatataattgcatggttttcgtaaaaacttatagaagtgcaacatcatttcgttatttagcagattaaaaccattcataatctacatttcttgcaaaaacaactatttacaagtctttaaaataaataatagaactaaatattattaaaatccaaactaaagtatattaatttaacgaccgtaggagctgtcggagaaccaccggagcgacgccgtggattcgatggtgtacgaggccaacgcgaggatacaagatcctgtgtatggatgtgtagggacaatttcgtcgttacacagacaactggaaactctccaaactcagctcgcttttgctcaagccgagttgattcatataaggacgctccaccgtattcataccaaacccccgccgtacacggcaagtaccgttactttcccctcgaacaaagacttctacagtgacatcgacatggctgttgcgtatacggatgatgccggagacttcctttggtcttgctagctttagttagcactctatcatatctttgcaatagttaaaataaataaatgataagatgtgtatgtaattaatatgaacatgataaatatacaattaaattaaagtatttgtctagattagcaaagtactagctaaaagaactaagattgtaaactttatttcaatctgccttctttcaatgttttatatatttttgtatgaactcataatttcttaattctgtagagaaagaatatgtttacatattgataagtgtgtgtattagacatactttcatataaagctttattcaaagccaattataagagagaaactcaacacttcccaaaacgagatacttcttcttctttgtttgtgatgaaacaaaaaaaacactttgcaaactaaatcccgtagggaatacacatactacaatggttaatatccatcctatcacattggcccagattcaagataacggcttatgaaagtttaacgcatgtttctgttaaggagaccttggaaagataaataaagatctttgttctcttccccaaatatctcatctgctttcctcagagtttcctgtgaaatgcattaacttttttgaatccgtaatctggacatatcgaaagaaaaaagggcgcatgaactacgacaaattttacctctcgggtttgcttctgggcgttgagctctttgatgttagctaagaaggaactgaattgttcataggataatcggctcctgtgaattacaaatgaaacagaaaaagatcaacaatttcagattctggttaatgaaaaaccgacactagctaagacaagaactgaagaaataaatactcacctggcttgccggaagaattctttaccatccatccgcggtgtacgagctggaaaagaatttatacatgagaaaatatacttgagttttaccaattttatacaagtaacaatctttaagatcctatgaacctgggagtgtgcggttgcgaggaggagaattcgcagccgatgattgctgacttgacgggtaccagagtgttgcctttgtgggagaaactgcacctgatgttcttttaggagaacctgctgcagaatagcctcgaggagacacacttgtggagatgatctttggtgttgcggttggggtaagacgtggagatatgtatgatgtcattgaaaatttgtttccagtgtattttgaagctgcaaaataaaaactctgttattctttagttgcagcatatagagagaagtataacactggatagatgattcaatgttaccttcaacaactggattgttcgtgtctgtagatccactgtaagcttgtttaattgagtgtgcattgatccttccatctgcatggttgaaagataaatagttcacagatagaccaaaacaagacgtatcttataattgggaatcggttattgatgcagtacctttgcctggatatgatcctggctggtcgcatgtcctaatatcaacaggttctgtttgctgtaataacaaatggagaagaatcagagctcagaagcttgcaagatagagagaagtagcaggaaaagctagaggcccgttggagtgcaaaaaaaacatacaaacaacaaaagaatgtgtaataacaaaagcttgaatgtcttaccggaccactctcatcgctcagggatttgattaactgccgcttgaatgtctccagctaaaaatagaacattagctgctatctcccctcaaaagtatagtatgtgaaactctcttataatacaaacaaaaatcatcggaaaacccccaaaattctcaccttagccaaatcacgggtgagtttcgttacagtcattgccagtgaatccttctcctttgtcaggttcatctttaccagaaaagaaagacatcacattaaaaagaacaacataagccaaggttacaatcatataagagcagaggaaaccaaaaaagcgtgacaccaggtgattcgattcttgagcacatatattcaatcactgatttgatgaagagcataaatctcaataaaacaaactaaaacagactatctatcatcatacagatctctaaacatataacaacacacacaaaattgctcccaaacttagaaatacccttaagtatcctgtaacaccaagaaagtcctgaatctattcataccagtcaagcccgagacactatctcttcaatgttaagcaactatctcagcaaacaaaactagccaaatctcgaaacctaaaatgcagaagtaacggagccataaaagcaacagaattggataatgaaattgaagctctttgacttacattatcttcgagaacgaccttcaatctcgaatcagcctcgcggcagtctctctccaggcgagacgctttctcctcaagctcacggacaacactttccttacccagaagcttctgtctcaattcaaccacctcagagtccagattcgacacccttgaagctatcgccattgatgtaatcttcctcgcgagatccagctgctcaaaagggtccatcggaatcaccgacaaaacctcttctgggagctcgaaatctagctggtcgtctcccatttctccaccacaagaatgtccctaaagtccccttagacgccggagataacgctatatcttctatggtgaagaaattgaaccctgaattttggagatgacaagcccgagaagattagggttttttagctctggaattgtccgattgcctgtaagttgttgcagaagggaaatcaaaaagacaaaacagaactttacacctggcattttatcattggctacatatctttttcctgtctctattttgaatttttcttgtttgaattttaagaatacacttttgattacttttccctccaaagtccaaaccagaggaaaaaaaatacactttttaaagtttctcaaaattgtttttcacaaaataaaataaaattgaaaatgttagtgccattttggtcctacactccaaaatgacatataatgacctgaattctctcatttattattatgtggcattaaagtattccatatagtatataagaaaatagaattctaaaatttagaaatgcaataataaaggtttcagtatcttctggttacaagttgagatgtctacatctaagcagttgagcagaatcaccagacacgtattgaaatgcatatcaatttcgtatctacgtgtattcaatttccttacatgtataaacatataaccggttttttccggtttgcattaattattcagacgattaaacaattaatcggatcttaatctcctccacttaggtaataggttgtatcgcctggtataccatccaaaccggactacagtaccaaatcaatgagagacaactatcggctttgaacatttattgctttgttcggaccacagtggtgtcgtcgagtatgtctgattgtctgtgtgcgttagatacacgcgtacatgcgattacggattacatatatacacaacaaacatcacacacacacgtatactattatatatacacacatctcgatgctaagaaaaaaaaacatcatcttctgagattttaaccttttaatactcgaaatagacaagaagaagaagagaaaaagatgtattgtcttcaagttgcagcatatcacttgttcttcaacgcatctcggatatgttatcttcttgctctgattatttttgtctttctcagattcttcgctattttccagaatatctcaccagataatcgagtcggcgagccaagaacggcatcgtttatgaggtttagtgatacacaacaagctcagggagattttaatctaactttctctggtgttttcttagaatctgtaatcaaagatgtcgctgaaattgttttttagttttattttgtagtattgtttaattatgtacttatcgttatattaattaccatgttaaaaaaaatccagtctcatcgctgttattcgtacctttctttaatacgtgaagtaaaactaaattttgaatagtaggttagaccgcagcttatagaataatgatttgtgttagtttggttgtctgtctaatattgtctggttcggaatcaagtaatatggtacgttcgtaggacagcgaagaaaaggttttataatgtttattatcgtgacttttgagtgttgatattacttagtttgcggcagtcagatacaaaaatgaaaaattaaagcgaaccaatcaagactcttactaaaatggtgttagcaagctcgatcctatatagaccggttttaaaatacggtaattttttctttttatattcccccaaaattagccgcaaattaatcaccaccaactcattttcttcttggtaacgtttattattttttgtttctttatctattttaatttcacatttgcttaacttgtgtatcagtgtatatagtagttagcgtatacatgagtacaaacgaatacagaaactagagtcttattcaaaaatatgatgggcctttattattgtgaaggcccaagataaatcgcaatgatttgaggccgagccgacaggccttcatatgttttttaggtttcaggtttttctttcatcagatttcagtgtcttttttttttttttggcttccgtaagtgacgtcaaggtttaagtctttaagatatgaatgcaaaataaataatgataaaataagaaggatccgtactgggggtaagagaaaagaaggacaggcagagagttggtgggtcacactctatatgaataaatgaccgtacaaccaaacccacctgccactctttaatacctttaatcacacgtcagtttaaactttaaaccaaaaataaaattctttcttttgattttcataaacttgtctgttctcttttctataaatatcgctaatttttgtgtgtatttatttatatagaaaaatatggaaatagttggaaagtcgtactgaagaacattaataaaattattaaataagtatgtcgttttattttgtttttttttttctgtaaacatgccgtttagttaatgtaacattttcattaattaaaaacgaattagaaatatccaaaaacgcatggggacaagtgtgtcgtgaacaacttgtctagtgtgactccgaaattggtcgatgttttgtttctgcctcgatgtcttttatatccttgtatctatttgattttttttttctaagaaggaattatattgtacgtttgaaacatgcggataacgtttaggagacaagaagtgcttaaaacatttaaactaaccaaaatttatttgtaatgttgaggaacttacaattcttgtcgggcagataaactataaaaattaataacgtaaaaaaaaaaacgtttttatcaacaaaaaatacgttaaacagataacaaaacataaagttatcatggaaagaaattcattataatgaaataatcgacaaaaacgaagggcccgcgctgtactcgattgatatatcattcctgtactattctatttgacttcttggtcgtgtaatcttcaagaatattgaacttaaattagccgcagagatttcatccaaccatctgtaacctattgaccaatttactacaaaaacaaacaaaactcctaatttattagtactatatgtaaaatactttgaataaacttatcaagtctactgaaccaccaaccacatatatgtagaaggtttgcaaaacatttcctgtttctttcatctttgaccacaatgatgtaaggacaacttgttttaatcatactcgattttggttttaatcaaactcacggactatttcaattgattggttcaaactccactagctaaatatactatagtcaatattaatatacatcatgaaataaaatattttaaagacatttttttataaagtttaaagacataggtttaagtataaaaaaaaattattggtaatatataattaaagaaaaatggcaaataataatctcgtagttttcgttcacttgataaattctcttgtccatgtttaattttttatagtatatgatactaatattttttaattgtagtgtaacatagtatttgatttgtatactaaaataaatgtaaaatttatcgggctgttgtacctggcaagtacaccatatgtgtactctctcctcaatgctctcgtcataatctttccatgtcttcttctctctatatatattacttaactctttctcactctctctaattttaaatttatctatcattagtttaaaccgccggagaacaaaaaatgaagcatctcatccgccgcctctctagagtcgccgactcatcctccgaattc

SEQ ID NO: 1124 - DNA, 90498 bp, Arabidopsis thaliana
gaattccataaggttctttataattctccataggttataaaaaaaagtcttatgaatcttgaacaacaagatagaaacaagagataacaatttgtggtatgagcgtagttttattgatcataggttctttttttatggaaaaattataaaggaacttttggacctttgtaatccatttcacttctcacatatgttctcatatacacaagataacatatccaaacaataactaaattaaacacaacatgattccttagaatgcatacacaagcgagcttttctcgttcttcgtagtcttttgttgaatttctctatttggttgggatcaaatttgaaggatccctgagaacgtatttaggcaattcatacttggaacctgcaaaagttaaacatctcaactactttgcacaaaatcaaccaaaaccaaaccttgtggaagaataagactaatacctttctcgtcgtaacaaatggtgaggtcagtgttctgaacaatcacaccggcactctcaagtatcgtttgcgcaagcgataaatcatcctcttctgctgcagctcgtaacgcatcccatatctctgtttacatatgtatatacattgaaatacaaacacttttgactcttgacataattatttatatgtgatgatcacctttcttgcctccatagtgaggagctgtgtcccagaactcctctcgcatctgtgtgagctcatctcttgatatcggttgaggatgtttccatgtttttggtcttcgaatcttctcctttttccctacaaacacacaatcaaatcacagtccacagagatactctcagcagtaagaataatcatgaagaagaaaacattagatcagatgtgtgtgggtcatttcttgactctcatttgatgagagagagagtaccctctgctatggttctcgagctagaacaacccattatttgtcttccttagtagacgataacaacaaacgaacattacaaaatttacaaagcagagtaaacagagcagatagagagatagagagagattaagtttacaagatttgtaaatacctattaactagaaagagagatattttttgtatgatggtgagagacaaaggtttgcgttatctcgtgaatcacaaggttgctcttttttttcttcttttttgctctccataatgtttggtctgttcaaagtgagatactcgtgagccacaaagatgtggtagtttggaatttcatcatctaactatttatggttaaagataaaaacatacgtaacgatacaattatttttatagatttattcatactaaatatatctaacatatgtaacagccgatatctcaaatccaaatcgtggagtgtttgctagaaaagcttcttatatatgaatccgaaatagttatttttcattatataccacaaatcatatatacgaaaagaggctaactctctccaacaacttgacacatcagcacataagagcttgccacctaaacttcataaaataagtaatacataattagtaattaattcaacataaagaatataattaatcagaacttgaaccatcactttttctacattttttaattcaatatatcctctttaatttcgagatccacttaagtggctaaaaatccaaacatgctacatatattacttgcctaaaaattagacgattattatgaaagaaactaaatgaatatgcagattaaatatatctaagcttttcgagatttatgctaagaaaacaaataatttgaaagatgtttgaggagccatccttataactaaaacgtaagatataagattataacaagaacttaactaaacttttcaagaacatcaagttgaataagcttagattgaatatgcagagacatggttaataaagacatggtatatttatagtgtaagaaataaattttctaaaatttcaccgtctcacaatttacatttataaccaaaaacaaagatatataaattaaaaaaaaactgagaatttaaaacaacaataaaaaagaactcaagcacattcgtttttcaaatgaactaatatagttggactttttaaaaacaattacaaatcatatttatgtttcaaaaccgatgcattcaactttactttatatgaacaaacattatataaaacaatttgtaaataataatacatacacccgcactacgtgcgggtactcatctaattgttttaattggaaactcacgctgtttcaagagcgactacttgcaacaagccagttttgtatttttgggcttttagcttgaaaattttgggcttataagcctgtaaggcccgtaactatccgcttctatcaaccgtgccgtttcatacggagtgcaaaatcataagttttagttttactttattttgtggtaatgtcaaataaagatggccaatgtcttagttaacacttaacaactctaccaggtaaagtgaagtgaacttcgatacatcattgtcaaagaatatgaagcgaaaataatggattttgttctataacaacgacgcaccaatggtataaaaaattggtacaattcatttgctgataatgaaattaacgtggttcacaagtttcaaacgaatctataatagtgcaaatttaccaagatttatgtagactaatgtatgataatgacccattgaacgatttaaactttagctttgggttttggaagcaaaacattttataaatgactttttcaacagttttcatgattttgagattgtaaccacattcatctgacagcagaattcatgctttgatataacattagcgtgtcatgtaatatttatctaaacctactagttttgggttatataactcgacaatatgattttaaaattttcttgagttaaattcaaagtaaggatttccattttcaacacttttatgtgacatgacgttacatatggaaagtcataggaatatcccaattttttttttaattattattagaagtaaaattttaatagaaatatttgtgtctaggattttcactacagtctattagataatattcatatctttgattatatcaatcattagtctatttatctatagtcatatattcacatttactttgattgtaataccctagatatctctctttgtatataagctcatctctgtattataataaaatcatcacttctataatcatggaatcagagcaataaagctcctagacctaaatttttcttcttactcgtcttttctctcgcagccgtccaatggcaaacacaaacaccattcgtgataatgatcattatgaatatattctaatacagtctatatatattatattgtatacatttaactatatataaacaaaaacaaaaaaaaactacttgaagttagtaattattatcacttgacaaacaaaaaaacactacttaaagatatacacatgcattgaatgtgtataacaagcggctccatcttactactagttggttagttaaacttattaagaaaatacaaaaaaggaaagtgaggaaagagcttcttggcaaaaagtaagtccttaaatagtataatccctgagatgagcaataatggtgttccttatattattgcatgtctattttctcttttcttttttcttcttcttcttcttctctttagtcgaaaccctgaatctattcaatttcactaaacaaaaatgtcaactggagagaggaagacgtctcttacgtaaacagacataattattgtcaaatcatcaactttttctacgaagatgtcaaaacgaagcttttgaattattgtttactttctaagttacaggctttatatgtagctttcttcatgaagaatatgatttacgtacgcaacctttttacattgtatcgattatggtgggcaccaatcgtacgttcatgtttatatttgtgtaaaaatcgtatgatgtaatttgtccctttgagtctatagtattctttggacaccgtgtgaactacaattgggcaactattaatagccttatattatttatacccacaaatgaatttttttaccaaattaagaatgtagttcttctaaatacacactatcgaaaataaaacgaggatttaatcaaattttctgatactttgagaatataatttttttaattataaaagaaagtgtacacatgaactcaatctctttaatgcaagaaaaaaaattgatatgacaaaaatagttttgataacttcggtttttctaagcgataattgacaaataagtcataagaatatcatttaaactaagttttctctaaatacataatattttcaaacggacaaaagctgtatgtcgttacatatagagatctgcaatattcgacaacatatataattgaataaatgataaatcaaagtgtagaatagtggttttttattactcaataacggatcggatcacacacaaacatatctatatcaattatatatgaagacacacatacacaaacattcttgagaagacttacgaacggtatatgatatcattgtgaatagaattcgacaacatgtcaacatatatgaagtgaaaagacgacaatcaattaatgtgcctaatgacccacgccggggctagggactgattctagtcgacggtatatctccggcgagttttctggtaccatacgctggtcggtatcatccggaggagaagtgtgacccttgtcgcttggacccgaaggtggtacattgcccttgggtagggcactaagaaacaaacccttgcttgtgccgtaagggactagaacttttctagcttgagaagattgcaagacaaaaccaacaatcaaaatgagtaagcaaatcatcgaaatggagatccttggacgagccattacctgattgattttgttgtataattttagatattaattaattagttatgaagcaagaaatttttagtttattttttgggatttggttgtgtttctgtgagtgaatactttgatagagtggatatatatagagagaacaggagatggatgaggtcaatggaaatttatttgggttaggtacaaatgaactaaattggtgagttcgtatatataaagtgtttatgtttgtaattgatggatcaatgcatatatgtaggtgtttttttctttcttttttgacaaagtgtatgttataattccaagcagcagacaaaaacactttcacgttacatgcttttcattgcttatctgaatatgataatttaacaataatatcaaaatagcagaattgagttttatacaacataaatgtcatataaaatatatatgtatatcttctttttggtttttgttttgtctttactttgatcaccactataaaacggtatataaaataattagttgtttgtattcagttaaatattttgtttgttaggtggtaaaaaaaaaaaaaaaattgttcaatgtcttgctaagttgctgactgagatgttccataagagacgataaaagttgatgaagtgatctcgatgactacttatttagcaaaatataaatatcgatgaccacttatttctatggctcattatcagtgtggttcaatactattgtatgagtgctttgttgaaagcattgctttctgttgttttggagttttgtgtgttttactgtttatagcaaaattttatccgtggcacacaattatatgctttaaacatattacttttcatacctcttgttctctattattgaagttttttttttttggtcaaagttctctattattgaagttctagtaaaaatataaacccaaaattaatgatacatcagaatttggttgaatatatatgtatcatagatttagcattattatcttccattataaggaggtacaactacacgaaccatataccacacgagtccgtattaataaaaatgacaaatgtaattacactataagaacaataactacaactattatcagaaattaaaacaaacaaaaaagtcaaaaatatataactacagtacatcctccgtgggaagattgaaaagtaaatcatagagcaaacaatctcgtaattagttaatcatatctttgattatattataaccaacagatttcttctcagtcatcatctataacttctgcattgtatgataaaaaaaaaatcgaagagtactatattataaacacagatctgttgaaaacgtatgtctgattttacccagagttgaaaaaaaaagatgaaaaattcagagtcaaacaaagaatcacgaaagagtactgagcaaggaacgacgatcagatcaccctactctgcttagggtttgtgagtcttgatcacgtatttcacgtgaatgcggctatttaaaggtcaactgagaaggttaatttaacttgaaaatccaaattctataataaccaagatttacgtaaaaacaaaaaatatatcgtcccaataaaaataaataaaagaatatcatatcatcgtcccaataaaaataagatatttttatctaatagcacatctggttttaatgttttatcattcttaattcttataacaccaacagagagtagaaaccctgctctgtagatcatcatcggatacaaaactggatttatcggagacgatagacctcacaagctggctcaattaatccatgacaacttgactactcgtagagcttcttggaatcgctttgatttcgtcgatgatgttacagaaacaggcacttactgtcagtttcttgagagctgcaccattttctacaaagtactttgttaattttctcttacttgatgtctcccttccttttgcctgtttacaacaaacggtgtcttgaggtgaacaaagtcaagagatgatatgaaacatcgttgcacagatgaaagatccatctgctttttgtctggaaaacaatcaaattcctgagaacatatataaccgagtgaagtgtgagtttttgctattaaaaatgacacgcagtgtgatttacatgagggcagatgcaaatgaaactcaccatcacgagtgagtgtagattcgggaagctctcaaggaaggttggcaacatttcccaccaagtttgaaatctgatagttggttaatcaaatctttatatcacttacagatttcttctctgacgtcatctatgaattctgaaatttaaaatctaaatcgaagacacacgtcttttgaagacgtatgatttaattacccggagttgaaaaaataaaaataaacacgaaagagtatttaccaaggaacaatttagggtttctgattctgccgaagaggaaaacagtaaacattgtagacgtcaaaagaaaaatggaaaccctagattgtctgttgtcgtctactatgtccgaagaggaaaaatgctcaaatttgagacaacattattacataccaaagccttagaccaaatcattcaaaattcaaaaccgctcaaagccaaaattagtctttctctcagcagaaaggtcagaaaccatcagcacaagaaaacatagacatgggcttgtatgttccaaatgttctcaagcgaacaacaacttcacatttgttagatcgtcttggaaatgtaaagagcttgctgagcatcacatgatcacgttgatcctctatatgatctaagcatagagtaaatttcttgagcactgttgaattctccataaaataactccatagtttcttcatatccgccacctctcttgcttttacctcaacaaactcaagcgatgataaaacacattggggcacatctgaaaaatttattccccagttataatctcgaaacccctgcaaattaaagtagagaaacaaaagaagacaagtttagtatatccaatattttcagaatatgagtttcaattagttagttgattaaacagaacaaatacataccatgacgagagattttaaattctgacagctctcgagaaagattagtaaagattcccaagatccgaccgccatgtccttgacgctcaatacagaaagtttatgaaattttggtagtgatttcgatttcgagaagtgacgataatcctacaaaaggagaatgcatgttacaacttttcacattcaaaagaaaaagaaaaaaacgcttatatagatagttagagagaatcaagatagatagtttacctgaagaatgtcaaaggagatagtcaaatctctgacacaagagatgagtttaagaatactaagcaaggtttcaccaaaataagccacatcatcaagattcaacatgacaatggaactcaaatcatttataacgattctttgaataaactgacggttcagctttagatacttgagctttggggtttgcattacaacttgtgttttcagatagccagtttcattattggttagacagaagctcaatagagactgagatgagactttagctccatacatcttgtccatagttagggtttctagggctgggcagactgagaccagcttctccatatccaaactgtcaacaaagttgattttttgtagatccatgatcttaagacaaggcagagaaactgaatccggcgatttaggcaagtttgcacgatggagcttcaagaataccaatctctcacatgatgtataaatagttggaggtatctcaactctatcatatacataccttctattactaccaacatctaaatgttgaattttatgtttaatcacattgttcatcatcatcgacgtcatgtttcgacaattgtgaccatatccaacataccttagcttaactctttgtaagaacataaacctttcgagaaaatcgaacttatcataatttttggagccattgatcaccaaatccaacccaggcaaagattgccaaacatatctccatctgcgacatataaggctagtcttgaccacctcctccgtgggaagattgaaaaatatctcacaaagcaaagaatctggtaactggttaattatattatgaccaacacgtttctcctcaaacgtcatctataacttctgcgttatatcaaacaataatcacgaaggagaactgaacaaggaacgacgatccgatcactcgactctgcaaagggtttctgagtcttgatcacgtcaatacgtgaatgcggctatttaaggttaatttaagttttaggtaaatccgaatcttataatgaccgagatttacgtaacaaaaaagatgtaactttacttttatgattttatccaacattgaaaagaaaaaaaaaaaaaaaaaaaaggaaattcatagataccatctggttttacaactccaacagagagtgttaatatatagtaggtaaagaaacctcttctgtaagaagagactaatccaccaacatgttacaaaaaaaacaagccttgatttatctgtagatcatcggattggatacaaaactggatttatgagagacggcctcgtaaggtggctcaattaatccatgacaacttgacaactcgtagagcttcttggaatcgctttgatttcgtcgatgatgttacagaaactcgcacttactgtcagtttcttgagagctgcaccattctctagaaagtactttgctaatttcctcttacttgatgttcctgtgagcggtctcccttccttttgcatgttaacaacgtatggagtcttcaaatgaacaaactcaagagatgataggaaacattgtggcacatatgaaagatcaatctgctctgtgtctggaaagcaatcaaattcctgataatatataaccgagggaagtttgagtttttgttatcaaaaatcttaatgtgatttacatgagggtagaagaagcaaatgaaaactcaccatgacgagtgagtgtagatttgggaagctctcaaggaaggttggcaacatttcccaccaagtatcttcgaagtaagcatgcaagcgagacaagttagagaattgaggtagttgttccattttgcagtaatcatgaataacctatgcagccaaaaaaacaaacaaacatgggttcactgagaaaatgtgataaagccataaaggaagtgtataagcttaatgttattgaatcgagcatatatatacctgtagagtatcagaagatatgaccatttcgctgaccgtagataacccagtgaggaatttacctagcatagctatcttggaagaatcatctggttccaatggatcattatattcgacattaaagataacatcgatatctacctttgcaaaggggccaatgttgtgtattatgaagctgtcagatcgatgatcacaaagattcatatactcaagtcttggagcatcgattgtaacaacatgattttgactttcgtagcgctcagaatctatcttgaagctttttaaagactgggaacgcacacacacaacttcaagagaatcattgggatcacgaactatggttaactcttccaaaactggacaacctgatattagaatctccagagtcgaatcagcatcgtacttgaccatatcaagatgcataatcttgacacaaggcagcgaaacagattccggatgatccaaggctacgcggtagagctgtaagttcaccaatctttcacatgaatagagagataaaggcatcttaactaactcgtcatcatcatccacctcattatgaacattaaaatgacaaactctacgcttaatcacagcattgatccaagacttgaaacgagaagcatcgtgctcattaacctcatagatcaacttgaatctctccaagtgttgctcattttcagaacccagaaacctatttacgaaactcacaaaaacatcatcatctgggaagttattggaatccaaatccaatacaggaacatgtaaccagagatttctccatcgttttgataaaacgcttgtgcaaaccgattcttttgtggagagatctgagagaatctgacataacaaggaatcaggtaaattgcttatcctatcggagttcctttgcttctctttaacagaggtttcatcatccatgtcgtttccttaaactctgaactatatagtttgagactgaatcatgtaaataacaaactgaagaatcacgaatctgttagctaaaaaagtcaactcataaactccagaaagaatcaaacgatactgaaattacctgtagtacttaagtattatttattcccaaagagataacggcgagagaggaagaataagacgaaagcaccgtcaattttccgggaaaagggaacatagatcgtctcgcttgcttgttgacatctttgacatctctaagatgcagacaataatagtcaactcaggacattaatcacgtagtttttttttactatctttaatatttacattgattacaaattttagctagaaaaataatgtatgtcatggcgtgagtcaattaataatataaccaaagagaagttaagtttttgagatatgaaattacattattactaaaagttaaaacgtcctatttcaagaaaaagtttgtgtttatattgttgtacttcccactttattagagctaactaatctagtgatcttatggtgatttaatgatcaaatttttagtcttcaccctgctaatacagcgaaaacctgtaaaaagtaaaaaccttttgatataacaacagtcacacacgcgcccaatagatcaacggaccagatctcgattacagttacagactgtcttgtcacaagccgtcactttaacacatacaccaatttcttctcagcgttatttcaaatctcagtttacaccttcacactgctgcgtctctctctctctctctctttctttctcagattaatcgctgagaagaagcaaccacctggagacggcggagatggcagggtacagagtggaagatgactacgattacctcttcaaagttgttcttataggcgattctggagttggcaaatccaatctcctttccagattcactaaaaacgagttcaatctagagtctaaatccaccattggcgtcgaattcgccactcgtaccttaaaagtcgatggcaaagtcgttaaagctcagatttgggacactgctggtcaggagaggttcgtttttcgtcttcctcgtctcttcatttcgttcttcgtctcttatttgtatgtaaaatcggccttcatgctagatcttggtatttcacattgagtttcgtggcgtattttcgatttattcctgggtcaattggtctcgagtacattgcaaatagaagccactgtcccggagatcactctaagctcctttgcttccatacttaggttctcgatctagcagtggctttaaacgagtttccatagatctatcgttttggtgactttgatagcggacactagctttttgattcgtttgtttgacttaatttgaatttatgttactgtgttggaattgagctctttagcccaatctatatgttctatcaaacagttttggagtgaatgggagcttaacatgaagctgatcttatcttctctaggtctaggttggtgagtggtgactattcaatgtgtgattcattcactggcttatgtgcttgtttttagttttttggttgtgaatgtgttctgtgttcagcagccttttactagagagtctctccgttgacttttgtactcaaatattgctcgtttgtctgaagttgactgcatttgaccaccattgacggatggaatcttgaggtagctaataatgtagattaaaaaaagtgcccttcttctgaaataagtctttgggttttgactcaatatgaccatgattgctttgatggaatctgaattggatggatgaacaagagcatgcgattttttctggttaatgatcactagaatcacgaacacttgcatagactattgttagaatgctacaaaggacttgctctgtttgctagttgagttgcctccattgagacgattgttttacttccttctttgacctaccaatttaattatcacttttggcaaaacataaaaagcttataagaattttcttctctgacaccttttgttctgtcaaccactgattctcgccacaatttgaagactcacttttgcttctcgtctcaggtaccgtgccatcactagtgcatattaccgtggagccgtgggtgcactcctagtatatgatgtaactcgccgtgcaacatttgagaacgtagatcggtggttaaaggagctcaagaaccacacagatccaaacattgtagtgatgctggttggtaacaaatctgatctccgccacttgctagctgttcctacagaagacgggaagtcctatgcggaacaagaatcgctctgcttcatggaaacatctgcccttgaagctaccaatgtggaggacgcatttgcagaggtgttgacacaaatttatcgcatcacaagcaagaagcaagtggaagctggtgaagatgggaacgcctctgtcccgaaaggtgagaaaatcgaagttaaaaacgatgtctctgcgctgaagaaactcgggtgctgctcaaattgaagcctttttttgttttcactgttgagagagaattataacccccatggtccattgtttgattatgtccttgttttgtaacactatcgacatttgtatgagttttagaccatacactacataatgtttatttaactttatttcaagaattgttggtgaaccaggctcaatatgcatcagttaagcagaggaatctggatctaaaatgccgacgttcatcttcgatagttggatcgtcgctctccttgtcctccagttttgattctaatttcctctgtctttgtaatcttcaaaatccaaaaccacaacttcagaaccgggtcgggttgcgttatgttgtcgggtttaggtctcattttgtcactaaactgcaaacgacgccgttcctttagagaagaagaagaagataggagcgagcgagcgagcgagcgattagaagaagaaatgatggaggaaggaccaccagctccaaagatgcttcgaatggtctacttcgtcggcgccggatgtaagttcgctttatgctgcttcatatttttttctattttgatctcgattgaatccaacattccaataaaatataaaatatttcgcagttctatgtacattcgcgatcaataagtggcgtgagatggagagaaactcgcttctgaaacaggagcaggagaagaatcaacaaggagatgttggtttattgcctagagattcggttcagaaagctatgaaatgatgatcactctcttcttcatcttttcttgtaattttgttttgatcttgtgattttagtatcgttgacctaaagtttgcatctttttttaatgaaccctagaaatctgatactcgtactcattggtttctggctttgtgcttaatttaaagattgctgctttctgaactcaatttgatcaaagggtttcaataagtcactgcttaaaatctcttacgggtttagcattttcgagcattttaatgcaattcccgaccgtggatgtaatcaacaacaatcaccattaccaaatccaagtgagtgagttccggttgatcgattaccaattatctggagaaatcgttcaggcaccggtcgtgagatctgctcgtcttcttcgtcttttcaaacagcccaatgaacccaattccatagggcccattaaccctctaatgggggaaatgcctaatttgattgcaattttagtactctccactacttgttctgcagcatttgttccattttagccccactacttttgcgtataaaccatatataccttaaatatatatcatctcaccttgcttggcctcactaaaatttgaagaacgtcatagcgtttggtatgtaaatatttacatactttctacagtttgtactcacctagttatatgaaacaagattcgtatatatacctcacaagaattccatcaactaaggctcattctataatacacttgatctagatattgataaaaacaaaatagtggattatagtaactctgtcaataaaaattggatgagtcaaaacacactaaattataatctctgtatcatttatatataaatagataggtaacaagaacaagtcaataatcattaaactatgatgattccaaggtgatttaattaggcaaattaagtccaagtagtactagttcccgtaccaacaactacaagacgcttcttttttttgtacaaaactcctctcgccttcgcctgtgaacctctcacttccctcagaaaaatcctaatccctccccgggcaaacgggtttttctccgttaagccaccgttctcctcgtaagctgctctcagccgtccgatcaaagcatctaagcttccccacgcctgtttcaacgggcagttacactctcctggtggctctttctgtccgaagaaaacgcatccttggatatgaacttttgttttaccaaactggtcacgactttggaggaaatcgaggatgtggtttgattcacactcccatacgtgaactggtggcatcttggtcatgagatactggcaaaacgtgttccagtcgcggcttttttgtgactcataacggcttagagtcggtggtggtccttctactatgcatttgcctttgtttctcgtgtttgtactcgtcatttctgaaagaaaaaccttcagaaccagagacgatggagaaagtttctaccttttttttattattattccctttcaacttacaatgtctcggctctttatatagattgagcttacaatggtttaacctacttgggcgcagctgagctgtccagcatatcacatcagcacaaaatcaagagggtgtcaaaacgacagttttttatttgcgcctccgtaccgtacgacatgaggataaggactggctctgcatatcctttgcttttggcttcatttgcagctgaccgttgtcatttgctggactgtgattttgttgagttttaattgggcttcactgactttttggcccattaccaaaacatcttcacgttttgagttttggtgttgtcgttttgataattgcttctcttaaaagtcccaaatcaatttggttcgttaattagattgttgacttccgcatccctaaattatttacgcagaaagttatgcaatgtgaacgcatagcacgagatcgttcaaattgatagttttgacaatgcgttattgctctgaactctaaagaaagcaccttcataatagcctaattagatttttaagaacgtcatagcgtttggaaatttgtataaatatatacatactttatattctagggtttattctcacgttgttatacgaaaaagatttttcatatacttcacaagaattcaagttagactcatatatgccaaaaaggcaaaaatgaagtcctaatttcgtaatagcactctacacactttctcttagatattgattaaataggtaatgatgatagtaactcaataactacatatatcaatcaaaattaaatccgagtcaatacgtatacactctacatatatatatagatgtgtgtttttttaatgtaaagataaatgggtagcaaccaagatctcaagaattaataactatggatcataaaggtgatggaattaactttaaataatttgaactagtactagtacccgtaccattcataagattccttttcttcttcttcttcttatacaaactcctctggccctttgcctgtgaatctcttactgccctaagaaaaccttaagcggcaaagaactgagatactgattatagagtgaaggcagactattttttgtaaggattatagaatgagatcacatacatgcaagcgacagttatttgtttgcctagttaaacttgaatggtaagacttgggttcgaaccataaccatatttgttatatttaagcgcagtgcaaccaatgacagcctataatttgtaatgtctccgcaatctcaaaatcatcatcatacgatgaaaacgatctttaaaatcgtatccccaaccacatgtgcgacgtcgtatagtacggcttaagaaatttacacgagcatacaaattttcatatagaatataaacattaatttagaattaactataaattaattaatccgttttgacttctttatttcttattctaaattttgcattatatacacatctgtttgatccctttatttgtttctatcaagaccttgaaaaaatggcattagcatcacatattcttattcttctttctctttttcttctgatttccctcgtccgaccacaagttcctccaatggagcaattccggttccttaacaacggcgactttggagaatccacggtggagtacggtgcaagttacagagatttaggtgtaatacgtaaccaatttcgtctatgtttcttcaacaccacgccaaacgcattcacactcgctatcgggatggggacaggaagttctgattcaatcattcgttgggtttggcaagctaacccacaaaaaccagttcaagaagaggcttctctttcgtttggaccggagggaaaccttgtcctcgcccagccagatggcagagtcgtatggcagaccatgacagaaaataaaggtgttataggcttgaccatgaacgaaaatggaaatcttgtgttgtttgatgatggaggatggcccgtgtggcagagctttgaattcccaacggatacactcttggtcggtcagtctttaacactcgatgggtcgaagaacaagctcgtaagccgcaacaatgggtcttatagtcttatcttagagcccgaccgactcgttctaaaccgtttaatccctcgtagcaacaacaaatcccttgtgtatcacattatagagggtcggtttattccaagcgccactctatactcggctaaagaccaagggaccacgactcaattgggcctagccacgccggggctcaggcctgagtttccatataaacattttctcgcaaggcctagattcaacgcctcacaaagtttccttaggctcgacgctgatggaaatcttaggatttactctttcgattccaaggtcacgtttcttgcatgggaagtaacgttcgagcttttcaaccacgacaacaacaacgagtgttggttaccgtccaagtgtggagcgtttgggatttgtgaggacaatcaatgtgtggcttgtccgttgggagtgggcttaatgggctggagtaaggcttgtaagcctaagaaggtgaagagttgtgatccgaagagttttcattattatagacttggaggtgttgagcatttcatgactaagtataacgttggtcttgcgcttggagagagcaagtgtcggggtttgtgtagtggagactgtaaatgtttggggtattttttcgataaaagtagctttaagtgttggattagttatgagcttgggactttagtcaaagtgtctgattccagaaaagtggcttatatcaaaactcctaatgtgtgatcagtaacgtgtagaaaaggcaaaaaacataatgggcttaaagtactaataagcccattatatgtacgacttaataaaggcctttttatctatgtaataagcctctaattcgatgagatacttttcacaaatctttttcttcattgcttcgtcgagaagagaatgaacaatgaagtgaactaataaaacttccatttgcaatttcacgacctccattttcgtgctgagattctctaagctcgatggatctaacgacgacgcgtcagaggcgtccacttatatctgactcttcttcttcgtcttctacgaaatcttactcgaagaccgataaacctggccgatctaatggcggtgatgcggaggatggtggtctccgatggttcttgccgtttatagcgctttgttatcttcgttacatgagcgcgacttctaatatcattcatgactgcgatgaagtgttcaattactgggagcctcttcattatattctctacaagtccggatttcagacctgggaatacaggtttgcttttccgctacatttgattatgttactactgagctaaagacccgatgttagctcgagtgagcatgtactttgagctgtgattctatacttatgtatcggtgactactgattctcaacattttgtttcaatttgaaatcagaaatgtgaggttgggatttggttttagtggaacttcggtttcaacggaatctttattaggttatcgagctttgttttatatgaagatataatcatgagattgattactttttttttttttgtgtgtgtgtgtgtgtgtattttgcagttccaactttgctcttcggtcgtacttatacattctattccatgaattggctggacggcctgcttcttggtggtttggtgatgacaaggtaagcaatgcatacttactgatgtacattctaatcggtatagatataactgcatgtttcttatccagtttacgtctatcttttggataggttagagttttctatgcagtgagactctttctcggactggtttctgcagtttcagatactgtcctggttgttgcgctctccagaaagtatgggaaacgtatcgctacctatgcagttgcgatgctctgcttaaccagtggctgcttctttgctagtaccagtgagtgttttgttttgttttgatttgttgttacacttgcttaagctttctgtcatatttccttaatatgcatatataggctttccaagttattcttgcatccgataggttttagtttcaaatgcttgtataagttattccaaagacattgctctgaatttggctttgtgttctggtttcttactaattcatgtttctctaaaattttgataggtttcctccccagttcattttctatgtacgccataagcctctcatctggtttattacttttcgagaagtatgccatggctgttgcagtttcggttgtcggggtgattcttggctggccattttctatcttggcctttttacctgtcgttatttactctctggttaagagattcaagcaagcatttatcgctggtgcagtcaccactatatttctccttgtaagctaacaccaatcctagatgctttgtctgtgtgaattttatgggaattattggatctcgctgactttcattagcacctgtaactttaaattactattttctcttctaattagttttgtctcttttctagggagtctcactacttgtggattactattattacaagagatggacatcatcagttttgaatctcttgatatacaatgtgttagggggtggagagagccatctctatgggactgaaggagcgttattttatataagaaatggatttaacaacttcaacttctgtttcattttggcaatgttgtttgtcgcaatatatcctgttatcagaaggaagtatgaccgtgccctgctggttgtgatttccccgatgtatatttggctggcgttcatgtcacttcagccccacaaagaagaaaggtgattttctaagatctttcatcttgtaattttttgagcattcgtatggtggcttctatatcgttgaggaaaccagttttatgatacttttacaaaatcacggtattcaacaaacaatgtttttgattgtcaattaattgactgcaggttcctttatcctatataccctcttatttgtgtctctgcttctgctgttattgagaacatccctgagctgttccgggaaaagtatagctcacgtgaaagtcttctggtgacagtaagttccaacttacaatatctcagtctctgatttatacctttccgcaaattgaaaagaagtagattgtacgattctcacatatctgtttaatacgcagataaccaaatacatgcgacctgtgattcttggttgtatcttatgtgcttcacattctcgcacatttgctcttattaatggctattccgctcccttggaggtctacaaactactggagcatcatgatgatgcaggaccaggtatatccaattcgaactgaacttcttgatcattataatgctaagacgagtgaagatcacatctcacttttacttcaagaatagtaatttgccattggaaaaagggtaacaaagtccttttgacaaaagttttctaatcactgatgacttcttggttggttttgtatgtcaggttctgttctatgtgtgggaagtgaatggcatcgatacccatcatcgttttttgtgccccactacattagcgaagtacggtggatcgatgatggattccgcggtcttcttccattcccatttaacaatacacttggaggcacttcagcatcacctccatacttcaacaacaagaaccaagcatccgaagaacaatatgtaatactcacacactcttctctcatgaaaccttcaaaatatctctaaacataaacttaatcatggcttgtttactcgttccattttttccagttaaagaacatcgaaacttgtacattcctcattgagttgcagcttagcagaccgtatcagtatcgaggcagcgacttatctacatgggaggtataggaatcaaaccatcttcctgaaacagaatccatctttgatttcacttcacttcttcaattggttgttttgacccttttttcaggctattgcggtgttgccttatttggacagagagctgtcgccagctaagtatagatcgttcttcatcccgcacatgtggcaggagaaaaatgtgtttggcaaatacgtagcactgagaagagtcccaaaatgatcacaaatcgttaaaactccttagacttgtagctttaactcagttcattgggtagttttgggagaatgtaataactaataactgattagtatcggctttaagttcaggtacgttcacggttcgtagttgtgttgttgtgaaagagactagttttaactttgtaagaaatctccaaatggtcagaagaacgtggaagattatgtttatgacattattgtgcaaagtctatattctttttgtcttttgatattgcggattccaattttggctatcgagaaaaagggagaaaatgagaagactatggagggcacttcataattcatatttctgtcctctttaagttagcgtttgaccaacgcgtcgtaaaaaggtacagaagaagaacgcaatagaattgaagataatgaactaaaaaagttgtgtatatatattgtaaaagattatctttgaagaaaagaataacctaaacaaggtattaatttttctaaaaatttgatcgagtcatcgagatcatggtaggtatattgacgtttgtaataatgttgtcactatgttaccaccagactaataaatagtgcatgtcgtttacaaaactaagaaaagattattttcttagtagttttcaatcatggttaaaaaagtatttgaatatggaaattattcttaaaaaaattgaatatgaatatggaagagaacttacagaaaattatttactaaatgtattccttacatatttcatgtaattatatatttttactagcataaaagcatcaatttatttccgtaaaggaaaaaaagaaagaattaaaaggatcaaaggggcacgaaactagagacgacgaagcgtactcgattattatcagcctttggtagcttcgttctctctcaaaaaccctaacttctctgtgacgatcgaatccgatagcgtgcgataatggccaatagtaatcttccccgacgaatcatcaaggttagttttccgatcctctgtagcatcctccgatccgtatctcccctcagtttcattttggggaattctaatctgaaatccgaagaaggaaccgacggattatatacctcagcagaactgggaagaattttcgatagcttgtacgatcttatatcatcttcgtcatcttgatctgacttttttttgttcttcgatctgataggaaactcaacgtctgcttagtgaacctggtaatttcatcacttcattcgatccttgttgatttctcacagttgattttagctcaaacagttggttttggtagctggaactattgattttaattctaagttgtatatctttcgaaattgcagctcctgggataagtgcgtctccatcagaggaaaatatgagatatttcaatgttatgattcttggtcctactcaatctccttatgaaggtagtcaaattgttttaatctcccaaagatgctcatcgttacttcttcctttttcttctttaatgcatgctgctcaacgatttatcgttatcgtttctgctgcaagtagtgactctgctctgtctctatatttgtttatacaaacggatatgttcgtttaggtactactaggtctcatagattgctcatgttcggattgtagtgttatgaataacgatgagtctttaagctacctttgagttcatttcgacacattttatttgttctagaatacacaatgccaagtcgaatttccagaatcaagtctgctgttttatctatcatcatatttctgttaattgatgtttaccaataattttgtttccttctcaatctgtaggaggagttttcaagttggagctctttttgcctgaagaatatcctatggcagctcccaaggtaagttgcttcaacttttgtgtgtttttcttctttcatttcatgtttcacttgttttggtaacattaggattaccccacataacattgttaagtggaggtaaatgctctttaagtgaatgtctctctactcttaacactaggattttatttatgggtttatgagattggtgattttggttttgttatgactactccgaatgtattttcttatattatattagacaacgtatccaagtttcttcattgatgtagagtttatgggtcttattgatgatatcatttgaaacacaggttaggtttctcaccaagatttaccatcctaacatcgacaaggtctgttgtgaaaaatttccttttcttctcttactgtcaagataactaaccaaacacatggtcttttatacttatggatcatgttttgtttgcacttatcatgtatatatagcttggaagaatctgccttgacatactgaaagacaagtggagtcctgcactacaaatacgaactgtgctcttgaggtatgaatatatccatagaatcttctttccctactaaatccaaaatattgtagaaattaagatttaattattcacactttctgattttccattgccgtgtaaaaacagtatccaagctcttttaagtgcaccaaacccagatgatcctctgtctgagaacatagctaagcattggaagagcaatgaggcagaagctgtggaaacaggtgataaaatacgatcgaaaaactcaaaaaagttgcaacaaaaactttattcctctcctctctaatctggtaatctcatatcaatgtgaacttatgcagctaaggaatggactcgtctttacgcaagtggtgcttaaagaagactgcaaatggagaaagatcattgtcatttaaataacattatatatggtgaaactctatctcaaggttttatctgaatcctttttctgaaaacagaggaaaaagatttgtactctctgaatttgtataactagggggatctaagactcgtttacccatatctggaatctaactttcttcaattgtgcttgcttttgatctttgtttttgttatatatgctctataataatctttataaagtggtgtagataatcagattttcacaggttgtgaatcaaagtaaattggatgaatgatgcataatgttactattacaggtgtatgaagcagcttattttggtcaaatgtaaaaaaaaaaaaaagtggtaaaaatagtagtcacgaggaatgagacttgagattttgaaaaatgggcataatcagaaacttgactcgtcagttgatggacgcctcaagaagtacctcagactattagcaaggacctacaaatacaaaatttgatttcatttcagtaaaaacatttcaacttatcaaagagaaaagtctaatttcagaattttaacctgctggagaggcttgattagggctttgttcctgtagcttacatgaaacttcaccttagccaacaaaccctttttgtttcacatacaacaagaagaagcaacatgagaaacagagcgatattatagcggagggtatatgttttagacattaaaaaacaggattattagatacctcggtgtcgaattctccagattcaacagcgacgctgatatctgaaatgatcttcaccagctcaactaatagtccaggtctatccgctgattctatgaagagtaaactgcatcatcaacaaataattatggatcaatgatcagatcatatatcataagaataaaagcatttggataaggttctagagttgagataaggtatgggtatacattacctgcggtctggtccatcatcttcaatggttatatgtgttgctatgtccacgtcaatctgtcaacatcccaatccaaaatacagaagaaggaaaatgaattttgaagctactttgaagttgcgtgggtattcccttcttcatcaaagtgattaatactataatgaagtttaatacttgtactctacattgacccgccaaatccaaatatgttgattattagttaagtctttgttttctctattattgtttcttatctgtacgtgaccgaggaaacgacaagcagtcttgacctttatgttcgaggatgctaactacttgaagaattagtgcaatacaaaagaagtggataaggttataaaaagagcatcacagtttaaggtttttaccggttcagttggaggaagaacaccaaaagctgctcccattgccaactgagaacttgattcctgatccaaatcatcgagaagcaatgtgtgagttaaaaaattatgcaagatataggaaaaatagaaagagaggatattaggatgtgaagtagttacaggatgaaactcaagcagattgtttatgactgtgagacgaatggcctcaagcaattcagggtcttctacttttcttccactatctctgttgtaacaacaattacagtcagctcaaaactcaatctaaagtcaactatttgacagagtcaatcgattcaaagcaacattaactatctaaacgactcttggagctcaaaatactctttgatgatatgaaaagacatacgctctagtaatggcaaatttgttgtgcttgccggaagaatcaaggtaaacatttgccttgacgacattcaatcccaagtttttgagcgcattcatctagaagggcaaagttgatcagatcaagaagcagtcaaaaaagcaggaaaggaagtaagaagcttttgtgaatgttggtcgattatgcagagctagcaacaagtgagtaagaagaaggtatccttccttacagtgtcaagtaaagctccaagacgatctccgaatgtaacttcaagaacggttgcatcagggtcagaatcttggtcgattataacaactggagttggaactttatcagaatcagcagcacttccttcttgctttccattcttcaaaatcaaaaacaaaaacatataaactttaaaaagtctattcaaattactagtgtccttgtgtaatcatttcattttcatacctccacagcagtagcatttgatgctctaatcttcaaagtggataatctgaagaaaaaaaaaaaaaagaattgaattgaagtatttgaatccgtagaagatcagctcaaaacaatctgtgctttgaatcgaattccagcaaaagatacgaatttataaccagcaataaaatcatttggacattttaaaaagattagcaactcggaacacaaaattctgataatcgttaaaaaaaggtatcagatgctttttaaggatttagagatctgtggagaaaattcactacaaaagaatttgtttcggaaacagtatttacttcatgaaactcgaatcagcacaaaactaagatcacaatcgaaaaagcaatccaaaagaagctcgaattcaaattctcaagaaggcatcaagagatagccaaaaaacaaaaaccttaatcgctcgagattgacaagaggtttatcgacaaatccaaacgtaactgtcctaggaggcaagcaaagagctccacaatcgcgtcttaaagcaagagagctagaagcatcagtgaagcaaagagcagaaccagaagcagaggccatagccatcactcaaaaatcggaattaagaagaatgaggaaaacgttagagaggagtagtagtagtgatgacgaagaagaagaagagcctttggacaggtctcgtgttatccgccatgagaggataataaaaaagatgtgacacacacacacaaaaaaaaaatgcccgtttcgtccttcttattatcttcaacgttagatcgccatttctcttgctttccctttccttgcctacttttacattttctttttaaattccaccaaatattgtcttcttttaaaatttaaaaaagtacacaattcgacaaattcttcacattcctattggccccgattttatcggatgtgacatgctattggtcagtgttttaccgactagttaaaacattaggtggcgctaaaacaaataactaggttaaatggaacatgacgtcatcctttataagtaatggcctttatggcccaaactttcatctcaaacgcttcagcccactgtttaatgggcctaacgctaaagtgatcatcatatcgaaaattacaagtttgccactttctcgctgcttcatccctctcgttggttcgtcagatttgcgtccaaatccctccctaaaaccttgagtcagactcaagagatacgaaccagagaaatgtggaagtacggtttaagaatcgccgccgggaatgccaaattgaatcggaagtcttcgattctaaataataccgtttgtcatttctcacctccgacttcagccgccgtgggaacacttttcccgagtttagatcacgttcatcgatgcttttcatcttcgaagagcacgaaatcttcaatcaccaaaacgaagaaatctgaaggcaaaaaatccaaacctaaaggcggcgatcctggtgccgccggagctgaggaaggagagtttggagccgccggtggagacgaccttgaagcgggtcgtgccaagagactagctgatgatgagaagattccgtctctagatgttggtcctaatggaaggcctctctttactcccaaagatactacactatcgcagctgactcacaaggatattggctcctacttcaaattcgagtaatctcaattctctctttcccttatgtttctgtttatctatttttagaattttgtatgaatcgttttgtgtgtgttgatgtaatatatatattgtgggaatgatagtgaggcagcactgaaagcagttctgccggaaggattagcttcaggaattgaagatgagtttaatgaatcatggagacctgcattgcttgtcagaaaaagttacttggctctgagggataattttagacgcattgctgatcctcccatgtggccaagtgacagtaaaggtgtgttctttgtttccgttatgttgatttctaagtatcacgattagtgatctcttctatggttaacagttttgtgtgtttttattttcctttgaaacgaaagcagcctaatttgtttgctaagtcttgcttgtcatatgcccttatccggggatctgtaataccataggtatttataatcattgcttcctctttctttctgaaaaggtgtcaaacttcagaagcagattgtcttggatggccctgttaagtgtggaaagagtattgctctggcgatgcttgttcactgggcacgtgacgaaggctggttagttttatatgcaccaaaaggacgtgactggactcacggtggctacttctataagaatccacatacagggttttgggacactcctctacaagctgagaatattctcaaggcaagattccacatgcctcctcttttggaatggaattcttcctatttaacagcatttcttaataaacttaacttctgtaggattttgtcaagttcaatgaatcccgcttaagagagttacggtgcaaaatccatgatcctatcgtgcttggagagggtgcgggtgttggatacttgaaaggagcagatgctatgcctattcccgaggattcaactctgtatgaccttgtgcaaatgggaattaagagcactcatgcagctgttaatgtcgttgtgcgacttagaaaagaactctcagttgtaaaagatgtaccagtgttgattgtaatcgatcaagttagtccccagttttcccctttatgataccatatttcgccttctattattttaaatctctctctttttcactagagctaatgctgcttgtttcttgttgtttacttgtctttcagtataacagttggtttacattcagcgagtttgaagagcccgtaacaccgcgttcttgccgacctatacatgccagagaacttacaacggtgaatttttcttccaaattgatttatgatccagaaaacaaaaatcgcaattaactcaattcttttggcaggtgaatgctttcagaagcatgatgcatgaagatatgatggtgggtgcattctcacattcaacagcagtaggaaaactacgcaaagacttgccagatgttccagttgatgctcgtcagcaattcccacgttattctttggatgaagcagaagctgtctgctattactaccttcggtgagttaacatgaaaccaattttaatagtactcagctctgtaatcctcctctcaactgatcagacccgttttttagttatagttcattattgagtctatctacttgacatgtgtatgggcctaaaccgaatatcgatttcacgaacgttcaatatggtattgtttcaggcaaagactagttcggcgtgaagtattcaacgaagaaaactggaagaagatatactatctggcaaatggaaatggagcagagatgcgttggttagcccctttcatgcgttgaggaacaatatacaaacaaacaaaatagattgtgatcttgatttgtcgccttttctggtgttttaagttatcccgttagtttgggagagaaactcttttcattgacctttctgaattaaaggaagatttttgttgtttgagtttgtagttttaggtttccttgttgtctgtaaaacactggtttttggacctaaatttctttctaataaaatcagtgcctctcatttattatcgctcgagttgataacaatgttatgcaaaaataaaaagttgtgaaagagtgaaagaatcactcacaaaacaggcaattgatgggaagaaattgcggaactgcatatttattgtgcggagttatgattacaccaaaaccatatagcatagaagatagccaaataggtttaaaaagaacaccaaattgatgtttgttttcacaaaaaggaaaaatttagacataacataacacattgagaaaagtacacaagttctattgaaaaagaatagacatgaagagctatacaaaccaaaaggcgaagaagaagaatgagaagaaaaaacaattagctcatcttaggaaaatgaaaccacaccctccaagcatcaccatcctaaccgtaataactcggagacccaaaagaaaaattttaatgagaattaaaaggaaagaaaataacactacaaccaccaccaaacgaacccaccagcaagatcacattttttccagattcatgaaaaatatttaatgaacccaaactaggatgttggtgatgatgatgatgatgactcaaaccggtatggcatcaacattggatgagtcttcacatctcaatactattccttcaagacttgttgggaatgtgcatctcctccattgccaaccagctgctagtggctctgatgatggaactatcatcaacacattatcgtttctctgcaccactccaatcacactcactgtacttccttcttttatatacctgaaattgaaacccagcatcgagtatcaggatcgaagcttctgttaagtttttattactttaggagttgttaatgaagtgcttgttcattacccttctttgagccgcattattcgatcatcgcttgttagattcttcttgcctaaccatcgtacaaaatcgggagacacttgctcgcttccttgcttgaagtcgatgacaacagaatcatctacaagaggtgttacctttgcaccgcttccggttttgactaaggctctgagcccagactggaaatcagagatgtaaaagtccaccacatgtctctgcaacataacattacaacgaagtgttttgatgggttgaggaagataatataacatttcctctgtcaaaacgaaaatattgggaagggaatcactaacctctgatgatctcagtccccatgtgaagtgacgatgggaagaattggctggtttcgaaccccatccacgatactcatatagacatgtcgatgtgtacacacatctgggaactctgtggaaggatgactcaagcggtacattaccacaagttaccaccttcaaacaataaaacaagaatcaaggtcataaacataacaagccaagattacaaatgcattacaatatccatccaaaacatgttctattccactatttcaactaagtagtactatgcttgttattagtttatcaaaggccacatgcaaaaaagcaatagccttctcccagttgcagtcatatagttactgtatgatcagagaccgaatatacatcctggcaagtagacaagtagcagaaggagaagccaaaaaacagtcaattgtaagacgcgcatggatgcttaccccagtgaccttcacgtgttgaccatttttggcagttctaagatcagcatcaggataacgagcaatgaaatctgtgataccacgtcttccccaacaaatattccaaatgaaaagtgcagcaacaactgtgaacaagatggcgacaacaacaaggagaattgggttgtgaactgcaccaagaatgaagcctccagcaaggaaccccataatgaatataagaacaaccagccacagcacaggctttggaaagctcttcaggcaggaaaagtcatcttctggaccaagggtagttaccgcctggttgtggacaacagtaggcatatgtgacttcatcaaaccagaagagtctagtggaccagaaaccttcctgggagccccagatgaattcagagggcctgatgtaataggcccagaggtaatgagacctgtagctggaagaataggaatagaaccagaattttggcgagttacaccaccagattgagggccagatgatttcttcaaaggctctccatgcttagataatggtccggaattcgttttcttcattgaaacagagccagcagaagctaaagagccagacatacggccagtggccataggagcacctggacctgattgtgcagttcctgcaaatgagccagaccttgaaggagcacctggtatgggaccagacttcctggacttagtcccatctgctggaatatcaaacatcttccccaattctcctgatctcttgatatcaccaccagtgtaaggcatggctactgcactcatagttggagccctttctttgggttgctcaggccgaccagacacaaatagcccattgctgagctgatgagatgggtatctcgaacccattttggtgatttaaagaaaaaccagagcaagttactctgagcagccgggttcaaaacgtaagaagttcaaatcctagagaaacaggagaggaagaagtgagaaatgagccaaatgcatactgcttcacatgtatatagacataacaagattaaaataatgaagaaaaagtcctcgtcagattaaagattgtgacaggtgaaacaatgggcaataccacaaatcagaaacagcatcaaagacctatgccgacaactacaaggctagcagccagaagtgagtaactcagccatttgtattactaaagaggaccactaactataggctcagatctctaagtttctaccagcgatttttgcggtaaccaggttttgtctagttcaattctaaataacccaatttatagaaaaatctgaatgaacagaaaaaaaactaaagataaattcaacgcagcatcacaatcacatcaaagaaaggagttctctcagtttccatttcaagtaaaacaaccaaaatcggaaatctagatcaccatttttaacaaagccccaaaattggaaccaggtggaaatgaaattggaaaaacacgatcaagcagaggaaaatcgaatctgggaaaatgacaagaggtggattggaacctgagtaggagaagagagtgagtttcggagaaaatgcagctaacgatatcaggaaaagtgattggtattgtgggagtgacagtagaagatgaagaggaagcaatactggggaagccaagatcccatcaccgttgagctctctctctctctctctcgtctccgtcgtgtggatctcgatctcgatctctctttgagccgcaacaactgatgagttgtctcagtctctctctctttctctctcctcttccttttcctctctctctttctctctctaaaagggctaagttttttaaaaaaatgtctaccaaactgatacaaagaggaagaagaagaaacactctgtacttttttttttaacaagagaagaaatgaaaacaaagatgtgaatttaagaaaaaaaataatgtgtcgacattacaaaactgtatttaatcatcatttgaaaacatttaatcatttgataaactatgtaacattacccccttaatcttctttccacctaacctttgtatcatttgttggtctttctattttataacattccttaaattattgaattaaaactatctaaattctgttaattactcacttgtaatccattttgttcactggaaatgtaaattttactgtcttattttgcaaaacactcttgaatttttttttattttttttctggtcaataagacacaaacatgttggattataaactattgtgatcataactctgttcggtaatgttttcaatatcaaatttgatagttggtgattggatttgtcaacatctctttttttttttgtttaatcctttgctaagttaagtcggccacatatatattgggtacgattttcataggtctttcctcacgccagaagtgttgttttattttgttgattgagttattaattattggaagcttttctttcaagcaaagtaaaatgcgtaataatgattagtcacatccaatggttagtcagtctattacaccgttaatcaagctctggtcatataatttttttatttttggaactaacacttattagtttaggtttccatcacctatttaattcgtaattcttatacatgcatataatagagatacatatatacaaatttatgatcatttttgcacaacatgtgatctcattcattagtatgcattatgcgaaaacctcgacgcgcaaaagacacgtaatagctaataatgttactcatttataatgattgaagcaagacgaaaacaacaacatatatatcaaattgtaaactagatatttcttaaaagtgaaaaaaaacaaagaaatataaaggacaattttgagtcagtctcttaatattaaaacatatatacataaataagcacaaacgtggttacctgtcttcatgcaatgtggactttagtttatctaatcaaaatcaaaataaaaggtgtaatagttctcgtcatttttcaaattttaaaaatcagaaccaagtgatttttgtttgagtattgatccattgtttaaacaatttaacacagtatatacgtctcttgagatgttgacatgatgataaaatacgagatcgtctcttggttttcgaattttgaactttaatagtttttttttttagggaaactttaatagttgtttatcataagattagtcacctaatggttacgttgcagtaccgaaccaattttttacccttttttctaaatgtggtcgtggcataatttccaaaagagatccaaaacccggtttgctcaactgataagccggtcggttctggtttgaaaaacaagaaataatctgaaagtgtgaaacagcaacgtgtctcggtgtttcatgagccacctgccacctcattcacgtcggtcattttgtcgtttcacggttcacgctctagacacgtgctctgtccccaccatgactttcgctgccgactcgcttcgctttgcaaactcaaacatgtgtgtatatgtaagtttcatcctaataagcatctcttaccacattaatttaaaacaaagaaaacatcaaaatggctgaaaaagtaaagtctggtcaagtttttaacctattatgcatattctcgatctttttcttcctctttgtgttatcagtgaatgtttcggctgatgtcgattctgagagagcggtgccatctgaagataaaacgacgactgtttggctaactaaaatcaaacggtccggtaaaaattattgggctaaagttagagagactttggatcgtggacagtcccacttctttcctccgaacacatagtaagtatatatactcaatctttgcttggtcggggaatcttttgttttgaactcaacgagccattttttgtttttaaatttcctctctttttgaatagttttaccggaaagaatgatgcgccgatgggagccggtgaaaatatgaaagaggcggcgacgaggagctttgagcatagcaaagcgacggtggaggaagctgctagatcagcggcagaagtggtgagtgatacggcggaagctgtgaaagaaaaggtgaagaggagcgtttccggtggagtgacgcagccgtcggagggatctgaggagctataaatacgcagttgttctaagcttatgggttttaattatttaaataattagtgtgtgtttgagatcaaaatgacacagttttgggggagtatatctccacatcatatgttgtttgcatcacatggtttctctgtatacaacgaccagatccacatcactcattctcgtccttctttttgtcatgaatacagaataatattttagattctacatttctcagcagtcagtttaatgagaaataaaaatagggatttgatattgtgtttttgcattagggattttagaactcataatacatgactctaaaagtctaatcttatatagagtgggttaaagactaggatacgtagtctagtaaataggaaatggtgttgtccacaaaagggatttagtccctctcgtatgctataaagttatcgctacccactgacccaaaattatctaagacgatcgtaaatatctattttcgaatttacaaaaaaaaagagaatgatctatttctgatccaaaatatctatttagcagaaaaggctggaaatatttatatcactaagacttaaaaaaccaatgattgtgatatgtgacggtgattcaattagattactttcgatcatgttagaagatagatactttcgagtttcacttttgtcggtaaaagattgaattagttatcagacacatatatgtaaaatgtgatttttattcatttttctactttggaaattatcttcattcatcaaattgtgttacacttacaaaattcatattaattttctaaaattagattgaatacgcccctaggatataaaagtctaaaccatgggtagtaaacttcctaataatccgtggttattcgatagtactaaaaaagacagagctaatttagttaagtcggctgaaaaagttaaaataataaatatttttgtaggtaataacaaaataagcaaacaaaaaattacgataaaaaggtgggaaaaataagctctgtctcacacagcattatccaaaactcaaaattacagcgttgaaacagaaaccgatctcgtcgctgattctcttttcttcggatccttctagataatggctcgatctttctctcgttcactttctctatccaaaggccgtttcgccgccgcgtcatcctctctcctcccttcgtcgcaccttgtttcattccgatctcaatcttccgatcgtcggggagatctgtacgagattgatacctccgcggcttctcaatcgccgtcggatcctttaatacagaagctagaagacgccgttcaccggatttttgtgcgccgagctcagcctgattggctcccttttgttcctggtgcgtcttattgggtccctcctcctggatctggatctcagtctcatggaatcgctcagctcgttgtgaaactcgcgaatccgttaacacacgaagaatctttatctaccaattcttctcatggatggccttcctccgattatttccttaaaggttcttattggtcattctctctctggttttttatggataaagcttggattggaatcttcaatatgttactcatgctttagctaccaactaaattgattttgaaattgatcaaatttttgttgaatgtaagcattcatatgatttaactagtggcaggtttttgatatgttgataatgctatgtcaatcgtaaagttagtcattgctcgatgctgttacaggttctgaatgggagatcattaatatgtgattaacatttttgagaatctttaatcatataggcagtactagcgtctttggtggaacaggttcttaactagttgtggtgtatgagaattgtttgattgttggtcattcgttgacatatggtttttgtttattgggtttaggtgttcaacctcaattgatggagaccaagaccgagacaacttcaaattccgagtctcactctgaggacgaggaagtgtaaaaatgacactgcttgtttgggtgagttatttggcaaaactaaagttatgaccttgatggattgagcaaatcacatttctatctatatccatgaatcctcaaggtcttatgattttgttgggtttctgataaaagaaagattgaagcttgcaggctcttcaggatctcttgtcaagaccaagagctgccgaattcggacaaccaagagcaagtgaaaagacgtgaaatagaacgaccatatttctatacctgataccaaaatgtggaatatcgaataagactagtgttgtaggcttgtgtagcatgtcccgctgtttctcttttaaacagttgttgtatatatatatctctgtttccttgctctttcacttatttaacaaagagttcatgttaatgaaattggaaatgaggtactcttagatatttctttctataatacagtctacaaaaagaagtacagcgccaattgaacattatacatttacctcaaactcaaccaacagaaacaaataattcatcgtcggaatcggaaacatccacattttctgtaaattccgatttccatttctcgaaaaccgatctaaattcagaaaagtctccgcgatatcgagacaagagactatacacttgaaacttagtattaggatccaactcaactccctcctggatgcattccctcaaaatctttctcactttctcagtctccttctccttgcacagaccagaaataatagtccgataagtccgtcgattcggataaatcccaccttctttcatgtcgcaacacaaagaataggcttcctcgatccttttcgcacgcacaagccccttaatagctactgtatacgacacaacatctaaaggatacttctccaagatgcatcgtttaaacaaatgaaccgcggtattgtatttaccaagctctataagactgtcgattatcgcagaatgaaaatgagcatcgagatgttttttctccttgattattattttatacatcttaatggcagcgcgaggtgctcctcctcgacaaagtgcactaagatacacagtatatgtataacaatccaaagcaaaatctttgtaagacatgatgctgagtactttcaaagcgtacgaattgtaaccaatcttgctgaaacagtttgagagcaagtttccagtaaccagatcaaaatctgttcctataccgtgggtgatcctaggaacgagatcaaacttcccagacaaacatagactagacagtattgatgcaaaagtatactgatccggcacaagtttccttttttccaaactagtgaaaaccttacgagcttcttcgaatcttccgagtcttgtgtacgtgtgtatcatcaaattgcaaagaacaatatctggagctaaaccttcagattgcactttacttagcacggtaaacgcttcatcaaccattcctaaatccacaaaccctttgatcaaactagtatacgtcacaagattaggtgagcaaccaatctgaatcatcttattgaacagatcaaccgccttttgcggctctcctgaacgaaaaaacccgctaaccaacatgctccatacattaacagatacagagattccactacaaatcatcaatccaactacttgaaatgcttcagagacgcagcctgttctacagcacagcctaagaatctgcccaaacctctctctgttaggataaaaaccttctccaatcattctcttcaaaactatcttcacaccaaccaaatcccctctaccccctctactgcaaaaatgactcaatgcaatgtcgaaactaaagaaatttcgaaaacggattccttcaaaaatttccagagctccattaacaacattgagtttgaaattaacatccatcatcatattcatggcacgagtgttgggcacaaatccaaaactactcatgccagtgtaaacctcaatagccttatcatagatatggccacgccaaaatatttccagcaacaacaaaaaaacccgaggcttaatctcacaaccagagattttcaatctctctatgattcgatcaatgctatagtattcacgagttagtttctcaacaacaccaaccatgtgatcaaatgctcgatcatcgtggaagtaattgttctgcttcgcgcaccagaagaagaaattcaaagttttgagatcagctggagattctcgtaaacaagaatacacattatcgtgcgtgagtggcttcgcggcagtatactcccgaggatattgaccgtgaatcgaagagaaactgagtgtgttaaggattctcttcctctgcttcacccaattgcatctccatagcatcttactcgtgacgctaagatcctaaccatgaaacggggtttctcgggaaagagagaacttttatgggaaacccagctgagatcgaggacaaagtttgtgacatggaaagggaacaacgccggcgaggttagtgaaagcaagaaacggcgaaagggtttttggtttggttcgaagatttaggagaatttgcggtggattcaataagggatgactataccgaactcggttcggttctttaggtatcggtacactccggttttaggttctgctgttcatttaatttgctagatattcatttccttagaaaagattaactatgattaatatttctacatttaggaactgaaagcattattacaactatccaaagctatgaacatgtaaaggtggaaagaggacaaagaatataacacgtttaggcaaattgtgtattacaactctgaaggtgtttctcaatccaaaatctctccgtttcttcggttcaatacggagtttctaattgaactccgaaaaagcatggagagacagaacaaacatagtcctgttgtacacagaagaattaacagtgtcagaaaaagtatcctacactaaatatcgaaagcatcattccatattatggttaagacttaagagcgaaccattgtgcttttacctgcataggcaatggtcacacccgatatgattcgtcctagagctgccaagaagtaaagacagatcacaacctgagagacagaaacaggcgaagataaaaaaagttcagtttagaattctgccaccaagcataaaaccagagaactgcattgcatcggagtggtaattggctaaaaccacaactgacaggttctgtggaatttcagtcaatggtcttaaccatctttgtcttcatcaataaatgcttgaatgttgttatacacatttcctattcatgcaggcaccgcaccgggtgatcgaagaaactacctcttgtaatgcaaacaaggaagaaaccagaatgcacttgccttaacaaagagcctcttgtcatgtcctgttgctgcaacccgcagaacggattcagctgctccaacagtattagctaagcgcgccacaatgttacaggctgtgtcttgtgatatttgccactctaatggatccacaggtacccttcacacaaaagttactactttgttaaatcatgtgaccctataaagactgcaagagtatttcaaacagtgaatcatcaaatcaattatactaataacgctggtaatttctgcattgatcagagaagagggatgaaaatgatagaatgatgagaaatacacagttgaaaaacacaactttttccccaacgctcatggtcatgaagatcaaaagctgttacattcaaagaaacaaaagattgagctttgtagataatgtgacttttaagaatgcaagagtaaatttaaaccgtttatatcatcgaatcaaatcacacttttatggttcctagttccttatgttgaaaccaaaagcaaaggcaagcaaaataaaaccttttcatgtcgtaaacacgttgaaactagctagtagcatcacaacaacaattcacacgattatgtgaaaactaaacacaacaaaaagctcactcattttgaattctgaacagatcaaacagccaaacaaagaatttctcaatttgtaaccttagatcggcaaatgggagatgtaacagaaagcccaacactcaaagaaagaaaatttaaggaggaaattagagaaacttacgagacattgaggtgacgaaaaagaaggccgagaatggcgagtgaagataagagaacgatgagaacgtcggagatgagcgagagaagagtcgcgttgcgattagcgcaatggtgatacacaagcgtcccgcttatcagcaatcctatcgcctttcccatttcccccatctcttcttcttctctcttgaatttttggttccgacattttctttcagatgaaacttcccaagagtttcggtttggattccaattgctggtttgtttggttcagaatcgattttgcctttggcttattaagaaacaaaccaaattcttggtcagtttggaaacccagcaatttcgtaattagatattgttaatggttttgattggttcaaggcttcaagcctcaatatttagttcgatatagcttatttaaaaatttatatgtatttgacataaaagaaattttcactgaaattggcgggttgagccggcccgtgcagtagtgcaacgcatgggcgactcgcgaaagcccagatagcaagctatcttagtgggctttctcccttaaaaaatagagttaatatcgtgtgggccgatggcccacatatcagatattaaactgataagaacagatactacacttgatcttagccaaaaggccgagaaaggtatgagttgcgatatggatacgaagtgtgttttatatcaaacgtggtagagcgagtgtttcttaaactagcgatgtgggactttataaaaaccaaattgaatgtacgagctcttgtaactcttagaattagatcatcctcctccttcaaaatataaactctgtcatttgtttgagaaggagagctactatggctacattcgcaaggtctgatttgctctctatctaatttttttttgaaggatgttcctatttgtgatctaattttggccggataactaaatttgtaagactgaatctgttgattcttcccctggtttgcgaatttatgctttgtcgattctcacttgtttgacaattttttgtccggtggaatcaatatttcgaaatcagaatggaattacatgagtgtatcagaatgtaggtttcgaacaaacaaggtttgtgttggcttttgtcttgagatgatttggtttggtttgtagctaatttatatatttctgctagccactatcagtggagcttggatcaggaatattgggaaatatcttttgatggaatcaggttcagttggaattttagagttttagattggaaataacataacaagttagagattctagcttctcactattgctagagagtattctgttaataacataaaggcctttggagactactgcaaagctatagtcttttctgatagtcaaattttgaaatgtatgactgtctttgagaatacgctgacgacacaccatgtcgcccttcctcatgatgcaatggggaatataacttgagtaaattaactgtttacttctgatagaatgtgacagctatgacaaattctccccttcctacaaatccgtgtggatgatgcgtaacattattcatttctacaacttggccaatcaggtatcgatcttgagttatcaacctttttttgcgtgtttcttttggtttttgaaaactttgtatatttgtgatcgataacacaggctattgacagagcagctggagtggatggctcagacggttacttacactctcatcaaacatcgcttgggagatcttttctaccgcttagtgtaagcaaatcttctactgatgaagctgttttctcggttagattttgtttagaaaagaaatcaagatctaaacttagagttttggttattttaggtttcagaagtttgaagatccagctgagggagaagatacacttgtagccaaattcaagaaactgtaataatgatctgacttctggagaacgcgccttggaagatggaactcgagaagcaagcagttttcagaaatcggaagtattcgagcatcgagcatcatcacagtggggtaatgatgagtccatgaatccaggttttgagcccgaaagaaataagtggttgttgtgatatatgttctcgcttcctctcttcatgatttcatttatttgttggtgtacagacaaaaggaatattaactcttacgacaaggttcaaaaaggttaaatattctcacaatttttttaaagaagttgagaaatgcagaagaaatattccaagaaaatgtgtttttgacattacagatttgcgatcacatcattcaaaagttaaagggactaaacataacagacatccaaagtagtcgtttaacgatgcaaaatagataagcagagtaaaacaaagacaagaaagaattatattaaccaggtccgactttagggatatcgtagtgctcactcatgttagccagatactgattgaaatcctcaatcctgttacggtgagacttgttcgcttccttagctagcttctgcacatccaatctttgtttctgctctatgtatcgcctttctgctggcgttaagtgatcatcatcatcgagctgctgctgcaacttcgcatcctcgcttgccttttcactcctgttcatttcttcatctccttcttctccttcaatcaatttacccaatgcttcagtgctttctcctatacccaaacccaaaatagccaaacaacaattaattgactctcctttgtcgatgaatgttgatgaacagattagttatggttatgagaagagagctgttgtttcttaccttctatgagttcatgatcagtaattttaagagcttgttcttcctgtctcttatgtttcttcttcttctttactccacctgctttcacatccaaagccttcccttttagctttagcttcccaccaataacattgtcgtatgccgacatctcttggctgctagtcagaacaaagtaccacacaaaacatacattcaagttagaaagcttgagaattggtgatttctcgaaacactgataagcaaaactaccaaccgacttagcaaacggagagcacatatcatcagtatacatataatcaaaattctttgaaaggttccaaaatctctaactctttctttctttcctttgtgtatgacaagagatcctagaactaggacttgaacacgaatcaagcttatcaatcaaaaaagtaaagagccatcacataacccacataattagtaaacgaggcgtagtagatctatagtgtatgtataccctaataatcaaccgaaaatcgatagttgcaaagcatacacttcatgattaccatatagagaaaaaaaaacagaaatctagaagcctaataattgacgcagaagcaatgaattgagctaaaactcgaaccctaatcaaatcaatcacctgaaatcgagagagcagaacgcgagaaagaacaagagagaggatatttttttttacaattttaaagagaaagtaataggactattttgaaattttccatctaggaaagcccaatagggcccaatatggttttttcccctagtataaaacgacatcgtgtccttttatactgcgctcgcttttttctccccactaacaaacagtaagggctttgaaaattggttttcctctcaaaatcgaagaatttgtgtaacgagcgagacccaggaattcgaattaaggcatttcaaattggttctcctcgtttccttcctctctacttcggaaaccctaattcccgtcgccggaactcttgactacgccttctgttagatttttttattcccccgttgttgaaattgagagtaaaatgttgagtaaagtctccccaagtggagagctcttgaaccggtggaggagaatcgaggaagacgaagaggagaatgacgattctgatccttcagcagttcggcgtcttaatcagcgcaaagaacaatggttccttctatatctctctttgctctgaatagttcactgttaaatcgactgaaatcagaaaatcatcagacaaaatttagttattacattgctcggatttcagctctagctgactgtttttgttttacatcttcttttaggtttacggatgcattcactttattgatatcgttgccgaaagatactcatatttggtgtgggcacggggatataatgggacctcttatagagactttctacaattacttcaaagatgatagagttgattcacctctcaaggtcttgtggaagagaatctctgaagagatgcggctttgtgcgcaatgcatttgtcagcaccatcagactcaagagatgtatgaaaaagagtatgagtgctcttctgttggtccattacttgttgtgttgcggaaacttgatgaggaaagggtgacgaggcacttgcaagagatcaatttgaaaatagaaaaaggaacatatgatccagatcatcatcatgctgaagttgttagtgttatgtacgaggtattgtagtatatgtgctttttcatttcacttaaaataattactggattgttcttttcactgatgaatcatttgcgttaccgactgactctgatgatctgtatttttctattcattttgaatcctcatgtcatgtcatttctttgcatcatgggattggcatctagtaaatagtaacttatgagcctttattttggtgtcaggttttgatgtttccattcttctttgatgatatgtccttatgcactgagtttgagaaatttattgagtcaatcgacaacatacacgagcttgcgtttgctgagaatcaagaatttccggtatgttaataccagaggagagcttcttgtgtttcctactaaactgaatctatctgacttggtgttttctcatatttcattctgtttagggtgtgtatgcactcctttttctcaatagaagggtgcgtgtaattggttatcgcttggcaagggccatgggaaagttgaggtattttcctttttcatacagcaactaagtaaattaatagctaactctgttatcaagactatctgtagtgcgtatgaaaccatgtatgatattatctgctatcatggcaggtcagcaacccagttagagcgcctccagccattgctcaagaaattcattggaattctggagatggagggactgccttccgcgtctcaggaaccgagaccaaggatatatctagaccgctcatctatatggcttgggatgacatcactgtaagagttagtgactaattctccccgtatagtttttcttccttttaccgtttttcaatatttttcttgagttgctgattccttaatatttcttgcttcttaaaggcttgagttcttagaaggccctgcttttgaagaggggatattagagccttatcccatttttgtcgatacagtgttgaatcacataagtggtgattcacctgaattttcgctggctgttaattgcctaaaagagctatttaagacacttggtatggtaactattgtcgttttataaagtagccagtttatcttgaagatatatattctgttagttgacacattcatatgatgaaaggttgtaagctctggcttagggctaccttgtccccaagtgtgatgcgtaacacattgttgggtcagtgtttccatacaaaatctgagaagatccacaaagccatttttgatcttttccagccactattacaggcaagcttgcattagtttctctcttacatatatgatttcgccaatgagattaacatgatttcattttacttacattgccatattatgcatatcctgttttgtccagtcccttgaggctttgcgagatggtgagcatgaaaagcaacgcaggcactttctctactttctccttcatcaggtcccagttagcagtaacttcagccttttagcaagaagaattggccacaaggtagttctagttcttcctcactaagacacatctgcagcattttttttatcttggaatgaagctcctttatcttcatatcttcacctagctttttaattttatcttcagattgctcttcttattgtactcagaggatacaagatgaacccaccttgccctccctttgagtgtgctcacatgtggttagtacaactgggcctatctgttgttttgcatctgtttgttgcgtctgttacttacttgaggaattggcttttcttccatccttggttttgaatttctatcaaatacattttacatgacatgaatgatattaagtaagatggttctagtttcatatctaaatttttgtagttgttatcgtttctttctccctgcaacttgcatgttagctttacatggatgccagttattttgacagtcctatgtggagaatacatcaagttcactgggatctgcgtgcagcatgtcaagatagataactttcatgttttgaatgctgtgtttggtgtatgttttggcataaattttttggatgttagataaggacagtaagttttctcatagaattcatgaaagtcaactgatttgacaggggcccatctcttgtgtcatcgtataaagattcttcacttcatatttcattgcgacaacctgccattgatcttgtccaagctatcctggtatctgatgcaacagccttactagcttcgttgctacgtaataatactggtaaatttatgggctatgagattcaatatgacgacgatgacagtaatctccccttttcccatactactgaagatgtaagtgatcgttcctggagtgactttacccagcagagcaaaattactcttggggaatgtaaagagtggatgtgcattccgatgctgtggattactactcttacaaatacaaattttctaaaccttccagtatcgctatcccaagcagtcttttggtctcgatcacgtttttgtttagtggaatctgaaaagaatgatgaaatgacagttgatatagaaacttggctttcatcttctgctgttgaaatcaaaggcacgcttggatggaaggtagcaacaggatctgatgacggggggccaggaaaggagtctaaaaactcagtgacagtatcaaagatgtgtcttacattgatacgaacattaaagaggtacttttccatttgactgttgtggtagcctggtaggaaagctgctaagttttctattacgctttatgataatgaggcttttgggtttttgatttgtagattgaccacttgttatctggtacaaattggtgacgagtgtcgaaaacagtggacctgggtaccagagatgggcgaaacgttcatcctttctctttcagacccagatgacgtacgtaacgacctgtaatgattgcttggttccatcataagagatgcatacttgatatttattactctctgttctggtttaattgtgtataaagttgaccatgttgctagtgttgttttgttaacagaatgtaaggcagtttggaaagtctatgctggaacacgtttcaaataccagaggtctgtcttgtgggttgaagtttctctgctctcaaacttctcacctcctatttgtttcttccggagttagacatgttttacagcaggtaggcagcagcttattttcatttaacatgtagaaggatatgcatacaatgagtcctttaactatccattttgaatgtttgattgttattcttcatgttagtttttgctaaggctacagatcgtctacccttttccactatggaaactggaagtctaggctcacaaactatttgtgaggttcagttttttttttaatcatgagtgtctacatttttctcctgggagatagatctctgacttgcaactgttcttatattgcttatatctttttgtttctctgattttggcaggtccatttgagctctgtccttcaaagctttcagatcctgcaccattttttctttttattgttcaagttgctgaaggaagaggaggtggccattacagacgtagtgaagagttccgcaggggggtttttgaggcaacctaactttaatgctttgcctgtgagtgagggcagaaatcccttgagttctaccccggaattgctgaagtttcagtacttgctagcagaagttgcatggggcataataaggaagtgcctagttgagggaaagactttcatccatcaaagtctttgccaggtattatttgaaagtcgtcgtggtgaaccttggttttacctttattgcttctgcttcattctactgtcctcttcggttgtcatctttgagctgtatctgcttcatatgagccgagtctggtttattgctaaagttccatttatctaatttggcagatgacatgtgtacgtttgcttgagattcttcctgtcgttctgggaaaacttagagtaagccgtgaagagtcctgtgatactagaggaactttgaaagatgcgtctgatcttaaatggcttcctgatctcattgattggggaaggtcacaacttaaggttgttgttgcgtattggaaacgagcattagtggctttgctagacatcttacaaggatcaaacagtgacgcttgttcttcggcagtccaagctatcagacatgttctatcctctggtaagttgtttcctgcttgttaatagtttctaactggcattttagaactatttttcccaggtgatacaattgacaatgctctgactcttcttaattcagatgatgttgacatcgagcaattagcagaacaaatctcacgccttgttcccaaggcaaatgagtaccagattctcaaacctgttgatgttgttggcaaattacaagataatatgatggatctaacagtggatgagacagaaaaggaatcgttgaaaaatttacctagtctgcataagtctcatcaacctgacatcaataaaactcttctacctatcaaaaacatctcccagatctcctctctgaagaagagtacttctagtattgatgcttcaaagctttcagcgttagttctttcagagagagatgttacagttagctccagcaatattgttagggatcttcccacaacaaacgctgaaccaagcaaggctgctggtatgagtagggaagcggaaaaaagacagaatgtggaagatcctgtttcatctggaatcagacccaacttaaagaaggctactgatgaactcggccctcgtggtacttcaaaagaggctcagaaatctgcgatttccaacgccaaaggcatggatttgagaaaggtggtaaatgagacggaggttgatccacttgacttggctcttaaatctctgaaacggcagtcattacccctggcaaaatcagggcccattgttcccaaaagacaagtcattcaactttgtgcacctgtcaacaagaaatccgatcgttggcagagacaagaagctggattcaaaagattcagaccaccaaagcttgaagattggtttagaaagattttgcaaatggactactatgcgatagtgggattggcatcaacaaagaaagatgagagtcagaatgttggaaaatttagggaagttcctgtgcgctttggttcacctgagcaatatattcagatttttcagcccttggttttggaggagtttaaagcacagctgcaaagttccttccaggagatatcatcactggaggagatatattatggtgttatttcagtgttatcgattgaaagggttgacgattttcattttgttcgttttatgcaagacgaaaatgatgggtccaactcgaaaagtttctctgagaatgacttggttttgttcacgaaagagcatccagaaaacagcaatgtcggtgtaaatatgatgggaaaggtatgtggtaaattgttttgcttgcatgtgattgataaagtagaatcaggaatgtatatgcttgaaaaccatgaatattactatagttactcaacctgatatattcagaatgctgggttgaagcttcagtggaatttgatttacttaggtttaatataagatagagggttattcctaatgttctaatacgttacatagttgttggatatacactttgtaatgagatagaatgaccaggatagagattacctaccttgttgtttcttaggtagaaggacgggaatgggatgacaaaaaacggaccagcattttgaatgtacggttgtatcttcagaatgcatcttcacggctgaatcaagctagaaggaatctcttggaacgtagccagtggcatgcaagtcgcattctcaacattacatcccaaattcgcgagtttcaagctttgtcgtgcataaaggatattcccgtacttcctctgatcttaagtcctatgaatgattctaattatgattccgaagttaaaagatcagatctgcgttcactaccacattctctacagcaaatacttaaatcatctttcaatgagagtcaacttcaggctattagtgttgctattggctcatccaatttgatgaaagcttttgacatttcacttatccagggtcctccaggttagtcattttatctctttgtcaataaagctaataatatctataatttgctctgggagaaagattagcattttacagtaattgattgttgatgtcggacatcaatgaatgtaaagaaaatttgtttgctctacagggactggcaagacgcgcactattgttgccattattagtggcttgcttgcatccgcctcacataaaactagtgacaggggaaattctgaaccaggtcatagttcttcaacctctaggcagggaatgaatccgagtgtcgctgttgcaagggcatggcaagatgcagctctggctaaacagctaaatgataacagcgaaacgaatagaaagatagcagaaaagaatggtagaggaagggttctgatctgtgctcaatcaaatgctgcagttgatgaattagtttcaagaatatccagtttaggtatatatggcagggatgggaagatgttcaaaccttatcttgtgagggttggaaatgcaaaaactgttcattcaaattcaatgcccttctttcttgatacccttgttgatcagcggttggcagaggagagaatgcggataaacgaatctaagagtaataagggtgcagattcttctgcattactgcgctctaatctagaaaaagtcgttgatcagatcacgcactttgaagctaagcgtgcaaacataaaccaggaaagtttagacgccaaagataagccggagaatgaacaccacaacaaagatgatgatggcaagctaatgtccgatgcggagctaggaataagattgcgaaggttatatgagcaaaagagaaaaatttacaaagatcttagtgctgttcaggctcaagagagaaaagcgaactatgaaatgagaacattgaaacaaaagttgcggaagtccattcttaaagaagctcaaatagttgttacaactttaagtggttgtggaggagacctgtacagtgtgtgtgctgaatctttagcagcacataaatttggtagtccatctgaagataatttatttgatgcggtggtgattgacgaagcagctcaggtaaatatttgacatgcttgatgtttggcataggtgttctcgtcaaaagtcataacttttttgcttttgtggctttacaggccctggagcctgctacgttgattcctctacaactgttaaagtcaagaggaacaaaatgtataatggtgagaattgttcacttgcatctcagaatgttctatcaaatccgcagttttatttaataacattgcttattattacaggttggagacccaaagcagcttccagcaactgtgctctctaacgttgcaagtaaatttttgtacgaatgtagcatgtttgaacgtctgcaaagggctgggtaccctatccttatgcttacccagcaggtacactgattattagaattttctggccttcagatctgatttggaagttattcattcacattatgttctctttttttgtgttaataaaatgatggaaagtttgttttaaattataaaattatatctgtttctagaagtttggctaacgtattctttgcttacagtataggatgcatccagaaatttgtcgattcccgtctatgcatttctacgacaataagttactaaatggtgttgacatgtcaagtaaatcagcaccattccacgagaaccatcatcttggaccatatgttttctatgatattgttgatggccaagagcatcgaagtggcgattctagctccgtatgcaatgaacaagaagctgaagctgctgttcaactgcttagatttttcaagaagaggtcattaatcattcttaagctatctattcacacatgttttagagagttatatgatattattttactcacttgctatcttgatgcttacaggtacccctcagaatttgttgctggaaggattggcattataaccccttacaagcgtcagcttgccgttttgcgttcgcgtttcactggtgcatttggggctcaagtaacagcagatatggaaatgaatactgtggatggctttcaaggcaaagaagttgacatattagtattatccactgtaagagctacacattcggctcctgatggggtcaatcaaagtcggattggttttgttgcagatgttagacgcatgaatgttgctctcactagagccaaactctccctttgggttttgggtaacacacgaaccttgcaaagagaccataactggggtgctcttgtgaaagatgcaaaagaaagagaagtcatcataccagttaagcgaccgtacaactacatgtttggtgagaatgtgatggaacaaaaccattctgagaatcttccaaagaattttcctaagcctgataaacagcattcacgccgcaaagaacagagagcagagacatcttctgatagaaaactgaggaaaactgatggagatgttgtgcctatctcatcaaaaggatcagagagtaagcacaccagacgaaatgcgaaagaagaagcttcatctcaaagggaaaaactagttgcaagctgtgagaaagtaacatccgaagagactctgagacggagccatgaaaagaaagaaaaaatgaaaggcagagagaaaagcagtaatccagagattacagatgcaaatagttcgaagaacgaaaattcaaatgaatggaagaaatctaagaaggcttcatcaaagcttgacagtagcaagagggcaaatcccacagataaaattggacagcaagataggcaaataaacaagggcaatgcttctaatcaaggaggtgttgaagatatgatatccaaacgaaagcagcagcgtgaagctgttgctgccattctcaattcgtctctgattccttcacataagcctaaacctccaaagcgaccattgtccccaggttcaaccgccggcagtcatacaagaccacctaaggcgatcaaaggtaagatttcattacatatcgaacctctttatgttcttcctcagaagctgatatgcaattgtaaattagtatgtcttaatgttgaatttcacttacactcttcttatttgcagagtcaaccaagaacaacagttaacaaagataacaaacaaacaactgatttcacaaaggttatttcccacaatcgtgaaccagttgttaatttccggtttcatgggtaagttttatagtttcctctggcgtcattcatcataggttctctcatgttctaactctgaaactagcactaggagaaaattttggctaacttagtgttggcaactcaaattgcaatattttgttgaaagttgcctgctatgaaattttattttgctgtgtatatattatcatgccattatgataaaaactgtttaacaaattgtcttttctttgttttagagcaaaattaattgggataattttctaatgagattattgttcaacagtacaaagattgaagtcgctgatactcaaatttcactaaatacaacaccggaaaaaaactcataagaaaccatatcaacctagaattttcctttctaacaattcaagaggtagatgaaggatccgtcccgatcctaacggcggaccaaatttgaccaatgcctctggtaacgtgaggccaaacggcgctaattccgttaagtgtcgcaccagaagctaaccctaacgcgaaagtctcaacgtatccaggtttcgtctccagcttcgcgtcgacgacggcaagcctcccgttaatggcgtcgattttcctcgcgtcggttacaagcttatccttgctcgaggcgtttctggaggacgaaactactcggacgagcgcgttttgtaaatcttcgatgacctttattgaagcttctgctggttccagccctcgtttctggtagtgagagattagttccgtcggagttgggaatttcttcgatttctgcttttgttctgatttggtttcctccgccgcgtttggtgtcgccggttgcttcatcttctgctccgccgggtatacaagtacagaatttgaatctcttatctgggaaattttctaaagtacagctcctgggttggaagatgagacggaagataattatttgattttatttatattttaaaaatcaactttgggtaatttttcttcatggactgtctgttgggcttgggcccacgaatactgtgaaactagtaatctcctttaatatggtaaaatgatagcataacaacaatattgcctaatgcgcctaaaaacaatacttaggaggaaattattaaaatctatattattaagtggggcttattaagaaaaaatgctccttgtgatgacgtgtcaaaaactcattagtcaggattgtccaattaacccggcatgagaaataaattaacaaaagagtgtaaactaacctctgaagtgttaggatttacggtgacaacagacagagagagtggagaacgcttcttcggctaggacgacaagcttcgagttgatggcggttttcttctgaccattctctgaaactgtaatttgtcttcactgtttcgccgatttaggggttttcttactcgcatttcggaaacaaatattattcgtatctgttattttgcctacaatttcgctaattctctgtcgtttacgttttcgttttcgtttagatcatgatagtgagaatttagatctgattggtttatctacaaaatgttggtgttcgataagtctagctaaatcttacagtagaatttcatggtgtccgattaatacagagaaattttccggggcttaattcttgtcagttttatttcagaatcttctcttatgctgaaaactatatatgggaggtgtttctctcggagtcaataccgagtgagaaagtgtgaagaagctgatcaagatatagtcagactttgtgggttacgattagttctcttgttatgctgtggtaaacctttggagggtcttttgtagcgtatcaagattcagcgtccaagttctggggctgagctgccccgtagcacgggttttatacctcttccccttgttcggagggcaaattcgttacaaaacatgatgatggatgaagatgttgagcaggccactctggtttcttacagtgacaagccaaggaccttcccggatatgcgtagtaaaacttacagtccattggttaggacataatacccttctctctcgagcatatctttcttgcatctaaacaccgtcatatttatacaaatatgtattggtgttatatctggttttatttctatttcttttggtatctttataatgagttgttttgtgcagataatccgcattctgagaaatttaaatgttcgtgccctttctgtacttctgcttttgagctttggagggatcttttacatgggagcacgtacttctcccatcattgtgttcgtctttgtagtatgcatcatcagtttcatgttgtcagtatacctgaccaagtgggtattagccaaagatgaaggacctccagaaatggttcaggtaatttcacacaagttttaatttgttctattcgtgattgtgtcttctttgttactcagttgcattttcagttctgtgctatgagcttattcttttctgtttagatatcagatgctatacgtgatggagctgaaggatttttaagaacgcagtatggtactatatccaaaatggcgttcttgctagcttttgtgatcctttgcatatacttgttccgtaacttaaccccccagcaagaggcttctggtttaggaaggtgatcatacatcttctacagaatcttttcttttatcttttgtgttgttataaataaaactcaaatgtataactttgtgcttcaggacaatgtctgcatacattactgttgctgcatttcttttgggtgcgctatgttcaggtattgctggatatgttggaatgtgggtgtcagttcgtgctaatgtacgggtttccagtgctgctagacgatccgcaagggaagcattgcaggtttgttttttagtattaataggaattcctgtacacatggccaaatactaagtgatggatttaatgcagatagctgttcgtgctggtggattctcagctctggttgttgttggtatggctgtgattggtattgccatcctgtattctacattttatgtatggttggacgtggattcacctggctcaatgaaggttactgatcgtaagtcatagcttcctgttctctggatatctttccttttatgtttggccattctatagtaaccagctatattctatgcatcagtgcgctgagttcatgtttattttcagagattcaaatttaatcacaaacagtatcttcttataccaagttggtacatatatgggtttgaggaatccgttttgctgaatttcaagaaatggctatttgctaaagaagcaacagcatgggtcgagtcttcatctgtagaaccggaatgcaaacttttttgatgttgttctcaaatgtttaacgtttgcaaacccgaaattgcatttgcatgtactagtgttactttttagcttaatgatttgactttcccatttttcttacagtgcctcttcttcttgtgggatatggttttggtgcatcatttgttgccttatttgctcagttgggtggtggaatatatactaagggagctgatgtcggggcagatctggtcgggaaagttgagcacggtattcctgaggatgaccctcggaaccctgcagttatagctgatttggtattagttctttcatttcacgatcctttgtgtatgattttgtcgggcctggaaccttttgtcatcactgaagcttcactctcatcttcttgcaggttggagacaatgttggggactgcgctgctcgaggtgctgatttatttgaaagtatagctgcagaaatcatcagtgcaatgatacttgggggtacaatggctcagaagtgcaaaattgaaggtttgcgaggcatcttgattttattttaaagagttgtactgttggtatttttagcaataaaattgcaaggctagttatactgtggtcaaactagcagaaagggttttagagttacctttctttttgcttcatgatttttttatttcttactcaactttttcgtgtatcatgcagatccatctggttttattttatttcctctagttgttcactcgtttgacttggtaatatcatcaattggtattctatcgatcaaaggaactcgcaatgctagtgtgaaatctccagtagaggatccaatggttgttcttcagaaaggatattcgctgactattatattagctgttttgacatttggcgcggtaatgtcattgattatttttgttcattatgtggttgtcgagcagtagctttttgatgttatattgtcagttttatcgatagttgactttacatgcacataagggcccatctaagcaagtgaagctcttgatagtgctgtaatttcaatggaattcactgacaccattgcccctgttttgtagtcgactcgctggctgctatacacagaacaagctccatctgcttggttgaatttcttcatgtgtggcttagttggcattatcacagcctatgtctttgtctggatatccagatattatactgactataagtatgagcctgttcggacgttggctcttgctagctccactggtcatggaaccaatataattgctggggtcagcttgggtctggaatccacggctcttcctgttttggttataagtgtagctatcatttctgctttttggctgggcaatacctcgggactaatagatgaaaagggaaaccccactggaggtctatttggaacagctgtagctacaatgggaatgttgagcactgcagcttatgttcttacaatggacatgtttggtcccatagctgataatgcaggtgggattgttgagatgagccagcaggtatgagtcatgagtggttcgaattatgcctatgttgtatctttgaattttcaagcttctataaaacttatcgtgtcttgcagccagaaagtgtccgtgagatcactgatgttcttgatgctgttgggaataccacaaaagcaacaacaaaagggtttgctattggatctgctgcccttgcatcattccttctttttagtgcgtatatggacgaggtttcagcgtttgctaatgtatcttttaaagaggtacattttttactctttggtgtattctgtttcctcttattccattccactcgcatactcatcctgattcttgtcctcacatctaaacaggttgatattgcgatcccagaagtcttcattggagggttattaggtgccatgcttatattcctgtttagcgcttgggcttgtgcagcagttggtcgaactgcacaggaggttgtcaacgaagtaagaagacagttcattgagaggcctggcataatggtaaatgtaattccgctggagtccgttcccttttatttttatttttttcatcgggtgtctttttgaactttatgtcacaggactacaaggagaagccagattatggtcgatgtgtcgccattgtcgcatcttcagctttgagggaaatgataaaaccaggagctttggctataatatcacccattgcagttggtgagtcagtaaaaatgttggttaagcccgtgaaacgagaaagaaacagacataaggaaccaacgctctctatttgatgtccacaggttttgtgttccggatcttgggatactacactggacaacctttgcttggagctaaagtagtagctgcaatgctaatgtttgcgacagtatgtggtatcttaatggctctattcttaaatacagcaggaggtgcttgggacaatgcaaagaaatacattgagactggagctctaggaggcaaaggaagtgattcccacaaagctgcagtaactggtgatacgtaagcaatctttcattttccttgtgcttcccttcttcttagttcctttctcattggtcatttccttttacttataaagtttagtcgaactgtcttctaatgagaaatcgttattctgaaaatggcaagtgtgggagaccctttcaaggacacagcaggaccgtcgattcacgttctcatcaaaatgttggcgactatcacgcttgtcatggctcctatctttctctgaaaaaagacatctaatcctttttgcacatatatagagtgagtgaggtaggtttatgaattcatgcaatatggttaagtggtatatgtttttcctctcctctgaaaagagagtatcgtagttggtcttaaatcaatgatcctgagcacttcacagtgacatcttacattttaaagtaaacttttgagtcattttttcaaaaaggttggttatacagatttacacaaaacttgacaccaagagaacacatcaccattttacccgagaaagacaaactataaccacctaaagccgtccatactttaaacactagctagtagctatcatctaggaatattagtgactagtgagcatcagctattactcccatgtaccacgaagcaacggagtagcttcaacatcgtccccgaaagtcttcaaaagatcgcatgtcgattcttcaccgtcaccctcaggctccaactccatccctaactcttcctctatatcgtcggaagcagagatcagtaacaactcacatccttcataattcaggaaatcaggtgggtcggctggcccaaaccgggtatgacctaaatgagcctgaatatggaccggaaactgggcctttctctttctctgtagcccaccaaaccctgacctacctcctcctccttgctctggatttcgtatttggatcaagaaggatccttctggctcaatgttcagcgactcttgtggctcgtgttctctggtctgcgaaaccgatgggaattcgagtttgtagacaagatgtgtgtggtgctttcttgtcggattaggtttatgtcggagaattctgtatattccttctccgacagctctcgccggaggtttgtgtctatgtcctcgagtcttcgtctcatactcctctgcaaagaaaacaaatatatatcacaaaattcaccaaatccttttacaattcacgaaattcttacctcctttgagagcatttttaacatcttcaacattggtcgtcaccatttccacgaaaccccaaaaaggttgcgacttcttgctcggatcaggaagacttttcttacccatcacaatgaatcgtagcagaagctgtttctcgatgttcactttctacaaaaaaaaagacccatattattaatcctgtaataagagctcaatccgtagtgtttttaattcttcttctacgtacctcgacgccgtgtcctccttcaccttggttcttggcgccggaggagctaccactcgcctctccgtcaccggaatctttatcggagccttctttacctgaaagagggtcttgtttctcttcggtgggattctcaccagactcaggacgcatcactatgtatagcctttgaacatcgtccacactgtgagcttcttctttgttaacctttggtctataaaagaagaatatttctcctctttcctgattaacaacaagtgacttagctcatcaagaaacagagagattacaactcggataatcaacaaagaacagcagagtaatgtaataaaacctgaatctcaacttgaggatctggtctcgtcttaacttctttaccttgtcccatcgttgcaaaattctcctaacttgaagaaaaatactgctcttttttaacacccaatttataaaagacttgtttttttggtctaacacatgacaacgtcagaacgttcccacgttgttctttactgtgagttacgtgtcgactaacatgtaattcttagtcaaatgttaaaattcttaagaaaatatataatttcacttttttcttcaacagaatgtgcattggaaattcatatttcctcgtatatatacatattgtttctttaacagaaaatacaaaacttttatacacaaatccgacttctctctaataaatcatagccacctttcttcttcagctcaaataagcaactgatttttttctatataaattgctcttggcttgctttctactcaagttatctcctgcaaatcaaatcttaaccatgagtgtttttctcaataaacttggtacttaaagatgaaacaagatagttgtatcttacccgcagattcctcaaaactatgggtttgatatagaagatcctgtattcgatattaaaggagcactcctaccttcctgtaatacccacaaaaacattaacatcatagagagatcacatccaatctgatgtcaatgtcttgccattaaaaactcttaccgatgtataagagacttgactaggatgcgaagatcgtccttgtccagcataatacacagaatcaagactctcttcaccaatctctctaagtctactaagctcaggcatcacttctttaccaagatcaggcctatcttttcttctcaactcagcacattgtagcgataacttggcaagagacaaagcttcctctaatggccaatctggtactgcaggatcaagcatatctttcaatgtcccttcttctatcgcttgttccacataataagccaaacccatcggctgttttgccgtcaaaagctgcaaaagcatgattcccagtgaataaacatctgatttcacacccaacattccggtttgttgatactctgggtctatgtaacaaaacgttcctgcagctgatgttactctgtactgggtcacgttttcagctaccgcggggacgagtcttgcaagcccgacatcgctaatcttgctgacgtaattgtggtcgagaagaacgtttcctggcttcaagtctctgtggacaattggctctggtttggtctggtggagaaacaagagtcccgtagcgatctcagcagcgattctgaaacgcaattgccatgaaatcggcggcgtgtttccgcgtctgaaaagacgatcatctaagcttcctctggccatgtattcgtagacgagaataccgtattctggacaagctcctaagagaagcaccatgtttggatgccttatgcagcttagtacttcaacctgatcgtcaaaactcatcaagttacaaatcatttcattcaacaacctttttcttgtaatacaagtaaacaatagtgaaaacagagtaaatggagaaaatttgtaaagaaagtgattttgtcacctctttgtgaaactgtgatcttccttgagcagcatcagggcgtaaaaccttaacagcaacacttgtgtgatcaagatgacctctaaacacaggcccataccctccttctccaacttttcttgactctgcgaagtttgctgtaccttcttcgatctcttgaacactatattttctgtatcgaacaatgctatgtcgagaaaatgaatcgctttctttcaataccttcatctctgcgtgtacccgtctctttgcttccacttcagcaagcctgtttgcagcttcagcagcttccaaggctgttttcgcttttgctctctcgttttccactattgacattgctgtttcctctgtcatctttagttcctccaatcgtctttcctcttctgtcctcagcttttgcagctctgtcgcctaaaccaaattttaaccaatttatgaatcaacctcttgagattaagaacaacatggagatatctatatatataataattacctcgttccttgcggttaaagcttctctgcaagctgagctatacatatccatagtttgtttcagctccaaacgcagtctcttcatttgagcttctacatcattctgcaacaaaacaaacattttcattgagtgtaacggaaaaaagaaatcggatttaagaccgataagtaagaaacatggtttaatttcaacttataccaagctctgagatgaaaatgaacaagaagttcttccactttcatcagaaaccgaagaagaaccattgagataactcaaatctgtaaacttgattcctaatctatgagacccaatgctctgctctgagctcgttgacattcttgaggttcttgctgattctggtaaatcgtaggtgaaggaagatcggtctacactcggccttccggagctgatgaaggaaaggtcggatgattcttgttgagaagcactgatgaatgagaactcggactctgaatctgaaaaatcccccattaatttcatatgtccatgtggcggtttcggaagccctaatctacaaaaatcaaaaccaagatttaggaaattgtagacgtaagagattctgaaattttcaatgctaactgaagaaaacctggtaacatctgaatcaatcgatcttcgtcccttaggcaaggccggtgtgttagctgttgaaaacaagggaggtggaagagttaagaatgtgtttgagatgcttgaaccgcaagcaacaaaatttcccctcaagatgaaaactctgacctgttttatgttttctctcaatggcaatagtttcatgatcgtctacttcgctgagaactgatggatggtagggagcaagacgcgaggcgtttcgtaaggaagagattttgcctttggaaatgacgtaaacattgcagaaatctggagctgcctttgacacactcgttggtaaatccgttttgaatctcctgttgattaatgatcataattgtaaaagaaaccctagttttggttaatacttcttccgcactcaacctatcaatgaaaaccctaatgagttttattacctcataaagctattccgtgatggagcaccaagaactaaattctcaatcgcagagaccgtaacatattcaacaatcgctttgactttgtctacgtcttcaagcacaacgtccagacaatgaatctgcatgcagatatgccacacaaaaaaagcttcaaaacttttgatatctagttaaccaaaagttaagttcattttaatttggtattataattacctctttgcggctgcaataacagtggaaggatacaaagagatctttcgtttgtttctccatttgctgcttatgtgttattccttcttcaatgtctgcatgaaacacacaaaagcgaaagacctaactgaaaactttgcgcaaaaatcattacgcaaaaaggaagcaataaatatgttaaactaaagagcaaaaaatcattgagaatgtggggtaatatcaaacctaaagaagattgagatttgggaaggacatgaataagagcaagagtctggccacgagtagcaagattctccaatgtccatttaatagcattttgactacttttgtctttgtctattgcaatcgccaccgaaccatttcttgttcctttctttgtcgcgtctgctttaggtagccacattgttgttcttcttcttcttctttctttttttttttttttttttttttttttctaaaggaataataaaagaaatggagaaatttccttacttttcattagttaagtatttggaggaaaattttcttaaatgttagataatgtaatgggtgagagattttctaatttcttttttatctgatggatactatttgaaggttccatatttggatgaaattctaatttcggaggccataactcaaaccacacatattaataagtttctttttggtagaaatttatctaaattctattaaatatgtggaaactagaagagtgttaaactagctaagatacaagaaatcatatttctttttacttcttctatacctttcaaaatggaaggtgcaacaacaaaaaaatgaatttctttatcagaaaaagaaaacaaatggttctgattggtgaccatttttgaggaaaataatgagtagaaatgtgatgttcctcaaattatcatttataagaacttttgtaaggaatattcaacagaatatatagagtaatatgggccggacctgaatgtttcattggtttaaaccgggtttgttgttctaacttagtatttttcaagaaatttatcttcttctactcttgtatgatggtcacaggaggctacttcataatgttatgtcctatgaatacttgatgtcatcctctctatcttgaaattttgtctccaagaaagtattttgtgtgatttaatgattgatgttagtgttgacatttgggattcttcctctatttaaactttagaggtgcaccatctttatcatctctttgttctctttaatgctttgtatcactcactcactttaacacaagcacaaagagaaccttaatctctcattctctcaagtctttggttaggttcttgttaaaacacaaagacataaaaaaagtttagtaagagagaagagagaaaacattaattgatcaacaaatactttttttttttttttattgatcatcaaataccttctatactttttcatgtagaagtaaatgataaatcacttcttttacatatttgacaccatttatcaatttatttatggttttatatgtttcgacaatagttcataaataaactgaaaaagaaccaaggaccacttagatcagtctttttttcatcttaatgatgctttcccttttttgtgtgtgtgttgaatttcagaaataccctttttgatcattttccaatcataaaaatttcgattggcaataatgactatttttcctgcaaaattatgaattaaagaagtaaatataattctatttcattaaacagtaaacatagattataaatttacgctccttttgtctttgagaccacaagaaacaaacccagtcgcaccagtagcgcgttttagcgcgtgagaccaaaacctgtggactatataacccacaatattgggctttttcgcataatttagaaagtgagatggccgagggcgcgtgataggccttctaacaacactcttaatattttttctttcctcgggcatttattttctgtagaaaagaaagaaaatcgcattcgttactttcgcatttcgatagaaaaggatacactttacaaacaacatttatttctacgctgacatttgataaatacttttggtttatcatttttttcttaatactatattctaaagaagtttctgcttcgtttttgttacgagcgacttgcaaatttctactaaattaatatttggattcacagaataattactttggctcgctccacttatctgaaaaaaactgtttccaaatgggatcattctcttttttcgactggagacaataatataactataaaaatgtaaacttgatttgtgtttatggactatagtacatgtagtgggaaggtgcttttatggagattcctcaactttgctaccattcttttttatatatttatttgtatattttttactttaattggtaagaacatttattgctgctcatttatgttatttggcttttaagccttcaagatcaatcatattttctgatatttatatcaaaaaagctatctcctttttatatatcccaacttccataacgtgaaaacaaacaatcaaacacacatcattatcattttttttttctttttaaaaaatcctaacaataataatcaaaaacttttgaatttactcgagtagttttaaagttttgtgggaagataaaggttgaagctttaatatttactctgtttttttgggtagaacaactcgtgcaatgggggtctgtgatgaaagtgacaaatagctaaatattttctcatgcatttattgagtctctctttggacccgatcccattcaactcatcttcacagatgtctcaagcagctctctctctttctctctctctctctcttctttctctgatcacaagggttatttgtctgaatctcattctattgagtcattattgacctctgcagagatccggacaaagttttgaaaccgaccacaagtccaagaatcatcgatcatacaacaatgtctggagactctctgctcacatctaaacagtaatgtttcattccttttctccagattcttttcttgtctggttattgattcttcaccctctctgtttcttcctaattcgtcactgttgtgttatgcagaggaggaggttctttgtccatatactcacaggttctgattcctccatgaagcatatttcattaacttgttactcaagctgtcaattcacttgaaacttactttcttctaactctgttttctctgaaaatcatagccaaagaatgttactaaagagttcaacggtcgtgattcccccaagaacagcaaattccaccattacagatttgagctcgagcacgatgtgagtttcgctcacctctcttttaaccatatagataaatctgtaaataattgttaaaaaagctcaagactcagttctggtctgacacaggtgaagcgattgaaaaatcaattgcagaaagagactgcaatgcgcgctcttttgctgaaagcttctgatcaaagccataagattgagctgtctcacgcatcttctcttcctcgcagtgtatgtttctccaatttgtctcaagttataagcttgccaatgttcagagatgtaagcttgaaccttacgaatgttcctaaaaacaaaccgtttgcaggttcaagaacttctcaccaatatagcagctatggaagctacggtctctaagctcgaacaagagatcatgtctctgcatttcttgctgattcaagaacgaaacgagagaaaacttgccgagtacaacctcacccattctctatctccacctgtatgttaattacattcttctgtatgtttaatatttgtctgctgctgcgagtggcactgactataaaatcgtttcccagaatgctttagatttggttagactttccgaaaagaatgaaagtctacgccctaaagaccacaaagcacaacctagaagcaaagtggcaaagtccttgcagagttttgacaatgctaatgaactatccaaggagatgatcagatgcatgagaaacatatttgtgtctctaggagagacatctgcaggatccaaatcctcacaagagactgccagtgtttcttctcgtgagaatcctccatcatcatcaacgtcatggtggtctccttcagaacactcacggatctccaggtgggcacagagtccacggatcgatattcagaagaactcagatgttttagccacagagagcgatgtgtttgatctttatacagtccaaggaaagctgagctgggctgacatcgggagttacagatctgcaactgaagtggcttcaatgtctgttgaggagaaaaggctcggatatgcttcagatgagttatggagattcaggtattaacacacagttcaagcaacttctgaagttatggtccttggaacttgacaaactcttatgtggtattttcaatacaggaacctcgttgaaagacttgccagagtaaatccagcagaactaagccacaacgagaagcttgccttctggatcaacatatacaatgccatgatcatgcatgtaataaagtctttggaatttctctaaacttagatttgcagatacaacaaaacttacaatttcctgattgtctgattcaggcatacttggcttacggcgtaccaaaaactgacttaaagctcttctccttgatgcaaaaggtttgatctccacacaaaaaaactacttaactcttcttggtttggttcggagagaggttagtataagtctctgatttggagattctatcaggctgcttatacagttggtggccattcatacaacgcagcaacgatcgaatacatgactttaaagatgagccctcctctgcatcgtcctcaaattgtactaaactcaccttctttattttctgcaatctcttcactttctactctataactcttacctaaaccgggatattcaggctctgcttctctccattctcaagctgaaagtatcagacgaacagagacaagcggggataagtacaccggaacctctagtgtcatttgctctcagctgcgggatgcactcatctcctgcggtaatatttccatatctatctgcattttacatcagattcttgaaccgatattgcaaatttctcacagaaattgcttgcaggtgagaatatactcagccgagaacgtaggagaagaacttgaagaagctcagaaagattatatccaggcgtcagtgggagtgagcccaaggggaaagttgattgtgccccaaatgcttcactgtttcgccaagaaatctgtcgatgactgcaaggttgctctgtggatttctcgtcatttgcctcctcgccaagctgcatttgttgagcagtgtattcacaggcgacaatggtggggttttctgggttcatctagtagcaaatgcggcatagttccttttgattcacggttccgatatttgtttcttccgtagcaaggcattgattcacaatgatgtgattaaagcaaatactgttccgatcctagggtttagatctatgattatttaggtgattcaatcttattttctcaaactaataaacaaataaatggatttagatctgctcaacgaaataaagaagacgaaatacattctctcaaattgcaaaagtatagtaatatcaccggggtacatgttattctgacaaataactaaatattccgtgttcataagaaggacaagattaaactaacttggtcctaactaggcattgatggatgaaatgtctactttccgagatgcttggaccacgttcttgtttccagggaacgacttgcgggagacatccacaagtgctttgaaactgtaaggttcatgcatagataactcagagaggactttgcggttcagctggatgttctccttcatcagtccatggatgaagttcccgtagttcacctgtttcaagttttagatgttaggattccaatcaaacatgtcatttccatcttattcaaaagaaacagagtattataatagcatatatttagcttgttacaaagctaaaacgaggtaaccgagttagaaaaatatgtttctctacttgaattaggaagtaatcattgtttcagttagatcaaaactattgacatgaaatgtgtttttcctctaatcaatccgaaatgattcacttctttaagcatatttgagtttcaaattaaacattcacatccaaaatctccattggataaatatctcaaactcagatattggaaagctccaaattgatcaaagatacaacagtaaaatctgaagaaaataagctaatctaaaatgcactttaattcaactattcaatctaattctttcgcttctagttataaccaacaagttttaactctatcactaggtagatgcaaacatagagtgccactgcataagaaaaatctctagaatacagcaaaaaagttaagactataatgtaatccatcaagttctgtttgaaacatcaaactagaacttgttatactagcaaccacagactctggagaaatcaagcacccaaatttaacaaaagaaaaccctaaatcccaagctccatcctaaaagaaactcatcatagattgcaaaaataaaccaaccaatatctcagaagttttatttataaactaatcatgatttatcgaatcaatgcaattagcagtgacgggaagcaaataggcaaaaatctaatcaatattggggggaaaacgtacaccgtgctgacgagaaccggcgttgatgcgctcgatccagagacctctcatctcacgtttcttgttgcgcctatctctgtaagagtactgcagagctttctcgactctttccctcgcaattcttatacaattcttagctcttcctctgaaacccttcgctagcttgaagatctccttcttgttcatcttttctctttattcttcttcctcctctatctattcttcgtccttctctcactaatactgtaactccatttccttcttctaacgccgcctctgtgtatcccccttctgtttcaattccgggtcgatcgggtcgggtcgtagacaaatccggtcacacaattattaaaaccaattctccatctactgggcctttattatataacatcacaaactaaacaaagcccactatcccatccagtaactcccgacagaggacacgtgttgccatgtcattaccacgtgtcacaagctttccaactctgcttcattttcccgggaaacaaacaaaaacagaaccattattacttttccggaaacagaatttaagtggctttgctctgttcttctcgacccatcacacagaaaaaaccaaaaaaagaaagaatttcaagttttcaactgtcaaaatcttgtagtagtaatggaaaatcatcaccgaatatccgccacaaaatacaacggcgaagcagtgtcggacgatgtgggccaggggaagctatattctccaaaccacgcgatcaaaatctctccagaatccgacgaaaacgtgggccaagggaacctctactctcctgaccacgcgatcaaaatcgcaacgaaccctgattccgtggattcctcatcagaggaagaagaaggagagaagcagaggaagacgatcatgttggggctgaagaatcttgcggcggttaaggataaagtgttagaaaaactatcggctgcttcggttccatctgagtcgcttgaaaacgctaaacagtttttggaaggagccattaaggatttcgccggagcggcgcagggtatgacgaaagacgcgttgcaccggattaaaactcagctcgctgttattgttccgtctgtttctcctgccgtcaccgaaaaggtttagttttaaaaacaattggtccaccgggtaaactaatttggactcttttttggctgacttgtgaatttacttttgacggagcagatagtggacgatgctgagaaagaagccattgacggagaggaagaagatgagagcaagtcaaaagaaagctccggaaagttgccgtttgtttctccgacatcttcgtttttcagctctctcgccaaacctttctccaagctttgatgggtttgtgtcgtacgccttcatgactatctgagataaataagacaaagtctgagatcttctgaagtttcaatgtttacttataatgaatgaagatactttttatgtttatcattcaaaatattatgagttttgtgtaatagaaaactgggtttcacaccctttttattatgttggtggccttggattgtttgtattagcacacaaattttaagttgaatataagaaataaatggtaatggacataaagagaccaaagagattcttgtatgtacaagttatacatgtacgtatgtatatatgcatgtaatgcgtatcagagcttgagatgtgtacaatatacaaaatggaatcaatgattcttcttctcatgtgttcttctcaagtacagataaagccggagtcagatagttgttcgccttgtctggcaaatgagccacctgaaagagacaaacactatcagatgatgtaatgatgtagatgtgactcttattgcaagtgattgtttactcttttaccagctcatagagttctattccttgctcagcaacgtattcatggcaaacctgtaaaaaccaaatggaagaaatttgagagatccatgatgtgatttcttctttatagatcaaagattgaatctttcttagttttggttcttgaaaagggtcaaagattgattctttctcagttgtttctctataaactgcaactcacatcaaagcttttgtttctggcggttgaatcgtgcagtgccttgacacatatatcagccacatccgcgcaactaatgccctgaaattgaaagaaaatagcgcattgggaagttataagtggctccatcagagaacttttgctaggtggcttgagtttgtttttcgtgattgaaataacctgagaaattctgtttccttgatcaaatatcagagctcgttgcccgcctggttcctcctatatcagaaaatatgtattcagagccatatatatacaatatggctggagctcaaagaacattaccttcaagggaccaggacgaatgattgtgtatccaaggcctgatctccttaaagaatcttcaccagcctaacaaatttagcggacatcaagagagaaggagatagagatgtgaaaagatggaacctactggcacaaaagccctgacaatccatagcctcgaaagattcaagagttattatgatgtgtaagacaaaatggacttaccctcttagctttcaacacttgctcccttctgttggcttctactcccgaaccagtacacgataccagaataaagtctgtttcttgacccgcctgcagacaaaaatgcaggaagctgatgatgtatctgttttttttttccgttctttcaggtgataatcttcagtaagtagacattaagttgggagtacttacaggcaaagcttttatgtactcaaatacaaggctaaaacttctcaaatcttgttgcgcaccagcaagtccatcaacaggcctctgaaagaggaaaaaccccaagagattgctaactcagacaccaacgaatgaaagttttcggttaatgatcacacagatcaatccgcaaaaccaactgctgaagctttgaaaagagtaagcaaacctgtcttttaggctcaaagcgtattgtcaatgtgtgaacaagaaatggatctagcggtggatcttctgggttgaccggtcgaaaagctgaaaatggcacccttacctgcccaaggaaccaaagttttagccaaaaaaataacggaaaaggggtcagactaatgagtaagaccgatgatgctttatatacccgacaaaaccctgctttggtactgatcctagcgaaatactgtttgctctgagacatatctgatgatggaccagcttcaaggattacaacataggatcttccattcccaccaacagaaagaactaagccttcgtacctattgatataaaagcataagcatataaaagaagctataaggctaaatgagtttcaggaggtgttagaaatttcatttaatactcctttctctaagtttctatcattgaatcatttcacagaacaagctgagagtaagttgatacgaaatcgcgcaatacctgtcaagagtggtacccaatggaagtgaaagtttcttcgacaactcaacatatcctcctcgggtgaaaacataacctgcatttgaaaactgattaaaccactatacctcaaaatatacatcaaaggaaaaaactttggcaattgccatattctccggaaagataatgtgtacctgaaaactcagctctctcagtttcagtgaactcaaacttagcatccatcccaccatcatatttggaagcggttgtgtcctgaaagtaagttccttgacgaatttcccaaccatcaagtgactcagctgacttgaacttagctaatagaagcttgcttttgctgcttttacccgcccttaattgcgctagtctgttattgtaatcctgcaaatactcaaaacgacacacatgaataaactactctctgctcaacaaaacaagaaaccaaattaaccacggttgagtcatggacaaatcttactatacctgaaaagccttggtgaggttataaacacccaagtgatcaacccgcgtaaggtctgcagtaatcgtagaccgagcagtcgcacagtagatgatcttgctgcagctttcaacagcggatttgagcgttgacggttcacccacatctccaacaacaatatccactgaccttggcaacatactcatcacttcctcatcttgtttcctcaccagtgcctaaacggtaacctcaaatctcttaaaactctaaagcatttgcataaacacaccaatactactttatattataaaaatcagcattttttgaaccttgacggtgtagccacggagcatgagtttacggacaacgatacgaccgattctactagtagctccgacgactaaaacggtaacgttttgagcgccgggaacagcaaactcacacataggtccttctctaatgagtagactatcaagagtctcttgctcatcgggtcgggttgtcctcgacatctgacctaatccagagaatttccgccacacctcgtcgaagatctgccgcgatcgtcgtcctaatcccacaggattcacatcgtccaacttcagtgtaggcggagacggtggtgattgaggcgaaggcggagcaacgtcgagcttcttcgcaaccgtctcttcgctctccttagtggttatggttccgggtcgggttttggtcttcttcttgtcggagggtggagatggagacggagaagaagaagattgagccctagggattacgatttgggagcgatcatggaatctgtgaattctggtgttgatgctgaaactgttgccaaaattcgagcttagaaacctcgcatcagtcgcagccatgttactgccaacaatactacccaccatttttgaactctgctacacaaacagagctcaaagacacaattttgaaaataaattttttggataaaattatactaaatgcatacaattgtttgttaaatgaatcttatttgcatgctagactgtcattgagaacactcttggtcgaaattgggaatggataacgaaagtgagatttttcaagtttttttttgtcgttaagagaaaatagagaagaataagaaatggttggatcggaggattttgacatttcggaaagaaggagagaagaagaagaccacagaatctggtttatgtgttttcggacagtgatatgacttatgagccaattaactagccacgtacactctctcttttcctcttcttttttttaaaaaaaaaaatatacttcttcaccttttttttttttggagaaacaaacaagaaaatttcattccaagttccaactatataataattccataaaatttcatatctgtatatttcaagcgttaaggaagctgcgttggcttctccttcctgcacgattctattggtgatgggaattggaagcaactgtgacccttattgcagcaatggtcacaaaggccaatgcaataacaaggattccaaagcaaatattagattatgaattatgacttggagctaacagcctaacaatagcatttgcattacaaaactacacaaatttagaaaaggtagcagtgtcgtgataacgtttaccttattaatccaaaacctaattcaatgaaacgatactaaaatgttaatacaagttcgcccaaaaatgtaagagaaggaaacatccttaaagagacacacttcatctttcttacttatctagcaagttatctatttatatgtatatatattacattcctgccacatcccccaaagggatataagctattttacaaattgtaccagactacaaaaaaaagacggagaggtagaagacagtaatcagtcacagagtaatatatgtatagtcaaagaatcaccagccagatcaagccactgaactaatcgaagagtctggaatctcatttcttccttttcgcgaccttacacacagcataagttagcatctacgacgattcttctgcttcaattggcacttaagctgagaaactcttcaagtcactcaagttattcatcatcatcactccacgacttgcgactgttaaataggaatccatctaaattaaatcgttatatggctgtttcatgtcttcactagctgctgttattcactttttcttcaccttcttcaagtggagatcataaacaccagtttcttttatcttcttaaccttcggaagaagattacatttccacttctgcttagatcctaaatgaaattagtatttacaaaaattaatcaacccgaggttccagcgacttctgcagctctctgtctcatcatctccatgacggcagctctccgcctagaatctgattgctgttgtaaccttctcagatgttcctttaggtccctgaattgagaagatttacaatgatcaatacaaatcatgcggaccatttttttcaaaaaagctttgccatatgttatgccccggttctaatatatccaaaaatgtcgtttttactttcaattttacgtttttacttgttgaaagaaaaggcaaatactgaatgatcccgttaagagatcgattgcaaaatgttagacagggacagaagttaaagagattacccgcatcgaggtacatcacactcggattccttgcaggcccgagcgtggagttgcaacagataccacattttcttgcatagaacacaacctcctgaagcacgtactttgcagcggagaccatgtcggaatagccccttcactttgcggcagttgggatatagacaaactggagaacggcattgcgacgcatgcaccagaagatcgagcattttcctgagctgcatattttagataaatgaaaactttagcacttcagatacattgtgggagctatatgacctaacaaagcccaattgttttctcaaatcagaagaagcctaaagcaagagaagaagaggcagttttttcaagaggatctaccatgcacaacaacaacaacaaaaaactgaatattacagtacctgcaagactcgcaattgcctagcttctttattctgagcgttttgatcagctagagatggatgagttgttaacttatgaggatgattaatacaaccctctttcttgtaacaagcattgcacacatcatagtctgggcaaacttcacagcgccagcctagaccactttcaatatcgaggtgacatacgttacatgttgtcacaaaggcaggagcagtaggattatgcagatgataaagcaccatcatggaagaatgttttgcccgcctcagtgtatcatactgataatggttcccttgacatagactcaggaatgcttgccttgtatcaaagaattcactttcaagtatctcatctctgtccttagtatccgtaggaatatcggcgatctcaacctacaatatcaaacacattatcttttgcgatacaataaaatagagaaacgcatgagactaagtgacagaacctcgtcacagttcctgacccaaaacaagccaatgcaacttacaggaaaaatattatgtttatctttctgattaacaggatgtctttctctgtcttctcgtttctgctcagcctcataacatctgaaaggtataaaaataacacaaagggttaccaataagtttcttccacaaagataaccacaaacgcttccaagttatacaaaccaattcacaataacaaaagcgccaaaacgagcggaaaaaaaaataaacaccagaagtgaaaggacaattcttacccatcacataactggaaatctttgcattggctgcaaacccaacgatttccagttaccatcagcgtacagcaatgtgtgcaactatgctgcaagtgaaccatgataaaatcctccttcattggatgaatggtctcaccaagctaaacacaaacagaaataatattaacacgaacacaaaggcaaaaaaaaaaaaaaaaacgaattacttaagctgatatgcaggaaaggactagtgcatagaaagaaatgactactttatgcattagtagcaggtctttggaagcattcccagagaaatccgactggccagatgctttaagagccctctttgtaatgggtttcttgagtattccttttttatttccctttctaccatcatcttcttgactcatttgggatatgatatcctctgctgcacctggccagtagtcaccatcgaagtacgggagtctagctgctgtaaccttagctctacattcaccagtttgcaagaaaaaatggtcatatagatttgtagtttccgcaacaattccttcctttgcagcttttctcaacattgctaagtacctgtgtagaccaggagcaaattggaggatgtaaaggattttcctacgaaaactgtatgaagaaaatcaccaaagacaattagactgaccattcccgtagtttatcagactttggtgttttctgaatttctggatggcaatataggatataatcctcacccttcagtggtggacaagcccatatgtagcagctcgtgaaaccacgcaatttgcagtattccagataaccaatctgaaaaagcatcagggtataatacccttgaatcatccatgtaatgtagaagaccacataaacctaggttgaaaaaccagaacttacaagaatttcgtggtaaacgaaagtgcgcagagcctccccattagcagacttgatatcaggtctaaagtacttcacagaatccaaatacgagagataaacacggcgttgattgggatttgaacattcggatccaaattcttggacatacatcccaaacaagcatacttctacaccttctatcttctggaacagcagaaccacctgataaataaaatgtggagcacgaacgatattactacaagagaggaatcctgaaaatattaaatgtggacatgaagcaaatacaatgatggtgtgcgtcgatcattcttaccttggacttgtatggaaattctgtcggaaaattatcctcccgaaaaatttcaagaaatcgagatttaacttctagcttcttgtcaacagatgaaacaactctaaccacaagggattcaacagttggaatctgttagtgccagtaaaagaaaaattaaacaatcagtgaccaaccagtaagcttcaatctattgtttccagtgaagtagcacttcaacaaacaatagaagataggactcaatgcaaaatcacatgagactttaaaaccctgtattccaccgccagattacctcatcataacttgttccttgaaccctggctctctcagtcctttcctgcttcagccttttaaacaaccgctgctctatatggtcactgagaattgttcttggcagatctttcgctccaagaacagcactctgaagtaaaggctttctctcattttgctccacatcaattacatagcaatatgggcaggtatactcagcttgccccccatcattcctccgcccattaaatagagcacatatttgatgctgccaggcctgacatttatcacattggacccactacaaaaaacatcaaacgaaatagacaaactcagaaaaaccaacaaaacgagatgcaaatgacaatacaactctactgataggatagtcttaccgattcttcaatctcttcatcgtttttctttttctcgagttttgcctttggcatggaagtcccttcagcgagaatagtgtctcctcgggattcattataacagggaatacaaaagtaatgacgagtttcaccacctccaacagtatagtacatcgcattccttttgatacgagcaccacaaggagtacaataaataggtggtggctcaaatgtaagcttctccaccgcacataactggcaggaattctcactcattgaattctccattgcctgattcttttctgctttggctttactctgcacacacattaaaatttaaatgacaaggtattcatcaatgatcacatagctagagattcatcttagatatatgaatagacttgcttctctgtaaactttttgtaaataaaatagcaaacctggccaacccactgacgaagaccacggatatgttctctcacttgttccggagtaaacaattcagttaaagaaacaccctttatctttggttttctagattttgaggtaagttcaggagactccaccagttcttctttctttggacatccaggctctttcttcggccatccaggctctttcttcattttgatgttttcttgctttggcgagtcaccagataaaccatgtttacctggttcactgacaggcttaggcttgggaacattttcaaaaggttcacttttcgtttctttgatgccgaatcctgcttgaacagaattatcaggaatttccactttcacttccatggtctctgacttcaatggcctatgatcctttctttcagcatcctgagataagtctgcctctgttgtagaaacaatggagcttttacaactttcagtcttagggaccactggttgaaaagattgctccaccttcaaccgctttaatgaaggttgcaaattatctaaagtatcagcacaacgaggggtaccagaaaccgctccagcattagcgcttagtgaatcatttgatactacagatctattcactgagcccacagcactgctttcgttttttaaacgggccagggcacgaacattagcttgttgctgataagtcttcactggcacacagacggggcaccgaggatccttgcagtttttatagtggccaatcaatgcctttgtgtgacgacagcggggatacaaacactgaggatcagcacaattgtccatgtgactccatagtttctgaactgttacgcaattttgatcttggcatctccctcctggcggtttgcaactccgtgcatgacgtagaaacagtagccatctttgttgatttttgaacttgggatcgtgacttacgtttccatatctacatgtggtaccaatagaattttgcagattatgggattccgatatagtagaagtatgattttgaccaataacagacccttcagtcaaattattaggttgagcttcatccattccggtaattctttgacggaaatcctcctgaatgtgctttccacttgaaatagcattagacattagagtattttcctgagacttggaaggccattgaccctgtggactggattctgattttactccaacagcaagattgctaaaactgttactagaatcagaacctatattctgcgggtgcatcatttgctgaatctgctggctattttgggggagtgatgtacatatatcactctgactttcgactgggagaagctgagcgtctgcttggcagtcttctccagagttctgatattgattctggagctgagaaagctggaatcgttcagatgcttgggactgtggagcctgactcttgttctccattccaggttcacatttcaccttcgtaaccatgtctgaatccacttgagttttccccaagccatcattgcttattaatctatgttgctgcggagtctgctgcttcaatttcctctgattgagaaattgctgctgctgctgttgaatctgatttggttgttgctgaaatcgattaggcggttgctgaaattgttgttgatgtgactgcagataatgaggaaagaagattgaaagtctaaatactcaaagtgacaagtgtttaattggtctacattgttgcatgcaaagtaaaattgactgattgctcaccagagaagagttaactctggacacaggctggaaacttgctgtattgatattatgagcctttgtccctgtcccagccgatgttatagctccatcgaaggggtcaggatttgttgtgctataaccttcccctgaaatatgaaacgtgctttcaatatgctgacctgaaatgagatcatccggacagaaggaaagaagagagaagttaccctgctgtaattttttggacgcattggtgtaagatgaacctgagtctacaattttttcgttcgctccaacatcaccatttacagagctgttggccgcacccgacggctttgattgcatgtcgggtctaacgccagcagccatatggttggacaacatgtgactgttttgaccaccagtatgttgcctttgttgttgttgctgagactgaggaacaattgtgggctcagcagaaaatccaccactgttgttgttagtaacactgttaacgaagccaggtgtaggaatcatttgggctgtacttctttgagcacccatggatgtcatgctccctccagaaccaagagaaaagtttctcgacgagtgctgatatccattagacatattacctgcaaaaagaagattttaaggtgtcagagaaacaagagataaaaatttccaggaaaagtatctatgatcactttaacgaaagaacctccatgcatgccaccagcaattagagggtttccagtgttcaaagcagtgcttgtgatgttggtgttgccaactatagtagcatcaacagaggatgtaaccatcaaattaggattacccgcagtctgtgataatcctggagtaggtatcatcgttccaactgaagaagaattagcatgtcgctgattgtagttatttatctgtcttccttttattaggcttgtaatacgagattcaagggttgaccggttcatgtaatcctcctgtagtacacagccaacatgtaaaaaaaaatctatgctaagtaccaatcaagtatttttcctttagacacacaaaaatatttatacctttgtgacagccatcttaaacagcccttcttctaaacgtctagcaacatccatatactttgcctttgatgcagcatcagctggagatggttgccgttgctgtaacatgttaaacctggaaagaatgaaagaacaagaagggcagttagaaatagtcccctatgcagtaaccatcaagacatctcagaaagcagaaacactaagttcttaagaaatgaagcagatatgccgtaatgcagccaaaggagtaatacgttggtccattccccgcccacattgaaacaacattaactcaatccataacacagaggcaactaacaagcaagcagtgctatagctgaaattgaaggcttacacaagagtttgcatgtactgtcgaagtttcataatatcatgatccatggcaccaacgatgttacgtgaaggccttacaccagtaccagaaccagtagcagcaccagcaccagtaacagcagtagcagcaccattactaccaactaaattctgcatttgagagtttccattattctgcggcactgtcccttggtttggaacctgcccagaccgttgaccagacatgtgagcctgaacattcatgttatctcttaaatcttcgtcgtcgtctcctaattcgtcttgcaactaacactaacaggcactgcataactcttctgtccccgagaagccaaaagatcgaaagttcatctcctgctctttattattcttacaagtgatctcagtgtagcagctcaatacacctagcaccgtcaagtgtcctgcaaaataatattccacactttcaattgaagtgacatgattgcaattcagtcgaactagaatcatagactatgatcaaagcaactaaaacccaatagcaaaaccaacaaaattgtaaacaattacgaaacagacaacaggaggagcaataaccttgaaattgactcacaaagaaacaaacttcagccgcaaagagcaaaacccagcaaaaaaaatcttccccaaaaacgttactaaagattacgatgatcgaatcttgaaaacgaagtagaacggagcaataaagtcgctgaacagccgatgtcgcacgtgtgaactcacacaagccaggataaaaaataggatcaaacacaagtacgtagacaaatcccagaacgagattcctccaaaacctagacgacgaggaaattgaaatatcgacaaattatttcgaaatcagagaagtctgaattcttcgatttggggattttgatttattttttttggctatttagggatttttggttttgattttgtaagtaacaaaagacacattaaataacacttaccttatgttacttatgtctgaatacgaatcatcaaggaacctctgtcaaagttaattgggggaaccaaggtcgacaatccaacagccaaggagaagtgtcggagatacatgcgctcctatccgtccgatcaaatgttccagtaatttaaatcttcacacccttgtagtttttgctctgtttactttcgcaactacttttttttctgtaccgattaccaagagtaactaataataaaccattcaaattcatacatgttccaagtctaaccggaaacaaatcataaccggttttaccattcctactttagatcttacaattagcaatacagtagcaatggagaaggcagaagcgttagtattgtatatgttatcatcttttccttgtaacataagcaatgaaaacgtttccaaacaagtcgtaaaaagaactttctgataatcttcatggctcaaggctcactgacttcagattctcagcaatctctgtctcgcactgatctctgttctcattatcctgctccaaaccaaaaaaatttggaacatcacaaagttcagaatgtttataatattacatttcgaattatacgcctcttaattaaagctcgtgaataattcgatgtatgtaatgtaccattgtgggttcagcagagactcctggagtaggtgttatggttgttccaagcgtagaagaatcagcatgttggtgcttgtacttattcaattgcctgccttttattaagcttgtcaagcgagattcaagagttgacgggttcaagtattcctcctgtgagttttgaagttaaaagtgtcagaaacgaaaatatttataagggaggacatatagcaaacaagctggattcagtgacaacatgtcagaaggcatcaaccagtcttgtttagttagaacttagaaattctcagtaaatcaaatcctaaatgcttataactaatcaagtaaatataattgatgtacctttgtcatagccattttaaaaagtccttcctctaagcgtttagcagcatctaaatgcttcccctttgatgcatcatcattcggaagtgggtttcgcttctctaactggacgaagctggaaagattggatgatcagttaatttgaaacgtttcctcaaatgaggtaacaacccatcaagaaaccctctagtgtggttcggagatatacacgcagagaggaaaacaactatgaacaccaatgtgacaagactggaatccaaataagtaacatttcagtagtagaaacactaatagatgatattgtttcttaagaaacaaagcagaaatacatgatcacagagccaaaaagcagtaataagttagatcattcccactttcccagacacattaactcaatccgtagtacagcagcaactaacagagaaaaggaaaagagtgcaagaggaacgagtgaatgtgaaaaattgaaggcttacatagcgtctcgcatggaccggcgaatctggaaaacatcattgtccatgggagcaagtgtaacgtgaaatccctaaagcaacaccaattaaccagcataatcataatcagtagtaaaaccaagcataagcaaagaaagaagatacatctaaacctcagatgataaaacctaggacttcaatccaactttaaaatttgatacacaaagaaagaagcaatcttccaccgcaaagatcagagcctagtgaggaagattcttccttacgagatcaagaaaacgtaacctatgattacgatgaagaaacaatgtcgcacgtctaaactcacgcaagccaggaggataagtaaaatgagaaatctctgaaagagatcttgaaaccgagaagtaaaagaagatgagaaagcgaatttaagacgaaattccaaatagagtaagttcctgagctggagtttctgccaatcagaggtttttactagatatgcaattatgcatgttcatgccagtctattaaactaccattttacccttgtatttctctgtattttacatcattaatgttctcttcagatattagcaattttttgttagacacttgaccgaccgacactgagagtaacaacaccattgaatcatatcataatccatttaccgcacggtccagctcaaaccggaaacaaagccaaatttgattttgccatcggtatgaactcaagaaatacagatagcaataacagtgcaaaggctgaagcatctttatttgtaacagaagcaaacgaaaacgtttccttaagaattaggcaaaaggcattttcggatcaatattcagcggtagaggctctccgacctcagattctctgcaatctctgtctcccacctatctccattctcaagaagcttctctttgtcatacagaagttcctgcacaccaaaaagaatcagaatgtcatttatcgaataatacacatctaactttaagatcatgggcaatcttatgtctttctgaattgtttatacagacctcatgtgtctcggttgcaaactcaaagtttggtccttccacgattgcatcaacagggcaagcttcttggcagaaaccacaatagatgcatttcgtcatgtcgatatcatacctgtacagctccgaacaatcactacactacgaaatatatagaagaaccatagagacaagacagtattaaataatatatatatggttaataaacgggaacttagagggtgacctagtggttctgcggcttccatcttcccgctcctctgcctctattgtgattgcttgagctggacatacctgatgagcaaaagaccagtatccatgaaaaatcacactttatgtcaatattgtgctgtggtatgaattctcgagtagcatagacttcaaaaactcacagcttcgcagagtttgcaggcaatgcagcgttcttccccagttggataccttcgaagagcgtgttcaccacggaaacgagggctcaatggacccttctcaaaaggataattgatctgcacaaaagataaaacttgagaatcagaatatttttctttcagcctaattactagagtcaagggagacagccactcactgtaacttttggatcaaagaagtacttgagggtcagtgacaaacccctgaccatttcagtgagaaatagggtgttcatgctccgttcaaagactgtaaaagtaagaaacatcaggaatcgctaagactcgcagaaggaagtaatcaggaaggaatgctaagagaatagaaaggttgaaaagtgtctggatcaaatagcttaccagtactccagtccttggagatctctttagcaagctgctcagcttcttcatcatctacatattaccagaggcaaaggattagtaacctatattcctgaaaagtcatagcctaaattaaccaagagaacccaaatggaagcaacaaaatttatacctttgttgcttccataagatatagcacgggactgtagcccacagagatgagatccctgtaaaccttgccctgaaaaagcctatcaacaaagacaaggtagatgttaaatgcgagaagaattc

SEQ ID NO: 1125 - DNA, 93677 bp, Arabidopsis thaliana
gaattctctcacacatgcgaagtataaattgtcagattggtgatgggagtcaggaagatgctcatgagttcttaaggtttttcttcatagtccttcaagatatctgtgtatcctttctacataatgtgattatatctctccgtctatgttgaaatctcatgaaattacgatattcttttgacttaaatgtaggcttttggttgcctctatgcaatccatatgtttggagagacttggaggtgagactaaagtggatccgagactgcaagaaacaaccttagttcaacatatgtttggtggacgtctccgctcaaaggtgttttaatctcctagctcatgatctatctctactttgactttacacattctcattgtttctgctcccgtctttctctggaaaaccaggttaaatgcctgaggtgtgatcatgaatcagaaagatacgagaatataatggatctcacattagagatatacggttgggtagaatctcttcaagatgccttgactcagtttactagaccggaagatctcgacggagaaaacatgtatagatgcagcaggttagatccaaaaaccaaattacttgtccttttgtggtattgaaacaagactgtaatattgtgaaaatgtgtttaaaaaggtgcgctggatatgttagagcgaggaaagaattgagcattcatgaagcaccaaacattctcacaattgttcttaagcgattccaggtatcaattacttttaaagatgactcgaaatattactcttgggttgttgttgtctttagaaaaaaaattgaaaatacttttaaaacttttgtgtatgcaggaaggaagatacgggaaaataaacaaatgtataagttttcctgaaatgctagacatgattcctttcatgacaagaaccggagacgttcctccgctttatatgctttacgccgtcatagttcacttggatactctcaacgcatctttctcgggtcactacatttcgtatgtcaaagatttgagagggaattggtacagaatcgatgattcagaggtaaactagtttcatcctcctcttccattatgcgacaagccaaacggtttatgaacatatgcaaatttcttttttctgcagattcatccagtgccaatgactcaagttatgtcagaaggagcttacatgttgttctacatgaggtaagaaaataaaataccggtttggaacttataatggttttttctgcattccgaggtcatggattcttaaaatacattttttgcagatcgtatccacgtcctcaaagaggagagcacaatggaaaagctccggttcaccattcgcaaccaagaaacgagatgaaggaacagaggaaacctgttaaccgcttcaaaccgagagcggatcacaagaacacagagtcatcatcaagcgaatggtctctcttcacaagctcagacgaggcttctttcaccacagaatcaaccagagactctttcagcaccatagactacacagatgtttgccacgtcgtagactcttcttctcctttcgccatcttcaacaacgtataccacaacgtagagccatcgccacacaacactgtcgcttgcagaatgttctcaggtaccaaacccgaaacccggtatttcgtggagcaagaaacaaatcacaacaacacggtcgtgctggacgcaacaccatcactatatcctattccagcaccgtatccgccccatgattattacgatcagagtatgtatgtaaattacgagactaacccagaatttaacaatggtcaggatcaggatagaacttacagttactggtagtaagtagaagagactagagaggattctgtttttgaacctccctgatttttattaaatatgtttagagatctctttagggatacttaactcgagtgccctgagattttttttttgtctttagtcatctgtttctttggtatcagggcaaattgttcaatctcatttcatcaaattcccctgtttctgcaaaatttgtatcagaaaaaaggtttgcactttacagattaacctcttattttattcaaatgtatagaaaaagggttcactaagcagagcttaaacatcgagctcgaacggtaaccaaatctcattgacccgaccggagaactcgaagggtgagttatactgagcgaccgtgtaagctgaatccgacccaacaccaccgtcttctttgcttttcgctattgcattagcccaagccgtacctttgaggctcgagtctagcgccgccgcttgttctcctatgctatcatcagacacgaatccactgaattgtctcacggccacgtacctagagttccatttctgaatgtggagattctccgacggagctggatcaggctggttctttttaggaacgtagaatgatacagtgaaggaagattcacagaatggaccgtcgcttggtgagacttgagagataaccggagcagtcatttctatcttctgatgatactcgttcttcccctgaatgtatgcaaacaatctgataccaaaattttcaatctttatccgaacaaaagcctcattttaaaagataaaactggaaatttgcacttactggaagaaagcggttctggtagcatcaacgagagagatatctggaatcggttcagtggaaacccagacggtgttgttgtaccggcgaatttcgtatccatttccggagtgaaccagctcgtagctcgggcattcgattctgttacacgacggcgggaacttcccaatttgggcgactccggattcggcatcgggacctaataggtctgatccaccggagaggaggctaaggaggaaggagagcttaaagaagcctaaaccggtggccatggcggttttatctaggtagcttacttctttctttgtttacgcggccttttaccggtaatatagattatttgttacgtgtgaatgtgtggttcatcttcggataggttttgtgtgtgtgtaaaaaagtttcgacctttttgtcatttttttgttcttgtatatgtgtgtgcctatgaaccgtttgtcatgagttctgagtttgaaattgccacgggtacacacatttaagaaccagaagaaaaaataatatttgtaatgaaccaaactaaatggtgattatgttatataaaatcaccctacatggatcaaatcataataaatgaaactgtagggatcattttgtaataaatagttaggaatatgtctgacaacaaaactattttgaacagttgtaaataaagaaatacacactccacccgacccgaaatggtccgggtcggaaactgattatgtacctttgttaacaacaaaactaattacccaagtcaaaaggaattctcgaaactgccccaggtcatcatcatatcatcctctctgttgaaaaatgcccatcaagtgttcgacgaaatggctgaaaggaaattttggcttcttcgacgagttttgacattcgggtatatctgttctttatgagttaaagcaactttgtcattttttaatttatctttgggatcttttcgtgttttacttttctcgaaggatttctgtttcaatatctaactttttatgcatgagtttaaaagagatgattttttcaagcttttgaaatttttattgtttagctcaatttgggattatgatgaaacagtagtggctgaatatgagactaactactgcccagctattagctgcaggtggttctctgtttcaacatgatctctctgccttactcatctgaattctctttttctgcattgttttttttttggtattttgtagaacttatttgacatgttcttgtatcatcatcttgccatgtttttaaaaaagagttgacttggttgatcaaatgtcaattgtgtgttgatgcaaagatgtctttaaaacaatattataggtttcttgttgtacgaattgggaaaaatatattagtgtttttgtattctatattttgttgttcatggcttttaaatttgatagctgtcttcaacaaattgttctttataatccttagtatttctagattgcataatgcaagtagtcaatgataagttgtgagcttattgtgataaattatttatgaattagataagtcgaagaacaagtctagtttactaattcggattgccacaaactatgtctttttaaatgaagttttgtacgtagtaaggcctctttgatgtttacttcaaaccaagaaaccttcaaatccttaatagattattatccacactcaagctacatattgaatgctaacatcagataatctttataaacaaatggttttttgtcatacttcagatttaaatcgcaaaccctgaacctttcactgatatagacaggtggtgatggtctcttcagatgctattgcgactctctgattgaaaatgtgcaggtaaaatcaaatactctgcaatactaattaacgcaattcatatataagagaagatgatctctccctttcatattatgttgcttattatttgaagttgtttagaatttagtaatatgtacttttttagcaaaacataatatctttatttatatgaatttggtgggaaaagaaagaaagagacaaatgcttttgtcatgcttgccacctttatctgttgaaaaatcttctccaccgcagacccaaaaaaataatattgttttctttatcctttttgtttgcttcttataagagattgttgttgtaagctcaccaaacattcagatttgagctttcttcttatatatctgtgtaggggaccagagaatcaaatcacttttcaagtgaataatacttttgatttctccatttgaacgattctggtttttgttgtaaaccaacaaccatcatgctcagtttccaagaagaatggatgcttacaattgtatcgtcgtgatcttctgcatctccttgtttgcaatcaatttagtgttttcttgtttcacttgcttctccattcttcagagctccatgaaagatgaaaaccaggatttcagtgatctcaggaagaatcttattgaaccagaggaagctaaaccagatgagaaggtaatgatcattacagtctctagtaaccaagaattatctgactccactgatgatgatgatggtggccaagattgctctcatgaggatatttgtgcttgttgaaacaaaggttggcttctatttccattacacaattctcctcttgcttttgcaattttgtcttatgatcattcctacttgtaaatggttaaatccatagatcgagagtatccatcttatgcggaatccagatttttgtttttgtttcatgtgtatcatatgaaagaaattatacagtctgcaaaaagcatatgtaaattgaatggtggtggtgcacaaatttgtggaaagttcaaagttatattgtttaatttgtggtgcatatatttcttgattaagtttaattttcaaggtttacgtttctttggaggctgagaattaaaggctgcctctacttagcgtgaaagaagaagagaaaaaaattccactcaaagaaagtaataaaaagtttaacaacgatgttgttagttgacaaaagtgacaattaaaaaacttgaaatagatatttaaaattaaaaacaaggacaacgaaatgcttatagtgacagactactgataaaattctctgttctgtattatagtttccattgcctaattgtataaaaatgattgaagatgataaatcatattcatggatgataaagaacattagttaatttcataatcatttccaagaactcgaagcttcgacggatgcatttaatatttattataccctaaccacatgtttcttcataaattatattttcaaaactttcttattagtatgaatagcaatcgtattaatgtcaaacattgcagtcggtttgtaaaagcatataataataactccgggccaattttcggaaatacgcgttatctggggtctgacagcaaataattaaaagtgttttaaccaaaaaaaaaaaaaaaagagacttcttcttcaaattgattcaacgcttcaatctcgattgaatcagaaagagcgatcagatcacggagaaagagatgggtcacggagaagaagataaaagcaaaggatttgcttcggaagaaggtaaccagcatcatcaatacggtacctttcaaggtgtttccaattaccctccgccgcagaattctgctccggtcactgggtttcctcaaccttctgcgccacctggcgtttacgattctggagctccttattacgctcatggatatcaaactgttccaggtagcttcacttcctgtattggatattctgatttcatattttagcagatttgggaatttaggttgaactgttgtaaaattaatagtgatcattcattgtcttcataagattctaatttgattacgggatcgtgtttgtttagctatagaaacaagttttggggttgttctttgttttaatcaaaatgttataacaagctttgatgagaattataaagtttggagagctttgattacttctaggaacagctcagttaattagttaggttgtattggtttgtgctatggaaaatttgtaaggcttatgtagtgtctcattttctcttcttcttcttgttcaaatccaagtcaagagcataaatagatgtgtgttcaaccgttcttatgtttactctttcttgattgttgtatttttcagtccatggtggtgttgctgaaggaagacctgtcagacaacgtcgccttccttgctgtggaattggtcttggatggttcctgtaagttcatttctacttcaaacacgagcttagtattttctgaatctccctctctcttcacatgcctgagaaaatatttggtcttgtggaaggttcattgttggatttttccttggagcaatcccttggtatgtcggattgttcatcatgatgtttggaaggagaatcgattacagggagaaaccaggatacattgcctgcactatcgctgtaatatttcttctactctctgtccttatcttctctcgtttttccttatatcccattggactcccgacaaattaaattaaattgattcatgtctaaacgttgcaggctattctagcaacaatcgctgtgattctgggtgtatctaaaggagcagacgactggtgatggatcaatcatcttgtggggttactctaaaaatgtttgtataggtttctttatcgtgtgttgtattatctacttccttttttacttactctatgaagaaacaagaaaaaaaaaagtgtaaacttcacaagaattatttgagttttgttatctaaataagaagaagtcaaagatatgaaatttaagacagagagacaaaatgtgatgagattgaagatggtttttacatcaggaaacttacaaaatgaaatgaaactatctttttgcagaaacagttgtattgttgtgcatcctcaataagtcatcaggggttacaagaaaccaaccgccatctttctgagccaacagcttctggttcactgagtctataatgacactcacattcccaaacccatatatctgaagaccattgtgcattctattcggtttaggtttgaacagcaactcctgctcttgcgcaaatacttccaagacttctttcaaactcaacacttcagtgctatccatctgagccttggcctgagcttgagcctgagccggcacggactgtgtacgctcatttgcctttgctcttggctgagacacttcaactccttcaacagcttccatcaacatatctaaaccacgctttaactgaattcggatcctctcatttgctgtaagctcttgcgggaataactctttccaaccataataccatccctggatctcttcgaaccttggtttagcacgcaaccaatggtacaacacatccagccatttggggaagaagaacctctccatcatatcagccattagatgtatgggtactgcagatgcccacttcataacccaatcaaaccgttctaaattctggtttgccgggtttacctgaaactcttgcaaagccagctgaagtttcggaactatgtaacgtcgcataagctgttcccagcttgtagtatcaaaaacggtcttccatggtgaaagaatagtgtaggcagatgaatcactgggatgccaagcatcaagaacattactcaatttcatctgaatgatctgataaagaaactccaacttctgaccaagtataggcaaccaaggatgcacccaaacatggatggcaacaagttcccttcgtggatcccaatattcaacagcagttgacaactttggtagcactactgtgtccaaaatcgtttgcaatacagatgaaggcagcaaagtttcccatgtctctaaaaatctaagcatcggctcagggtctctgggttcccaggtattaatgcctgctattcgaacagcaggtaacactacctccgagactagttggctataaggcgttgagactacccagatattatgatcttcctcgacttccaaaagctttctccaagaagatatagccttgagaccatgcactgcatcactaagagggtcccaaccctgaaacattctgataaagagaggcaaggccagtgagcaagcaatggtggacaagctacaaagcttataatcatcaggatagcttgtttgcaggtcctcgaaacgaatagcaagtgagtccagcgtcaaattcccagatgtattctcaagctcgattcgacttatttcatctgcgatatattccatgttttccaagtgtcttttttgtttctcttcctcatttataagcatctccttctcctgctgtaagctcaaggctgattctctctcgttcctcaagtccctatcaatcttttgaatttcatgctcaactagatcaacaatcaagcgcaagttgtgttgcaactccggcattggaacatctgcttcttttgctttctcctctgcatctaaattttccaaatttgtcacaacccgaacttgtggtcctcgcatatcaataatggtctgcccaccaccaaaccccgcttcctgcttcttttccaacaactcctctgcagtgacataaactgccttcctcaccttcttctttttccaaagatttttccctcctctatcaccatggctctgttcattctcactgacactgactccaataatcttcttctcttcaaccttctttaaatcgggtaactttgcctccttgaaatcattataccccatacccatattcttcggcctcaactgcgcttcaataggagctacaataccttgctggttcttcccaagcccacctcccttgtaccccatcttttcaagcagcttcataccaattcctttagtagacttctcaaactgacctatatcactgcctaaagtattcttctttcctccctttgcaccaccaccctcttgacctctcttctccacctttgccttccctctcatctttgcccgatcagctatcttcttccccaatgcacccggtaaaagattgtcctcatcatcaaaaccattcgcattaaaccctaaccctaaacctgagctaccaatacccaatccacctctaacttcaacatcctcatcaatcatatcattatcttcgattttatccctatctttctcatcattatgttctctagaatccttatcaatctcttgattcggcataaccgtacctgtagatacaaaattgacaggcttggttaagtctgctttccttcccgaatcacgatccttacgcctcttcctacgactgccgccgccgccagaatcatcggaatccgaatcgctctcagcgaagattccataagtagcgtcgtttttggtttgtttccgtttctccttcctcttctggtatacgaactcgtcaccttcccatcgacctccttcgtagtcattatccatactgaatctctccatatcttgatactcatccatggcgaagaaactagatctgaaactctgcgaattttccaaactatcggaggtttttggatttacgactgcaaatcgccgacgtcgccgtgtataatcggagggaaaggattaaccgacttgggctttataaataataaaggcccatttatttttgaattatagcccatttatttgtaaacttggctataacaatcagtcacctcatcttcttcattttggactcttggccaaccttatgtcgttttatcgcatctgttacaataaaacgcaaaaggtgatttttttttcaggtaaaaactatgagtttcgttatctaaccataactcaatagatactacgataactaaactaattaaaagggataaaataaacaaaaacacagttttggaaaagaaaacaaaatagaacccaccaaaacagatatagtaggttagaagtataacttataaggttaaccaaattgctcattataaccaaaaacaaaaaattgtgaacccaaaaattacgttaagaaaacgtagattccattatatcatggagttttgagtcttcaatccacatactttcgaaagtaacaaatttttccattaattctactaagatttttagggtgttgtttttgatgttttaagtttttcttattttttgtcttaatttctcctcctcctatctctcttattccaatttcataattatatatttttgcatgactagattattagaaaaaattgtttctgttttatgttatatataattaatctttctctttctgataaaatcataaaagtcaataattttttggtttaaacagtaatataaagtcatgagattttaggaacactttgttttctctaactaaccaacttttcattttgcaacatagaatagaagcattaatatattctttctggaataaatacaacaaaatccccttatttcttgtacaaatcgcataaatatgggatttgaagagtacaacaacacataaagaaacgtcccacctttttagatgttataacaaagaaaagtcggttgtatgactcggacttttctagttggtttttcaaaaatgttacgtaggttttgacgtcatatctcattatttgaaactattttccttggaatggttcactaatagctaaatgtaccattcttgttacattttttaaattagcagctaaaagtgtatacaaacttttatatatgtcgtcatttaattgcacacattggttatacaatgcaaattatttccttaaccatgtctagacttttttacttctatcaatttaattatatacttttcgtatctttatgtacataaaataagtttcaggtagtaatatcagcaaaaaataaggacttaaatgaatacgtctgataaataacttacgggatatgttatagcttcgcgacaaaaaaaaaatcctcgaagcctatagtctattaattacttgttgaacaaaacaattagtacgtactagctaatgaaataagcttacgttacaaattagtataataataaaccaacaacgcccgtagccgttaggtctattttgtcctaggtggaaaatttagtaaatgcctaatgaccctagtctacgcgtaattgcatttatatgaattattaaacttcaaaattaattgatatggttggacgaacattatcttatgaattattattatatcatatatcacatgcgtttcgcaagagagttgacattgctattcatcgtctccaaagaacaacgccacctggttccatatttattgtccccaatttaaatttaatttaatcgtgatcattgtcttagttacataaatgttaaggttgatttcgagttatacgtcaattattcaatggaaacttgtttaattatataagttgagacgaactctcctttctctacctgtttaaagataactacgatacgaagacgcaaacaaaaaaatgcgtaagaaagtaattatggaagcatcatgatcagcatatacgtactagtagatatatgtatatataaaaagataaaatactaaatactctcatgcaataaagccacatgcatgtagcgtaagggaaggaagacaaaattaaatttttggaaataaacaccaaagaacttgttgttataaattcattgccagttgcacatacagcgatttattacatatatatcccctctctctctctctctatagtctctctataaacaagttttttatcacatttcttttctacagtattttctctattcacgcatatatatagatatccagctgcctccaacatatatagtcaactgatgaaattataagcatcatcattatagttttgtctcctttttttcttcttcttttctttttctttctagctactctcttcttcatagctagatcaagatgttagagatcattacggtaagaaaagtgttcttgatcggattcttgatcttgatactgaattgggtatggagagctgtgaattgggtttggttaaggccaaagagactggagaaatatctgaagaaacaaggattctctgggaattcttatagaattttaatgggagatatgagagagagtaatcagatggatcaagttgctcactctcttcctcttcctctcgacgccgattttctccctcgcatgatgccttttctccaccacactgttctaaaacatggtatgatcccatcaacctcaacttaaattgtatatcaattgttttaattatggggttatttaattacttgaaagaaatgtgaatctatataagaaccaattatatatacttgacatatcttgggttagattcataacgattatttataattttgactaggagtaggtcatcttcttccatcatgacttttttttttttttatcattttcaaaaagtataatatatgaacagagaaattcagagttaagaaataaaaggagtttaatgtgtatacagattatagaatgatacacattttcataattaagatctaaatctgataccctttgtttccctggttttgtctaaatctagttcaatatacatatgattgttgtatgtgctttgttttgtttcatttgtgaatttggtaatttaaaagtaacaaatggtaataattaatgaatatatgtttgaatagggaagaagtgtttcacatggtacggaccgtacccgaacgtgatagtaatggatccagagacactccgagagattatgtcaaaacacgaactctttccaaaaccaaagatcgggtcacataatcatgttttcctaagtggtcttctcaatcacgaaggtcctaaatggtccaagcatcgaagcattcttaatcctgcttttcgtattgataatttgaaggtatgtttttcttttaccaaaaaagaagaagagaatatatagaatgctcattttgactctaataattatattttgttttttttataattgatttttaactctgacataatgtgaactttgtggacgtcattttcgtctcattctttagattttggtcagtttcattctctctttactttttttcgaaaaaagtcagataaagtaacgtctttcctcttgtttcttagctcagagatttaaacaataattatattaaaaaaaaaatcatgtattaactatttaaaaaaaataaaaaaatcaagatataacagaaaagaaaaaaaaaatctcttaaacaaaaaaatattaaatatcccggaaagaacataaagaaatacctaaaaaaggtatttatagaaaaagaagaaacggagaaaaaaaaaagtcagcaaagaactaaagaatccacgccacgccaccaagtcacccaacttaaaagtctaaaagcaaaaaaaacagaaaaagccaaaaaggcacattacaagaaggtgaaaatgaaatcatcatatttcaactcaagaatttctaaaataccaaatttatttcgacaaaaagaatttatcatttcattatcagtgtagaaacctcacatatgcagagcactcatcatctttaacaaaaacattatgagcaaataagtagcaataaataatatacaaaatgtaagcttctttaaagacccatttctgtgattttttttggtgtgaaatttggtagtgattttgaaatggtataaatgaacagagcatactaccagcatttaactcgagttgcaaagaaatgttagaagaatgggagagattagcctcagcaaaaggaacaatggaacttgattcatggactcactgtcatgacttaaccagaaacatgcttgctcgtgcttcttttggtgattcctacaaagatggtatcaagatcttcgaaatccaacaagaacagattgatcttggtctccttgctattcgagccgtctacattcctggctcaaagtaaagaaattgtctaaaatcaactgcgtttaattaaaaaagtcggaagctagttttgctgattcagtttttctatgtgcaggtttttgccaacaaagttcaacaggaggttgagagaaaccgaaagggacatgagggctatgtttaaagcgatgattgagacaaaagaggaggagataaaaagaggaagaggtaccgacaaaaacagcgactgttgttctcgatgttggcttcgaatacaaaaaccatcaaagaacaaggaccagattcagggctgagtcttgatgatctgatagatgactgcaaggctttctatctagctggtcaaaatgtgacttcttcattgtttgtttggacacttgttgctctaagccaacatcaagattggcaaaacaaagcaagagacgagatttctcaggccttcggtaacaacgaacccgatttcgaagggctaagccacctgaaagtcgtaagtatacattttcaaaagtgactaaaccacattataactaaaaaaagggttgttttttttaacaacttctttggttattatcattaggtaacaatgatcctccatgaagttctacgactctattcaccagcttacttcacatgtcggataactaaacaagaagtgaagctagagagattctctttacctgaaggagttgtagtaacaataccaatgctcttggtgcaccatgattctgatctttggggagacgatgtgaaagagtttaagcccgagagattcgccaatggcgtggcgggtgcaaccaaaggaagactctccttcttgccatttagctcgggccctcggacttgtatcggtcagaacttttcgatgttgcaagctaaactcttcttggcaatggtacttcaaaggttcagtgttgaactctctccatcgtatactcatgctcctttcccagctgcaactacatttccacaacatggagctcatttgatcatccgaaaactgtaggaggtagaagaatgaggaaaaaaatgtaaaggtgcttcctttttttttgttcatcaacaaaacagaaccttgaaggtgtgtagtggtaaatgcagtttgaatccggtcaagaaatcttatttgggtgtttttgtatatatgaaacaaattaaaatctagaaatttcataagatttttttattttcatagcatatttttcaccaccacctgatttagtttatgtgtttaacataatgagtttcatttgtatattttaattccactttagtcatcacacacataagagaggcttttcttatttgtttgcctaatttcaacttcactacaaaaaaatcttgtgccatgttaaaagaaaatgccacgtgaaatagtaatcttatatatgttgaatctcgacaaaatgattaagaaaacatgcttttagctcatttactaatttagtctaatacatgaggcaatgaatcaaagaagataaacaataattataacaaaaaaagaatcaaagaagatagaaaagaacagatggttgaagagacgcatcaagatcagctgtttttgcatttatatttctaatttgtttgttttgtttaggtaattcggtccagacaaacattctcgaattgaaaccacaaatttattaatttattcggttccagaaaattttatgtttcattttgagttagttaaagaatctcaatcaaaaccaaacttaaatccaactaaatagcaagcttataaatattaccattttttgtcccaaaaataaataaatcaatatgaccatttacaaaacttcgatttaatttttttactgtttatgtgaaatttgttgttttcacttttcaataccaagatgtatagaattttaacacagatcaatttatatttgggtctagtaccattcacaagtatctaaaaaattgagttacttttattttgcaataataagcatgaatttttgtttattactccattatgacatacagtaaaaaaaaaaatctgtgtttgaagttttgaacaagtaaagagtgttgttacagtttcctctgccaaataccctttgaaactaatcaatcctttcaagattaaacattaccatatcctcaagagccgatctgaaaccactcctaggaagacaattcaaattctttaacgcaagttcagctttctcctttgctaattcttgagctttcttgatcccaccgcgatttctaactatttcaatcgcttcttcaagcgatccaggctcacaaaactcagactcaatgatctctcttagccttggctcattctctagcgcgaagatcactggcgccgttatgttacctttggctaggtcattagctgcaggcttacctaactgctctgtggactgagtgaagtccagaatgtcatcaactacttgaaaagataaaccgagattcttcccgaactgatacatttgctctgcgaccttgctttcgactttactgaaaattgctgctcctttggtgcttgcagctactaatgaagctgtcttgtagtaactctttagcatgtagtcatcaagcttgacatcacaatcgaataaactcgatgcttgctttatctcaccgcttgcaaaatctttgatcacctgcaaaaagataaatcaagattcagaccaaatgttctttgtattgagtagcttcatctaatctcagaaaggaatattacctgacttatgagcttaatgacttcaaggttttcgagatttgctaagtaccatgatgcttgagcaaacatgaaatccccagctaatacagctactcttgttccgaatagctcgtgaaccgtttcccttcctaacaaacacagagagaaagcttaaacactttgcagagaaaatgcatactccgatcaaaagaatggaacttttgtcttacctcttcgcatatcactttcgtctaacacatcatcgtgtatcaaacttgcggtgtgaatcatctcaatgatctcacctaaacgccgatgttctactgtaagttccctgcaccaagatcagctataaaccatcatttttatttctaaagattatgagcagtttcgcggtcaaagatgtaatgacagttatatatagattactttaagcctgctaattccgcagtggctcgtgatacaaggaataccaaacccggtctcatcctcttgccaccagcgctgaagatttgctcagcagcagatatcaaaaccggattttctgcaccaacaatctataaaagaagagaatttacataagaaacataaccctctatcaagagaccagaaaagaaatggtggcgaggtactaaccgataaaagattgtcgttcaacctctgcaaatcatcagctacgacctcaaacagagtttccaaagatattggctttcgtgactcttgcctcagattgagcatcactgtttgatcttgaccaatacctacacaatcatcaatattcaaaaccctgaagaaaagtcttaaatgtataagcttttgacttctcataaattatctcagcttataagactctttgcctcaaccaaaactaaagatttctatttccatagcaaacattcaaaaagctcgaaactttaattcatgagactctctgtctcatgagctcaaaactgaactgttataagactaaaactatgcaccaaaaaggtgaagaccaatcaaacatgattcaattacttaaccaaccaaacctcaaaatcaaagaatctcaatcaatcacacaaccaaaatcagatagttctgctgaaaaattggttaccgttgaccagagaattctccttggatttagccggaacagctctgcaagtagccaaatctcgccggagaaataccaaatttccaacacagcttctgccaccaatcatacaaacggtcttcgaagaattgccaaacaagaatcgacgacttgttgaagaagagctacaagaatgatcaagaacactcgtacccaagtctatattccgacatgacatcatcatttctcagaccaaaatccacaagtgacgacaacttttaggcaaacccaaaccaaaaaaagacggctaataataagtttcagaaactgagagtccaaagagaagaatcttcggaaactgagagtccaatgttaagtttttttctttttggctgacgagagagagattgggtgtgtgtatggcaaattttcagaaaaataaaaaataaaaaagacaagaaatttataagtttgtgaatcgatccctttttttttttgtgttgattttctttgggtggacgagacaaaaccacatcagaagtaagaactcgctctcaaaactcgacctttggcggacgagagagatttcagatttgtgtgtgtgtgtgtgtgtccgttttcttttttaattcaatatacaaattagagagagagggaaaaaaaagtccatcgttgtaatcagaagctgaaatgtcaccacgtgtttcctaccgattggtccgtcatctaactcgtatcaaatattttgagattagagaatatccatttttctggtttcaagacaattataatatcattaatccagatctcacaaattttatactaataagttttttacctacaataattaggctctagggagtattttaaaaacaaatcatcaaattacgtgaaaccatgattttttatattgataattcatttctccaactccattgtgaatcaaaataatactgttatgacttaatttacaatttctgtatattattctcattccatgtattaccaatcacaataagtcatcatatatgagaagattaacaaaaatggttgaataaattttctaagagcttttaaatttaattagtacataacaaaacaaaaatatgaaagaaaaacattaccataattattttatttatttcttggtaaaaaaaacattaccataattaacctctaataagggattagggaccaagcaaatatgtagttggaacataaatgggccacacaaatataaaaactgagcagaagaagcaaaaatcgcaactcctttctttcttgtcggtaattgattttagataaacaaatatacttaagtcttacaataaaaatcctttccacctaatttaaatcactgagctttacaaaagttagtatcagttaatacttagacttagcaaatctatctgtacaataaacctcaataacagtcgatgcttctctactttgttgagttgagtctgttgattagattcagatgcctcttataatcctgaaaaatgcaacaaaaaccaaaataaataaaataagcaatttaagatcttcaatttgatctctctttgcttcaacaaaaactaaattttttcacttcctcactcaccttccaagccgagatagctcaggttccgccaaaagcatatcttgcaactgttttgcatctgtatacctttcactagaactaaaaacaaaaacaattgtcacaagacagacactgaggggaaaaaaaaaggagataaagaggtttacttactcgcagatgtggttgattgtgagtaatctatgatgaataactaaatcatggccgacataagtcacaaccacggaaccagcgtcaggatgtggccagcttcttgaagtagggaacctgagaatgaaagtgcccggtacttgattctgaagcgaacgttctgcctcttctttagtcacaaacccttctatccatttaggcgaagcagagcgccacattccattaatcaacccccttgatacagccgaagcaacagggaacaaccaacaccacattgtctcaaaattctcttgagttatgtattcatagcatccacatatccttcttagaaggtcaaaatcctgattacaatttcatgtcagaatcacaaatacaaaagatcaagactttgatcttggtgaaagttcaagcaatatgagaagagaaagagacaagacctggtgagtgagagatctactgctgcatttagctattctcatgaaatgttcttcaatctcaattaccacattgtcccaatgaacatgtcgatagttccgagagatcagattccacgcatttgttccttctgctatcagttttcttgccattttgatttgatagctggaaaatttggaagattagtgttctattttatttgaggcaggtgtgagtttaatttgatttctttacccgtggtgggagcatccggaatagagagaaacttgatctgcaaattccgagacttcttcgtctgatgaattgtttgtgatttccttcagaagaagagctctctctgttaagtttccaaggcagtatttgaaaataatccagtctgggattgaatatctcctgaaagcagtcgagtctctcatttcagtgttttcggaatcagttgaagagttatcttcttcgtggttctgaggcctccattccatactcgtaccatttccattcacaatctaactcgagagcaacaacaatgcagaataacagtaagtgggatatggatacaaagcaaaacaaaacgtaactcagagaaattggattatccaccttactctcagaaaccttttcttctcctaatctgatccgtttcatagaggaaacagaatcacggtttctcgaaatgcaacggatttggttggtgacagtttcgaggaaaggataattggccttcacttctggtatttcgaatttgatgcagaacaacctcttatcactcttggaagaaagctacaaaacaaaagaaaacaaggatccttcaatgccttttagcatagacaaaaaaattctaacaagaatgtgaaatcccattccgatggcctagatttataatcaccacctgagataatttgaacttgaaagaagcacatccgttcaataagttgcacggtttatcttcagcagataattcaatgccttcatagcttactaaaaggaatgcctcaaagtcactcctcttctcaacatgcgtcccactatcagcatacagtagagaagccacaacctgcaacatcaaatcgataacgcgctatcagaaatacttcctgagctaaacaaatgcagaaatttttagaaagcataagagtatgaaccttcacatccttgtgcacaggctgtccaatagcattggttaaaacaacatccaaggaacaaaatgttccactaacgacactccaaacaccatcttcatccaattcaattccagatgtagatggcttatcaacagataaccataaaggtgggtcctggaaaagaaatgaagcgaaataaagaaacacaggacaagagtcttttgttgaaaaagaagagaaggcaaagacaagaaactacctttgtgtagtgataacttgcagagagattagaaggcaaaacttctgcactgtggatgaaaccctgaacactataaccatctccaccaacactaaataacgatatctttcgtgcgcaatctgaatttgtaccattggtcatcaaggaagttaagacttgctctcctacaagctctccacaaatataaaggcgcatatagtttctagaaacctaggagacaacagaaatcagtaaatccgaagaaaagagatattggtcaaattaataagagtcctcagagatcttataattactacctcacaacccacatgaacccatttttgaagaggaaacttagccgttgtagaaacattaggaacttcagtccaagaagaagtgttaacaggatcaggagcttccctgtgaaggagagtcaatggcaaaagcatcatcttcttgttttcatctagaacaaggaaaggtgcactaacactcatgtcagagtgaacctgagaagaaagccactatttaatcagaagctggttgttacagtttaaaactcataaatcaacaatggttatactaaaaaaaaaaaaatcaaagaagcgacacaaagtttgaaccttttcccccaattcgcaaaacaagttaatctcacaagacatggatatatgaaaacgattataacacagaaggcaacagatggacatttctgagaactcacctgtctgataattgcagaagggtatgtggtggaatctaagagataaacccaaaaacaaagtgagaaagtctcaaatgctttgttttcgacttcaacatcgacattaaaatcctccagcagagagtatttctcggtgtcaatcgcacaatcacccgccattataacacacccagataaaaagctctcgactttgcaagcgaaacccttaaaacccagaaaatgaaaatacacacagatgaagaaaaaaaaagtaaaacctttttcgtttgtctcgcttttttctcgttacctaaacaaacacaatcgagagcttaaaggaaactgaaaagaaacgctgaggaatttttcgtcacgtcttttgacggctgttaattaacggttcgtaccgtcgtcttccggtggtttcagtctatactctatagggacgatcagcaaacaatctactgcctcgcgaccacgaaactaaactaaattagccaatcataattatttgatctattgactggtcttgactaccattttttttttctttggataaaatctgcagttagctggttaacaaattcgttttgatttcgattttacagaaaatgaaaaatgtttataattttattttaatttgatgaaactatggtttatattatttagtctagatttggtttcatattaattaagaaaatttataacattaaaataaaacgaatttattcggttacctaaaactcgattttgttttggatttatattatcaaaacccgtcggtttatagaagaatttcaattgtgttttaggctttcgagatggtttggtttagcagcttataacagaatcttattattccacttaaatatcggcatttggtataacaatgtcgaaatcagttacagtccattcagcaatttgattcttactcatatatatttcagttcctaaatctatcgacgaccaatgtctctccaccggtttcgtccctggatcctgcattttttaacatgttcgaaattttaatactcttttcgtgataatgtaaatgcagatatatatatatataaaggaggagtacaaaaaatacctggtaaaagaagagtgactgagagagttttccgacatcaagttcccaagttcttggatctccaatccaaccttgtcctttctttgtcggatacccaaactgttcccacactggatgaggcaagatctgcagaatctcctgcggttgtggattactgtacggatcacaaacctcgtacggagattccgcaaaacgcgcgtttcccggaacgcagtaatagtgatacgcttcgaaagggaacttctccttgtccgtcctgtgaactttagtcccgtttggaaaagtatgctctggcggacaagcgcctaggcggttgcgggtgcaaacggcggttgcccccgggttgattatcatttcgctgtaccttgtaacgtcggttgtgacgtcgccgtcgcagtctcttccgtcgtttttccagcaacttcccatgtccattaggtaaaattggctccctgaaccgcctcctttaataatctctagcttgaattttactttaaaatctggcgattttagcgtcttgtgcgtcatgaaagatcattgaaaacagagtatgttagtcccaaatcgctgaaaatggttattttctgcgtatgcgtttcagaaacagagtaaaaccggttttggttgctaaaatgcggattagaaacttaccatcttcatcatccctctagtgtcgtaatgataaccaccagagaaacctcgagaagcatcagcgcgtagataaagcatcaaccatggatacttagaagaagtcttcaacaaatgatgaaaaacccaactctcatttcccccaatcttcttctcccatttcaccttataatacgaattattaccaaccggatctttttggtcgttatccaagtcccaagtcccataaaaactcccactcatatgtccttcttcgttatcaaccaagcttgtgtactcatgatgcatcgatggcatgttcatacatcctttcccaaaacatggaaacctccccgtaggaggaaatggtttcgcctttttcccgttttcgggacaaattgcggctaaagtatccgtattaccgttctttagcattatcatccaaaactgccatggatttggcttgtccacaacttgacatttgtttcctaagtatacctccttttgcgctgcgtagatatctgcgttgtctccagcgcttattcctccgtaggttccatttcctaccccaagcctgttgtctctttcgtcgactttgtggattatcttcactaaaaaagtcccatgaacacaataaatcagtttcagtttgaggtttaatgtctctgtttcgtttgcctgtcccggaaggtaacaactttaagaaaatgttttgaaataagtatgaagtttgtttttctatatgttagcgtaaatgcggaattaaggcctaaaacagagaagtaagaacataacaacattatgattttaccgggaaagctagagttatcgatatcgaagcaatctgccattcgagggcttcccatgtttgtagcttcttcaccgacctcgttgcattggttccaagcttctatagccacccttaagttatcgtttctcatcccgggatctcccacagctgatacataattgatatttgttctctctgtaaagtctgatcgaacaaaggaatatgaaagacaagaaagtataatcacgagtctcttgatgagtctgcatgatccattgatacttttctccattccagagctcaaaatctaaaaaagatttctttctttataatatatttggcttcatatggtattgtatatatatgaaaatccacatgcgagctaattgatcccaagcaaatctataaattaattattttttttgtcaacagattgtttctttttaaaaaattgtggaagctaattaaccataatttttattctatgttattgttgtttgtccatttttagggaaatacatgtttaagaataaaatcgacattcgttactgttgctgttatccacaagattgagcaagaggttggtaatacgttaagtgcaatgtatgtcttacgtttgaggtttcttaacttatctaaaatatcttgtacgtgagcaagtcttttctcacagcgcacgctaacaacacaaaagttactaaatttaggagtcgaaaattaaaattggattttgcgacaaaccatagacttctaagataacagagtatgtgaatcatgtgatcatattattaggtatatctttgagcaacaacgaacgtgtcaagaaactttaacaaacttattgtccttttttttgctaagaacaaacttattgtcttattgtagcaatacgtagaagcattctctacaggagatttttgtctttaacgaaatgaagcaaatagagagacaatgaagataagattatagagattgttttattgcataaatcaagaaaacagagaaacagagtagtgggcgacaaggcattgctctctttagattctcaaagcatctagataagcttttccgtcgagagtacgagagaacaaaccatcgttatactctttcatggtcagccttttgaatcttgcaaccttttgtctttcaactaggctttttgcaggaccaacttctttatacattcccacattgtgaaacgttgcaatagagagcctctctttctctgaattcacaactccgcgatgctctatgcttcggtatgtcccattagttatgatctacattaagcccaaacaaacgtcatgatgaaattacaatgatctattaccctatgtatttgattaaactttacctctaagacgtctccaatattgacaatgaaagcatttgggaggggtttaacaggaacccatttcccatctttcttgatttggagaccttcaacgtcattcacttgcatcagtacagtgagtccgaccgaatcagaatgcggggttagaccaataacctgatctggttgtgggcatggtgggtagtaattcatcctcatactttgaaccgaatcaacatcatcaaacaacttttccagttcctctggtttgatctctagggctcttgccattttcgctattaagatcttagctacgctctgcacttcagaagaatacatctccagtgtatctctacagaaacataaaaccaatattatacagagcaatactttgtggagctagttgataaaatgttgaattagaacaaaacctaaagggaagaggtagcttggggaacaagtgaggcttgcgtaattcaactggttgcacggtatggaagaacaagtctgcccaatctagtttctgatcttctgaaaccacaaaagcttgtccgaaaccttctatctcatctggtcgctgccagaacttcttcttttcttccatgggaaggttgaagaaatcttgaatctctgactttactttgtccaagaaacttgagtctattccatggtttacaagctgtggataaccataagtcataaccattaaccaaaataataacatttgaaacatagagtgttcggctccaatttgtgtttaacatggtaaaaaaaacagaggttgttttgtaagaaacgattttatctgcctattttcctcaatcaaaaatagtaaaaactaatataagctccatgtgacgtatattatgttaataaagaaagacgcgatgggctgctttatagaagagttatatttgtagttggagaatttacctggaaaaatccccactctttgcaagcgaagtcgagtttctcaacctcagaatccatggtggttgaagaacacaaacgcttcatatcgatgattgggatctcaattttcacatcaaaatcatcatcgacttcagttttgtcttgatcagaccggacgtacctaggaggaacggtcgtgatcgtcttctccttaaccatctcttgaacggatggaactaggatagagctccactgtgctgccccttttgcttccatgtcggcttctttcctggacgaaacaaaagtttggacacggttcttttgtaggtggtattaaaaacgtatacgtatttttcctaaatgattgattggattgacttaaatagttgaagaaaatgattgatttaaactgactgatggaagaaaatataaataaaggacagatgataaaagacatatggtatgagtatgaccccagacccaaagtaggtaaattgatacatgatactttgaatggttgtagattttgatgttgtttttggttttagtttttctaaaaatctactttataccgaaccaagattgtgaaaaagtgtgttttctaaaaaataggaaacctagattttgatagttttgtcaaattttaaagaaaatctaaaatttatgttttattggtttttaattttcttaaagtgacttgactttttataaaaccttttttagtttttcattttttttaatacacaatctgaaaactataaaccaaaatccaaaaatcactttttggtttttggtttttttaccaaccccttatatatcgttcaaatttacctcgacatatatatatatatatatatatatatatatatgtgtcggtatatatatatataatatatatatctttgtatatacatttataataatatattgcattgtacaatttttttttccgttaaatcaaagaaatatttatcccaacgttcatgtgtctttaacattgggattgtgaatggtgtgacggtgtaaaaacggccggaaagcgaaacggacacacatgtgttgtcattcatgatgtttataaaaagaataaaaaataaagggcatatcgaaatatataacaaagagaaaagaaaaacaagaactgtatgtgtctaaataaataaggtgtggtattactacgtagttgatatttttgtatgttgacgaagacgaacgagcttattaagtattattcacaggcgtttttttctttaacagatttgaaccaaagacataagagagaaggaaaaacagaatatgaacacgacagtgaccagttggagaaaacagaatttcttgggaaacaagatatcacttcccttcaattctcatagcatcaagataagcctttcctttgagttcacgggaaaacaagccattcaagtagtctttagttttcaggcttctaaactttgcagcctcttgtctttgaacaaggcttctcgccggaccaatttctttatccattcccgtgttgtgaaatgtcgcaatggagagcctctctttctccaagttcaccattgcccggtgctcgatgcttcggtatgtcccgttcgttatgatctgcattacaaacggcccaacacccatcatcaaaatatttatgactagcgattagctgccataaagtctatcagggtttagcccgaccaaattcatcaaaacatctatatagtatggcttacctctaacacgtccccaacattgacaatgaaagcattttggagaggtttgacaaaaaaccacttgccatttttcttgatttggagaccgtcaacttcattcacctgcaaaagtatggtgagcccgactgcatcggaatgcggaattagacccgtaaccagattaggttgtggacacgggggatagtagttcatcctcatactctgcatcatatcatcaccaaatatttcttctacctcctctggcttgatctgcaaggctttcgccattttcgctagtaagatcttagctatactctttactcgagtggaatacatatctaacgtatccctgaaaaacattaaccaaaatgtaaatagagagactttgtggtgttagttgagaatgttaacacttttttttatgcatgcaaaacctaaagggaagaggtagcttggggaacaagtgacgcttgcgtaattgaacaggttgcattataaggaagaataaatctgcccagtcgagtttctgatcttctgaaaccacaaaagcttgtccaaacccttccatcaccgctggtgtctgccacaacttctttttttcttccatgggaaggttgaagaaatcttgaatctctgactttattttgtccaagaaacttgggtctattccatggtttacaagctgttaaggaccatacaaagacataaccaaataaataaatttgaaacggaaagttttaggctccattttggctttaacatagttgtaagaaacgattttttctgaataatttcatcaaacgtaatctatttaattctgatacttgcatggaaacaagggtaataagctccacgttaggtctaacatagataattttgtaaaaaaagtgaagtttgagattttgcctggaaaaatccatattctttgcaagcaaagtcgagtttctcaacctcagagtccacggcggtagaagaacacaaccgattcatgtcgatgatggggatctcggatatgaggccagaatcatggacgacgacttcagttttgtcttgatcataccgaacatatctgggaggaacggtcgtgatcatcttatccttcaccatctcctgaacagaaggaactaaaatagagctccacggggtttcttctttggcttccatgggggctttcttctccttggatgaaacaagaaaaaaaagagatgtaggcaaagctaaaagccaaatctaacctattatttgtgcatataatggatagaactacaattactgctcacactcacctataaagttcagtctaaagaagtagagaaagcggttcacgcaaatgaatttttgtttcattgttagattaatttgaaatttacttctaaatatatacttgtgattttagactctatataaatggtatcaggagaactcatattttcattatttttttttggagatcacaacaattttcattattttgtacactcaaccattaattattcattacacagacataaagttggattttattctaaagtaatttggctgctgaatccattaattagactaaagagcctgattcatctctagctttcatcatattaatttttcttgtggttaccatttggagtcgcatagatagattaagattaccaaagtgaaatgattagagagaatgatggaaaagcccctaggcggtgcgtgagagtgagccagccacataactaatggttctaaacaccgcaacgcggtaataaactctgtcaccacgttgagacccagtcatcgctcccatgtttgtcttcatgtgctaattttcatttttgagttgtattttagtgatctatattcattcttacagttttttttgtatcattttctttctttcttacaactatttttttaccctaaaatctacaaaatacgcatcaaatcaatatttgtttcattaaatattatttgctagctgataatattacatataacatttgttccacatttgatagataaaacctagatttttgtattatttgctgataatattagaaattcaagacctaataaggtttacatataacatgcatttcagagcagtggactcttttcttattatgaacaaaaaaaataaacaaaattaaacgaaagacttggtcaaagcaacttagtcaacatacttaaacgtttggcttcttgacacttgttgttgttgtatttgctactgcaagcttgtggagtaaattcacaacattgtgagatgagtcaacgacatagcgagcttttgtgcgagcttgtcctatggctgtagagaagtaattctcttgcttgaggtcaagaacgttcaatgaaaccttcttctctagggagtggttacttgaagaagacttcgatcttgtttcatgagataacttgggcgacaagatttctgattcgaagaatgtatagatgtcttcgtcctgcaacaaatattgacccatttgcatcagaaagccaaacagatcaaatctaaattctgattcagtaatgtaagctttaccttctccaagaagtaaccactgcaaaatacataatcaatcggtgtagtcatagcttttttgtgcactatttctcccaaaatatgaccaatttctggttcctaagtaacagagaaagatatagaaaccttttagaaacccgatttgcatcaagattcaatgtaatgtatatatcgaatattgcatagtgtagctcatatttctctgaatacttcaaaaaaaacaaaaaacgagaagctttgtttaccttagtcacaccaatggcatggacttcaacagaatattttcctcgaacaacttcagctgatgcattagagattggtcctgcccataagtattgtaacaagtctcttgcttgtgctctcccaaattcaacatcttacaaagagattgaaaaaaatggaaaatttaacaaaaagataaaagtgtatggaagacaacccaagaaactaatataaatcacctgcatattcgtaattccatacaagcgaagtcttgcttgcttcgaagaacgatcttggagttcgatcagtgaagtacttaaaaacattctacaatatacaaaataatcaaatccataatagatttcaggaaagttatagtggaaagattataagtttgtcttttttattactaaccttgagaccatcaacccaatcaaggttcatgttttgaggcatatttgtcacccattcttcagtagtatgctttaggaacattccattttccgcagccaaccatatcttatactctccaaagttctgatttttaagtaccaaatcagtgggaaaatagatatataattgtgtcacaataagtgaagataagaaaaatttgaccaaacaaaaaagtaaaaataagaaagacatattaatgatactttgtctaatatgtttttgccacttctactcaatacaactactgttgtttttggatcattgcataatgctttcagtgtttcttttagctctgggtttagttaaggtccatttccttactcagactattccttggctcagtgattgttccatagaaaccctgaaaacatatttgataagtgaataaacataattagtaaatacaaataagattaaaatctcccaatttagcttaattaccaagattatcagtctattgttcgacaacgaatatcgttgtatcacatcttgttgtggaagttcatgtggaattttcctaatttgcaactcggattcatcgaaagcgtcattgagttcactatatagagagagaagagaaacaaaatcttggcataaataagttcttacctaaagctagtattttgaagaaaatcaaaggtttcttcttctttggattacctcaagaaatcaaacccccatttttcagcagaatgagtttttacatacttaaaattaactctgtgtcttgtttctctttcctcatatggcatatttagagcttttttaattgcagaagaaacttctgtaacattccaaggattcacaagtagagctccagcaccaagagactgtccagcacctgcaaactgtatttacatgtaaaaatcatagctttaaaaacattaagatataaagcatttttttgattcaatactaacattaaagccaaatttatccatattacctcactgagaataagaacccctcttttggcctcttggcaagcaacaaattcatgactaacaagattcaatccgtctctcaaagatgttacaagcattacatctaaagcaaaaaaaaatgaaactcctcaaacaagttatataaagaaccaaaaccaaactaatgatcatcatgtgtagtagtgaaggaaattcattacctgaaatcgcataaagtgcgcataagtaattggagtcaacagaacaatcctgacatataatgagagaaaactctatcaagaaacaatgtggaaaatattaaattatgaaagcttgaatagatagagaaacaaaccatgtggtgaattggaagagaagagacagaaccaaaacgaccgtttatgcgtccaaccagtctatgaacttggtttttgagcttttgatctgtatatatataaaacacatcttataaaactgaagatcaatcttatagaaatatagaagcataatagaatataaaaaagcttttacattcagggacttcatttcttgttggtactgcaatttgcactagcacaattttatcgcgccaattaggattttcatccagaaatttctcaaatccaagatacttttgtggaatccctttgatcatatcaagacgatcaacacctaatatcacctgccaacaccaaaaagtatgatgtaaaaatcttttcttaggcatcaaattttaaagattataagaagaatgtgttaattacatatacctttttgccagaaaatctatctttaagctcattcatttgttgaattacttcagggagcttacatgtttttataaaccgatttggatatattcccatgggaagctgaaaatcctcagagatgaattattgttatgatgtgattccttaggttataaagaaacaaataatgtataagatttggatatgaagtcatacaacaaccactcgagtgactcttccttgatacacaactccttcatgtgttccttcaactccaagaattcgggtgcatgtattcacgaaatgtcttgcaaaatcatatgtgtgaaaactgaaaaaaaaaaagaccttatagaaattcaaaacctcttgaaatccaaataaaatgatacgtaaccatgtatggcatttttagagtttaaattccacctaattaaatcagctgcaagaaccgaacgaagaagctctgatcgtgagggcaatgttttataaatctcggaagaaggaaatggtgaatggagaaaccatccaactttgattttattgttgtactctttaagatattgaggaagaaacatgagatgataatcttggcaccaaacaatatctccatctttataattctcttttatgacatcaagaaacattcgatttgctttcttgtatgcatcatattgggtttcgaaagttttgattgtgtcatgatcatattcttgtggaagtcccatgtgatgaagaattggccacaatataccattgctataaccattgtagtattgatcaaaaacctcattaaggaatacagggatacacttctgcaagtagaaaagaatcaatcaaaaatgagaagaatgatctctattactattataatatatatacacatggacatgtttggatcaaattcgtaccatttcagccagagatttagagactgcatctttttcaacttcatcatacacatcaaatccaggccagccaatataatccatttggtatcaaactgatcggtgacaccaccttcaagagatcacagaaaatattgaacattatcacactatgttaatatatatctatatgtcttatgacttacctagaagattaaatttgccaccaggactcatttccagagaccaagaatgttccccggttctctttgcagaagctggaagccggttagccaccacaagcagtgtttgcctttcaccacatacattatcataacccatcaacttctttcaaaattcgtaagacacttatcaaattaactattgatctgcaaaactttgttttctgtatatattaaactataaatgacgtcaagaaacagagaaattcggaacttttggtgaagaaaaatattttggcgtgatttttattagttagattgaggcacaactctatatattaaactaaatattccaaattttaattttttacgatcatttaccataaatttttatttatcttggcaagtcttccaaaatgtcaataaatcttattattatttttgaatgtaatctcaataaatcttatatgtacatgtttatatttttatgctttggttttcacatgttaatttatcagttagattgatgcacaactctatatattaaactaaatattccaaatttttatttttaccatcaattagcaaaacaaaatatttatcttggcaagtcttccaacaataaatcttattattattttttgtaatgtcaataaatcttatatgtacatgtttctatttctatgctttggttttcactaattaatatctttaatatctacatattgtttgccttacattttgaattcaaatcttctttacttaaagaaatggtgaactttttatttaaatctatattttcacccagtggtccattaacaggtgtacctattagtgttttcttgtaaagttgtaactatctggcatcaatctataaaaacattttttttatattctcatatttccaagtttccaacactagctcatcaacatgtgtgtcttaatttcaatatggttttaaactctttgcaaaatatatgattttgcccaaaaaaaaaaagaaaaaaaaaagcaaaatataggattttaacccgattttaatcgatcaatagcttcataagtgagtttataaaagcatatgtgagtttatttacaaaattttcatactcatattttcaacaattacctaagtttatttatcaaagaaaaatcatactcatatttccaacaatttcctaactaacatatatagtatatatatatataatatctgtcttttttttattaaagatatagtcaatgtaagaaactgtttatatttggttgaaaattcttgttccagattttatagattaaaaatagatttatttattatctgctgataatattacaaatttacgacctcattaggtttaatggtttatacacaaagggttaaatccaagacctatatttttcgttacatgccgatttgcccagtgtctccaatttccactttccttcttctgacagaattgatccagcgtttcgaattttcatttgcatttgcatcgcgaggctcatatatttcgctatcagaaaatgagtcagtcattgttgtatctgcaacaactgcaagcttgtggagcaaatctacaacaccgtgagctgagtctatgacatagcgagcttttgtgcgagcttgtccaatggctgcagagaagtaattctctttcttgaggtcgagaccgttcggtgacttggacgacaagatttttgattcgaagaatgtgtaaatgtcttcgtcctgcaacatatatagacccatttgcataataaaaaaaaaagccaaacggataaaatctataagtctgattagtatacgtaataatatattctttaccttctccaagaagtaaccactacaaaagacaaaatcaatcggtgtggtcatagattttctgtgcactatttctcccaaaatacgaccaattgctgccccctaagaaacaatgaaagaatatacaaggcttgaaataacaatttcagtaaatatatatatcgagttttgcatatataagaagaaaataagaaatgatcagaagcatttaatttaccttagtctcaccaatggcatggacttcaacagaatggtttcctcgaacaacatcaactgatgcattagagattggtcctgcccataggtattgtaacaagtctcttgcttgtgctctcccaaattcaacatcttacaaaaagagtcaagaaaatggaaattttaacaaaaagataaaagtgtctggaattcaagaaactaatccaaatcacctgcatattcataattccatacgagcgaagtctcgcttgcttcgaagtacgatcttggagttcgatcagtgaaatacttaaaaacattctacgttatacaaaacaatcaaatccataaaagatataaaggaaagattaacaagtttgtctagtttttacagaaattactaacctttacaccatcgacccaatcaaggttcacgttttgaggcatatttgtcacccattctccagttgtctgcttttcgaacattccattttccgcagccagccatatattagactctccaaaattctgaattttaagtaccagcacatgagttacaaaatagatgtataaatcttatataataaagacactgatgataccttgtttaatatgtttttgccacttctactcaatacaactactgttgtttttggatcattgcacaatgctttcagtgttccttttagctctgggtttagtttaagatccatttccttagttccactattcattggctctgcgagtgttccaaagaaaccctgaaacatatttgaaattgtttattaattaaaatttagtaaacatgcaaaaacataaaagtctagataagattcagaaagtctcccaagctagctagcttaattaccaatattattagtctattgttagattgcgaatattgttgaatcacatcttgttctggaagttgaagtgggattttcctcatttgcatctcggattcaggaataatgccattgagttcactacgtagagattaaaaacaaaacttggcataaatgagctcttacttaagagacttaaatgttttgaagaaaataaaaggtttacctcatgaaatctaatccccatttttcagcagaatgagtacacacatactgaaaattagatctgtgtcttgtttctctttcttcagctggcatatttagagcttctttaatggcagaagaaacttctgtaacatcccaaggattcacaataagagctccaacaccaagagactggccagcacctgcaaactgtataattacatatgtaaagtcaataacctaaattatcattataaaatgttatgttaagttgttaacataaaaaaaatgcaattgtttttgttacctcactgagaacaagaaccccctttttggcttcttgacaagcaacaaattcataactaacaagattcattccatctctcaaagatgttacaagcattacatctaaagtagagaaaaaaaaagatcatcatcatcaaacaagttatagaaagaactataaccaactcactaatcatcatatgtaatgaaggaaattagttacctgcaattgcgtatattgcacataagtagttgaagtcaacagaacaatcctagcagagaagatgagggaaaaatctatcaagaaactatgaagatagtatatttaacttatgacaacatgagttatatagatagagaaatcaaacaaaccagatgatggattggaagagaagagacagaaccaaaacgaccgtttatgcgaccaacgagtccatggacttggcttttgagctttcgatctgtatgcaaacacaatctcataaaactgatgataaatcctatataaaataagaagcataagagtatataaagtttttttacattcagggacatcatttcttgttggcactgcaatttgcactagcacaactttatcacgccaatatggattttcttctagaaacttctcaaatgcaagatacttttgtgggatccctttgatcatatcaagacgatcaacacctaatatcacctgtcaacaccaaaaaatatcatgtaaaaatatcttctttttaactaagcatcaaactaaaaggttgtgagagaaatgttggtacctttttgccagcaaacttctcttgaagctcattcatttgctgtgtgacttcagggagcttacatgttcttataaaccgatcaggatctattccaatgggaaactgaaaataaaaaacagagaaatatttgtggttattatataatgatttaggttacagagaaatgttaagctaagatgttgaagtcatacaacagctactcgagtgactctgccttgatacacaactccttcatgtgttccttcaactccaagaattcgagtgcatgtactcaagaaatgtcttgcaaaatcatatgtatggaagctggaaaaaaacaatacataaatttaaaccttttttgatatccaaatcagatgattcctaaccatatatgaaactgttaagagtttgagttttacccaagtaaatcagctgcaagaatcgcacgaagaagctctgaccgcgagggcaatgttttgtagacctcagaagaaggaaatggtgaatggagaaaccatccaactttgattttgttgttgtactctttaaggtattgaggaagaaacatgagatgatagtcatgacaccaaacaatatctccttcttcatagttgtctattatgacatcaagaaacattcgatttgctttcttgtatgcatcatattgtgtttcgaaagtttggtttgtgtcatgctgatcttcttgtggaagtcccatgtgatgaagaattggccacaagataccattgcaataaccattgtagtactgatcaaaaaccccattaaggaacacagggatacacttctgcaaatacaaagaacatgtttgatataagaaaaacttgaattacgtactagacatgtaaatatttaaatgttttcatttcaaaattaatcaacaatgagaagaatgatctataactctctttttttttccttttttttttcttctttttttccttcttttttcttcttttttcttctttttttttcttttttttcttttttttcttctttttttcctttttttccagaatgatctataactcttatgtacgagattatatgcatctatacgattccttttaacataagattcctaaccgctaatctttcaatatacacatggacatgttgggatcaaattcgtaccatttcggctagagattcagtgagtgcatttttttcaatttcatcatgcacatcaactccgggccatccaacccatttggtatcaaattgagatgttataccttcaaaaccataacagtaaaacattatagtctttactaaaatcattgttattattattgttgtctcatgactcacctagaagaccactgactaaaccaccaggactcatttccagagaccaagaattttccccggtcctctttgcagaaaccggaagcctgttagccaccacaagcaatcttggcctttcaccacgtgcatcatcataatccatcatcttctttcaaattaattaacgatctgcacaatattttcaaagtaagtcaggctatgtatggacgcaatgaagatataaataaagcattttgctctatatatgatgtcgagaaacaaagaaggtcacaactttttctgtagttgataaacttatgttgtttttcttcctttttttctatgaaaaatacaaaacaagcagtgtggaaaacggatgcaaagtaaaaaagtataaacggttacttgaattctgacaagaagcgattaattaactagcatttttattttaaaacaactataacgctgatgaacttttgttgaaacaaagataaaaacctataaactcttttttttatttgatgaaaaggtgatctggtaagattaattgaataaatgtatgaaaatgagaatataaaagtatgtcattaaatttaatgatcacttctttgtttgatgaaagttgatatggtcggatttaaaaaattggtttacaaagattgcaatgtatgtagtttgtttaccaaaaaattatcaacaatgagattgagagtgttagaatattgttcttgtcttcctcaaaatttataggaagtctaagattcaactttggggggttgaatattctttagttaagagtttctaatctattcttgcacacatgtcattggaagatattaatttacctttcaatctttttttatcttgttcatctttttctaatatgtacacgtatatttttggtttttaattactagtatcttagacataatgttgggataaaatttccaactgtgcaaaaggataatgtcatctataattttctaataacaaaattttacatattcgaaaaacttatttgaatttctattgattgttacattctgaattcacatattatttatttggtaatatttaatagagaaattctgaagttttattcaaaacaaccactggcttattgacagctttgttttttaagtcatatagtttttaattcatatattcaaattgtaattcatatatattattattttccctataactggagcttctttaagattcattcttaattttaacaatctggcaccaatctataaaaacatatgtcagtttatctattggctcatcaatatgtgttatctttcaatatgatcttaattaataagtaatttgcttttgatcgtttggcaataaatcactaatattgtaaacacatgtcagtttatctataaagttttctcatactgatcatatttccaacaatgactcttattcactaatacatgtagaatctctaaactatttgtcaatttaattatatagttcataatactttatatctttctgccaagtttgttttgggcctaacaccaaaaagtttcacgttttggcccaataaaaacaactcacgttgtgacccaataaaaacaattcacgttgtggcccaataaaaatattcacgttctttaaagaaaaacataaattggaattgttgttcttactaaaacctttgtgacaacaattgaggttttccggaggaacagccattgactctctcgataactgtatccgtgttcttgttagaagatggaattggacccagatgatgttttcagagatgaagacgaagacccagaaaacgatttctttcaggtttttgaccttaatttcttcttggacttttaagtcaaagccaaaaaaaaatgaaaccctgatttatattggttagtgatgaatctgttggtgttgcaggaaaaagaggcttccaaagaatttgtagtctatctaattgatgcttctcccaaaatgttctgctctacttgcccctctgtgagtgtatacatgcaaataatcaaatcaagttttatttttgattctttagaatccttaccaaaatgttttaaatgtttcccaaaatgtttgaatttgtatcatactgttgtttgacaggaggaagaggacaaacaagaaagtcattttcacattgctgttagttgcattgctcagtcactcaaggctcatattatcaatcggtcaaatgatgaaatagctatatgtttctttaacactgtaagtttctggatgaaacgtgttgtattgttttctttcttttttggggtctttacttctttgtttgctaataattttgttgtcactggcagcgtgaaaagaagaatcttcaggatctaaatggtgtttatgtctttaatgttccagagagggatagtattgaccgtccaacagcgaggctgattaaagaattcgatctcatagaaggtagatgtgcttgactaacgttgtatctaacttttttgttatgctcgagtacataattctttgttaacttaaagagtttcgaatccctttcttagtaatcacttagtaagaaaagacattacatgttattataaaatctagattggtttagcaagagtttagcgcctgagatctcaatggtagtttctcaggctgaatcaaagattaaagagtggagtagtgtgctgaaagagagttatttactttgttgtttcgggtgcagaatcatttgataaggaaattggcagtcaaactggtattgtctcagattctcgggagaattccctttatagtgctctctgggttgcacaagcactactgcgcaaagggtataacaatcttatttcagttatgaatttggtgctaagtttgtgatatgtgttataatttggtctgtcatctgatccctgtgttggtaatattctgtaacaaaaacatatttagatctttaaagacagcagataaacgcatgtttctattcactaatgaagatgatccttttgggagtatgaggatctctgttaaagaggatatgacgaggacgacgttgcagagagctaaggtagtttagcttcaacccttacttagatatgatttacaatgaaatctatctaaataagcttattggtaatcaaattatagaataactaatggtttactttttattgcgttttggtgattccttaaggatgcacaagaccttggcatctcaatcgagcttctaccactcagtcaacctgataagcaattcaatataactctcttctacaaggttaatctcttaacaatctacttcttgtgttgaccttacaaacctggggctttataggcaatttctcttaattttctatttccatgattttttgtcaacatatttccaggatctaattggattaaacagtgatgaacttacggagttcatgccatcagttggacagaagtatgttctttcattctttattgcctgttggaatcccttatatgtctttgtcattccgttgctaatagtatcatagtactacactcagacaaagccgtgatggttttttgagaagtttccagacttcaaaataccactttgtaaatgttatctttaatttgaatagggatttataggaattcacatttagttctactttttactgaaatgtaactatttcagattagaggacatgaaggaccaactgaagaagcgtgtacttgccaagagaatagcaaaaagaattacgtttgtgatctgtgatggcttgtctattgaactgaatggttatgctttactccgtccggctattcctggcagcataacctggcttgactctacaactaatcttcctgtgaaggtaattttacaggaaagctcctttagttgaattgaaattttgtgcctttactcgtcttttgttcttttgacttccattacaagtgtggacctttgttttcagatcaaatctgtccttttttatatattatgaatcaagaatattccttgacatctatgttttggtgttatataagatctatgtttcctagatgtatgaggttttaagcaccttgtgtgggcttgtctgcaggtggaaagatcatatatctgtacggacactggagctataatgcaagatcctatacaacggattcagccttacaaaaagtaagcctcggaataacaccctgatttatttctggtttcctctaagcatagaagcaatggttgttttctgttagttattttatgtctagacgttttatatccttacaaaaataaattcaataggaagaaactacagcctcagaaatgtgaatctcttcttggctgtcatgaagtttaaaattcattctactcgataacggaaatgtttttgagcccttactctttcttgtccagtagaattgactttaattttttgttctcctttctagtcagaatatcatgtttactgtggaagagctatcccaagtaaaaagaatctcaactggacacttaagactgctggggttcaagccacttagttgcctcaaagattatcacaatttgaagccttctacatttctctatccaagtgataaggttacccgtttctcatttaagtgatggctgctgctaattttgttgtagtttgtttataatttttggaacttagaaaagcaaagactttcactttggtgctaaatagtttactcaaatttggacgttctcttagttatagagcttcatgaccttatatagctttgtttataatctttgttgtttcgtaccatcattatttcagttcttctatgcactttccaaaatggtgtcctatcagtagggagcttcagatatctaccatactttataattttaagcttcagagttatatatcttaacattttgctgagaagttttgaagcaagtgacttgaatacatgttttttcctcattgatcttgtaaagcagttgtgtcatggaatctcttacttttgacagctaattgatgcaggaagttatagggagcactcgtgcattcattgccttgcatagatccatgatacagcttgaacggtaagcatatttgatacataatttctggattttagacagactattacactgtagcacttgctgtgatatactaaccatataattactgcatttcctcttgtggtgtagttttgctgttgcattttatggcggtactacacctccgagattggttgctcttgttgctcaggtgagagaactctataaagacctttcttccacataagtatattccatcttgattttaaactttatttcctttttgttttgtgcgttgttaaacaagttactcaaatgtctttttcttaaacccaaacaggatgaaatcgagagtgatggtggtcaagtggagccaccagggataaacatgatatatcttccatatgctaatgatattagagatatcgacgaggcaagaaagaattgcttttgaaaagctacttggttccaacgttattaatgtttgttaaattttgactagttggtggaattttggcagttgcattcaaaaccaggtgtagctgctcctcgcgcatcagatgatcagcttaaaaaagcatcagctctaatgcgacgtctagagttaaaagacttttcggtttgccaatttgctaatcccggtaagttcaactctctattagttgtactgagctcctgatccgtaaactgttcatatatagaatctgaagtcgctctttgttgcagctttgcagagacactatgctatcttacaagccattgcactggatgaaaacgagcttcgtgaaaccagagatgaaacacttcctgacgaagaaggaatgaacaggttttcaacaaactttcatattctcctttttaacattccatcttataaagcaaaagaaaaagaaaaaatgttgggaacttatcgagtgagctctatttctcgttcttgcagacctgcagttgtaaaagcaatagaacaatttaagcagtcgatttatggcgatgaccctgatgaagaaagtgactcaggggcaaaggagaaatcaaaaaagcgaaaagccggtgacgcagatgatggaaaatatgactatatagagcttgcaaaaaccggaaaggtgaaagcaaaattctaagcattaatttagatttctgcttaatgatttcatctttttgtttcattgctttttagatctctacgtttaaataagctatcttcatgttctgttttctttgtttagctgaaggacttgactgtggtcgaactgaagacatatctgactgccaacaatctcctcgtcagcgggaagaaagaagttctgatcaatcggattctgactcacattggtaaataactttaaccgtgagttatataactcctgctagagaagctacgttttagttttattgaaaagcttgtctgtttttgatgggaactggacccatttatcttccgggtcattgttcatcgttttgcctcagctacaaagggttttagatttaactgtaatggtctcttttgggtaatcactaatttgtgatcttggctctaactttatggtggagtttatatttgacgaattccataaggttctttataattctccataggttataaaaaaaagtcttatgaatcttgaacaacaagatagaaacaagagataacaatttgtggtatgagcgtagttttattgatcataggttctttttttatggaaaaattataaaggaacttttggacctttgtaatccatttcacttctcacatatgttctcatatacacaagataacatatccaaacaataactaaattaaacacaacatgattccttagaatgcatacacaagcgagcttttctcgttcttcgtagtcttttgttgaatttctctatttggttgggatcaaatttgaaggatccctgagaacgtatttaggcaattcatacttggaacctgcaaaagttaaacatctcaactactttgcacaaaatcaaccaaaaccaaaccttgtggaagaataagactaatacctttctcgtcgtaacaaatggtgaggtcagtgttctgaacaatcacaccggcactctcaagtatcgtttgcgcaagcgataaatcatcctcttctgctgcagctcgtaacgcatcccatatctctgtttacatatgtatatacattgaaatacaaacacttttgactcttgacataattatttatatgtgatgatcacctttcttgcctccatagtgaggagctgtgtcccagaactcctctcgcatctgtgtgagctcatctcttgatatcggttgaggatgtttccatgtttttggtcttcgaatcttctcctttttccctacaaacacacaatcaaatcacagtccacagagatactctcagcagtaagaataatcatgaagaagaaaacattagatcagatgtgtgtgggtcatttcttgactctcatttgatgagagagagagtaccctctgctatggttctcgagctagaacaacccattatttgtcttccttagtagacgataacaacaaacgaacattacaaaatttacaaagcagagtaaacagagcagatagagagatagagagagattaagtttacaagatttgtaaatacctattaactagaaagagagatattttttgtatgatggtgagagacaaaggtttgcgttatctcgtgaatcacaaggttgctcttttttttcttcttttttgctctccataatgtttggtctgttcaaagtgagatactcgtgagccacaaagatgtggtagtttggaatttcatcatctaactatttatggttaaagataaaaacatacgtaacgatacaattatttttatagatttattcatactaaatatatctaacatatgtaacagccgatatctcaaatccaaatcgtggagtgtttgctagaaaagcttcttatatatgaatccgaaatagttatttttcattatataccacaaatcatatatacgaaaagaggctaactctctccaacaacttgacacatcagcacataagagcttgccacctaaacttcataaaataagtaatacataattagtaattaattcaacataaagaatataattaatcagaacttgaaccatcactttttctacattttttaattcaatatatcctctttaatttcgagatccacttaagtggctaaaaatccaaacatgctacatatattacttgcctaaaaattagacgattattatgaaagaaactaaatgaatatgcagattaaatatatctaagcttttcgagatttatgctaagaaaacaaataatttgaaagatgtttgaggagccatccttataactaaaacgtaagatataagattataacaagaacttaactaaacttttcaagaacatcaagttgaataagcttagattgaatatgcagagacatggttaataaagacatggtatatttatagtgtaagaaataaattttctaaaatttcaccgtctcacaatttacatttataaccaaaaacaaagatatataaattaaaaaaaaactgagaatttaaaacaacaataaaaaagaactcaagcacattcgtttttcaaatgaactaatatagttggactttttaaaaacaattacaaatcatatttatgtttcaaaaccgatgcattcaactttactttatatgaacaaacattatataaaacaatttgtaaataataatacatacacccgcactacgtgcgggtactcatctaattgttttaattggaaactcacgctgtttcaagagcgactacttgcaacaagccagttttgtatttttgggcttttagcttgaaaattttgggcttataagcctgtaaggcccgtaactatccgcttctatcaaccgtgccgtttcatacggagtgcaaaatcataagttttagttttactttattttgtggtaatgtcaaataaagatggccaatgtcttagttaacacttaacaactctaccaggtaaagtgaagtgaacttcgatacatcattgtcaaagaatatgaagcgaaaataatggattttgttctataacaacgacgcaccaatggtataaaaaattggtacaattcatttgctgataatgaaattaacgtggttcacaagtttcaaacgaatctataatagtgcaaatttaccaagatttatgtagactaatgtatgataatgacccattgaacgatttaaactttagctttgggttttggaagcaaaacattttataaatgactttttcaacagttttcatgattttgagattgtaaccacattcatctgacagcagaattcatgctttgatataacattagcgtgtcatgtaatatttatctaaacctactagttttgggttatataactcgacaatatgattttaaaattttcttgagttaaattcaaagtaaggatttccattttcaacacttttatgtgacatgacgttacatatggaaagtcataggaatatcccaattttttttttaattattattagaagtaaaattttaatagaaatatttgtgtctaggattttcactacagtctattagataatattcatatctttgattatatcaatcattagtctatttatctatagtcatatattcacatttactttgattgtaataccctagatatctctctttgtatataagctcatctctgtattataataaaatcatcacttctataatcatggaatcagagcaataaagctcctagacctaaatttttcttcttactcgtcttttctctcgcagccgtccaatggcaaacacaaacaccattcgtgataatgatcattatgaatatattctaatacagtctatatatattatattgtatacatttaactatatataaacaaaaacaaaaaaaaactacttgaagttagtaattattatcacttgacaaacaaaaaaacactacttaaagatatacacatgcattgaatgtgtataacaagcggctccatcttactactagttggttagttaaacttattaagaaaatacaaaaaaggaaagtgaggaaagagcttcttggcaaaaagtaagtccttaaatagtataatccctgagatgagcaataatggtgttccttatattattgcatgtctattttctcttttcttttttcttcttcttcttcttctctttagtcgaaaccctgaatctattcaatttcactaaacaaaaatgtcaactggagagaggaagacgtctcttacgtaaacagacataattattgtcaaatcatcaactttttctacgaagatgtcaaaacgaagcttttgaattattgtttactttctaagttacaggctttatatgtagctttcttcatgaagaatatgatttacgtacgcaacctttttacattgtatcgattatggtgggcaccaatcgtacgttcatgtttatatttgtgtaaaaatcgtatgatgtaatttgtccctttgagtctatagtattctttggacaccgtgtgaactacaattgggcaactattaatagccttatattatttatacccacaaatgaatttttttaccaaattaagaatgtagttcttctaaatacacactatcgaaaataaaacgaggatttaatcaaattttctgatactttgagaatataatttttttaattataaaagaaagtgtacacatgaactcaatctctttaatgcaagaaaaaaaattgatatgacaaaaatagttttgataacttcggtttttctaagcgataattgacaaataagtcataagaatatcatttaaactaagttttctctaaatacataatattttcaaacggacaaaagctgtatgtcgttacatatagagatctgcaatattcgacaacatatataattgaataaatgataaatcaaagtgtagaatagtggttttttattactcaataacggatcggatcacacacaaacatatctatatcaattatatatgaagacacacatacacaaacattcttgagaagacttacgaacggtatatgatatcattgtgaatagaattcgacaacatgtcaacatatatgaagtgaaaagacgacaatcaattaatgtgcctaatgacccacgccggggctagggactgattctagtcgacggtatatctccggcgagttttctggtaccatacgctggtcggtatcatccggaggagaagtgtgacccttgtcgcttggacccgaaggtggtacattgcccttgggtagggcactaagaaacaaacccttgcttgtgccgtaagggactagaacttttctagcttgagaagattgcaagacaaaaccaacaatcaaaatgagtaagcaaatcatcgaaatggagatccttggacgagccattacctgattgattttgttgtataattttagatattaattaattagttatgaagcaagaaatttttagtttattttttgggatttggttgtgtttctgtgagtgaatactttgatagagtggatatatatagagagaacaggagatggatgaggtcaatggaaatttatttgggttaggtacaaatgaactaaattggtgagttcgtatatataaagtgtttatgtttgtaattgatggatcaatgcatatatgtaggtgtttttttctttcttttttgacaaagtgtatgttataattccaagcagcagacaaaaacactttcacgttacatgcttttcattgcttatctgaatatgataatttaacaataatatcaaaatagcagaattgagttttatacaacataaatgtcatataaaatatatatgtatatcttctttttggtttttgttttgtctttactttgatcaccactataaaacggtatataaaataattagttgtttgtattcagttaaatattttgtttgttaggtggtaaaaaaaaaaaaaaaattgttcaatgtcttgctaagttgctgactgagatgttccataagagacgataaaagttgatgaagtgatctcgatgactacttatttagcaaaatataaatatcgatgaccacttatttctatggctcattatcagtgtggttcaatactattgtatgagtgctttgttgaaagcattgctttctgttgttttggagttttgtgtgttttactgtttatagcaaaattttatccgtggcacacaattatatgctttaaacatattacttttcatacctcttgttctctattattgaagttttttttttttggtcaaagttctctattattgaagttctagtaaaaatataaacccaaaattaatgatacatcagaatttggttgaatatatatgtatcatagatttagcattattatcttccattataaggaggtacaactacacgaaccatataccacacgagtccgtattaataaaaatgacaaatgtaattacactataagaacaataactacaactattatcagaaattaaaacaaacaaaaaagtcaaaaatatataactacagtacatcctccgtgggaagattgaaaagtaaatcatagagcaaacaatctcgtaattagttaatcatatctttgattatattataaccaacagatttcttctcagtcatcatctataacttctgcattgtatgataaaaaaaaaatcgaagagtactatattataaacacagatctgttgaaaacgtatgtctgattttacccagagttgaaaaaaaaagatgaaaaattcagagtcaaacaaagaatcacgaaagagtactgagcaaggaacgacgatcagatcaccctactctgcttagggtttgtgagtcttgatcacgtatttcacgtgaatgcggctatttaaaggtcaactgagaaggttaatttaacttgaaaatccaaattctataataaccaagatttacgtaaaaacaaaaaatatatcgtcccaataaaaataaataaaagaatatcatatcatcgtcccaataaaaataagatatttttatctaatagcacatctggttttaatgttttatcattcttaattcttataacaccaacagagagtagaaaccctgctctgtagatcatcatcggatacaaaactggatttatcggagacgatagacctcacaagctggctcaattaatccatgacaacttgactactcgtagagcttcttggaatcgctttgatttcgtcgatgatgttacagaaacaggcacttactgtcagtttcttgagagctgcaccattttctacaaagtactttgttaattttctcttacttgatgtctcccttccttttgcctgtttacaacaaacggtgtcttgaggtgaacaaagtcaagagatgatatgaaacatcgttgcacagatgaaagatccatctgctttttgtctggaaaacaatcaaattcctgagaacatatataaccgagtgaagtgtgagtttttgctattaaaaatgacacgcagtgtgatttacatgagggcagatgcaaatgaaactcaccatcacgagtgagtgtagattcgggaagctctcaaggaaggttggcaacatttcccaccaagtttgaaatctgatagttggttaatcaaatctttatatcacttacagatttcttctctgacgtcatctatgaattctgaaatttaaaatctaaatcgaagacacacgtcttttgaagacgtatgatttaattacccggagttgaaaaaataaaaataaacacgaaagagtatttaccaaggaacaatttagggtttctgattctgccgaagaggaaaacagtaaacattgtagacgtcaaaagaaaaatggaaaccctagattgtctgttgtcgtctactatgtccgaagaggaaaaatgctcaaatttgagacaacattattacataccaaagccttagaccaaatcattcaaaattcaaaaccgctcaaagccaaaattagtctttctctcagcagaaaggtcagaaaccatcagcacaagaaaacatagacatgggcttgtatgttccaaatgttctcaagcgaacaacaacttcacatttgttagatcgtcttggaaatgtaaagagcttgctgagcatcacatgatcacgttgatcctctatatgatctaagcatagagtaaatttcttgagcactgttgaattctccataaaataactccatagtttcttcatatccgccacctctcttgcttttacctcaacaaactcaagcgatgataaaacacattggggcacatctgaaaaatttattccccagttataatctcgaaacccctgcaaattaaagtagagaaacaaaagaagacaagtttagtatatccaatattttcagaatatgagtttcaattagttagttgattaaacagaacaaatacataccatgacgagagattttaaattctgacagctctcgagaaagattagtaaagattcccaagatccgaccgccatgtccttgacgctcaatacagaaagtttatgaaattttggtagtgatttcgatttcgagaagtgacgataatcctacaaaaggagaatgcatgttacaacttttcacattcaaaagaaaaagaaaaaaacgcttatatagatagttagagagaatcaagatagatagtttacctgaagaatgtcaaaggagatagtcaaatctctgacacaagagatgagtttaagaatactaagcaaggtttcaccaaaataagccacatcatcaagattcaacatgacaatggaactcaaatcatttataacgattctttgaataaactgacggttcagctttagatacttgagctttggggtttgcattacaacttgtgttttcagatagccagtttcattattggttagacagaagctcaatagagactgagatgagactttagctccatacatcttgtccatagttagggtttctagggctgggcagactgagaccagcttctccatatccaaactgtcaacaaagttgattttttgtagatccatgatcttaagacaaggcagagaaactgaatccggcgatttaggcaagtttgcacgatggagcttcaagaataccaatctctcacatgatgtataaatagttggaggtatctcaactctatcatatacataccttctattactaccaacatctaaatgttgaattttatgtttaatcacattgttcatcatcatcgacgtcatgtttcgacaattgtgaccatatccaacataccttagcttaactctttgtaagaacataaacctttcgagaaaatcgaacttatcataatttttggagccattgatcaccaaatccaacccaggcaaagattgccaaacatatctccatctgcgacatataaggctagtcttgaccacctcctccgtgggaagattgaaaaatatctcacaaagcaaagaatctggtaactggttaattatattatgaccaacacgtttctcctcaaacgtcatctataacttctgcgttatatcaaacaataatcacgaaggagaactgaacaaggaacgacgatccgatcactcgactctgcaaagggtttctgagtcttgatcacgtcaatacgtgaatgcggctatttaaggttaatttaagttttaggtaaatccgaatcttataatgaccgagatttacgtaacaaaaaagatgtaactttacttttatgattttatccaacattgaaaagaaaaaaaaaaaaaaaaaaaaggaaattcatagataccatctggttttacaactccaacagagagtgttaatatatagtaggtaaagaaacctcttctgtaagaagagactaatccaccaacatgttacaaaaaaaacaagccttgatttatctgtagatcatcggattggatacaaaactggatttatgagagacggcctcgtaaggtggctcaattaatccatgacaacttgacaactcgtagagcttcttggaatcgctttgatttcgtcgatgatgttacagaaactcgcacttactgtcagtttcttgagagctgcaccattctctagaaagtactttgctaatttcctcttacttgatgttcctgtgagcggtctcccttccttttgcatgttaacaacgtatggagtcttcaaatgaacaaactcaagagatgataggaaacattgtggcacatatgaaagatcaatctgctctgtgtctggaaagcaatcaaattcctgataatatataaccgagggaagtttgagtttttgttatcaaaaatcttaatgtgatttacatgagggtagaagaagcaaatgaaaactcaccatgacgagtgagtgtagatttgggaagctctcaaggaaggttggcaacatttcccaccaagtatcttcgaagtaagcatgcaagcgagacaagttagagaattgaggtagttgttccattttgcagtaatcatgaataacctatgcagccaaaaaaacaaacaaacatgggttcactgagaaaatgtgataaagccataaaggaagtgtataagcttaatgttattgaatcgagcatatatatacctgtagagtatcagaagatatgaccatttcgctgaccgtagataacccagtgaggaatttacctagcatagctatcttggaagaatcatctggttccaatggatcattatattcgacattaaagataacatcgatatctacctttgcaaaggggccaatgttgtgtattatgaagctgtcagatcgatgatcacaaagattcatatactcaagtcttggagcatcgattgtaacaacatgattttgactttcgtagcgctcagaatctatcttgaagctttttaaagactgggaacgcacacacacaacttcaagagaatcattgggatcacgaactatggttaactcttccaaaactggacaacctgatattagaatctccagagtcgaatcagcatcgtacttgaccatatcaagatgcataatcttgacacaaggcagcgaaacagattccggatgatccaaggctacgcggtagagctgtaagttcaccaatctttcacatgaatagagagataaaggcatcttaactaactcgtcatcatcatccacctcattatgaacattaaaatgacaaactctacgcttaatcacagcattgatccaagacttgaaacgagaagcatcgtgctcattaacctcatagatcaacttgaatctctccaagtgttgctcattttcagaacccagaaacctatttacgaaactcacaaaaacatcatcatctgggaagttattggaatccaaatccaatacaggaacatgtaaccagagatttctccatcgttttgataaaacgcttgtgcaaaccgattcttttgtggagagatctgagagaatctgacataacaaggaatcaggtaaattgcttatcctatcggagttcctttgcttctctttaacagaggtttcatcatccatgtcgtttccttaaactctgaactatatagtttgagactgaatcatgtaaataacaaactgaagaatcacgaatctgttagctaaaaaagtcaactcataaactccagaaagaatcaaacgatactgaaattacctgtagtacttaagtattatttattcccaaagagataacggcgagagaggaagaataagacgaaagcaccgtcaattttccgggaaaagggaacatagatcgtctcgcttgcttgttgacatctttgacatctctaagatgcagacaataatagtcaactcaggacattaatcacgtagtttttttttactatctttaatatttacattgattacaaattttagctagaaaaataatgtatgtcatggcgtgagtcaattaataatataaccaaagagaagttaagtttttgagatatgaaattacattattactaaaagttaaaacgtcctatttcaagaaaaagtttgtgtttatattgttgtacttcccactttattagagctaactaatctagtgatcttatggtgatttaatgatcaaatttttagtcttcaccctgctaatacagcgaaaacctgtaaaaagtaaaaaccttttgatataacaacagtcacacacgcgcccaatagatcaacggaccagatctcgattacagttacagactgtcttgtcacaagccgtcactttaacacatacaccaatttcttctcagcgttatttcaaatctcagtttacaccttcacactgctgcgtctctctctctctctctctttctttctcagattaatcgctgagaagaagcaaccacctggagacggcggagatggcagggtacagagtggaagatgactacgattacctcttcaaagttgttcttataggcgattctggagttggcaaatccaatctcctttccagattcactaaaaacgagttcaatctagagtctaaatccaccattggcgtcgaattcgccactcgtaccttaaaagtcgatggcaaagtcgttaaagctcagatttgggacactgctggtcaggagaggttcgtttttcgtcttcctcgtctcttcatttcgttcttcgtctcttatttgtatgtaaaatcggccttcatgctagatcttggtatttcacattgagtttcgtggcgtattttcgatttattcctgggtcaattggtctcgagtacattgcaaatagaagccactgtcccggagatcactctaagctcctttgcttccatacttaggttctcgatctagcagtggctttaaacgagtttccatagatctatcgttttggtgactttgatagcggacactagctttttgattcgtttgtttgacttaatttgaatttatgttactgtgttggaattgagctctttagcccaatctatatgttctatcaaacagttttggagtgaatgggagcttaacatgaagctgatcttatcttctctaggtctaggttggtgagtggtgactattcaatgtgtgattcattcactggcttatgtgcttgtttttagttttttggttgtgaatgtgttctgtgttcagcagccttttactagagagtctctccgttgacttttgtactcaaatattgctcgtttgtctgaagttgactgcatttgaccaccattgacggatggaatcttgaggtagctaataatgtagattaaaaaaagtgcccttcttctgaaataagtctttgggttttgactcaatatgaccatgattgctttgatggaatctgaattggatggatgaacaagagcatgcgattttttctggttaatgatcactagaatcacgaacacttgcatagactattgttagaatgctacaaaggacttgctctgtttgctagttgagttgcctccattgagacgattgttttacttccttctttgacctaccaatttaattatcacttttggcaaaacataaaaagcttataagaattttcttctctgacaccttttgttctgtcaaccactgattctcgccacaatttgaagactcacttttgcttctcgtctcaggtaccgtgccatcactagtgcatattaccgtggagccgtgggtgcactcctagtatatgatgtaactcgccgtgcaacatttgagaacgtagatcggtggttaaaggagctcaagaaccacacagatccaaacattgtagtgatgctggttggtaacaaatctgatctccgccacttgctagctgttcctacagaagacgggaagtcctatgcggaacaagaatcgctctgcttcatggaaacatctgcccttgaagctaccaatgtggaggacgcatttgcagaggtgttgacacaaatttatcgcatcacaagcaagaagcaagtggaagctggtgaagatgggaacgcctctgtcccgaaaggtgagaaaatcgaagttaaaaacgatgtctctgcgctgaagaaactcgggtgctgctcaaattgaagcctttttttgttttcactgttgagagagaattataacccccatggtccattgtttgattatgtccttgttttgtaacactatcgacatttgtatgagttttagaccatacactacataatgtttatttaactttatttcaagaattgttggtgaaccaggctcaatatgcatcagttaagcagaggaatctggatctaaaatgccgacgttcatcttcgatagttggatcgtcgctctccttgtcctccagttttgattctaatttcctctgtctttgtaatcttcaaaatccaaaaccacaacttcagaaccgggtcgggttgcgttatgttgtcgggtttaggtctcattttgtcactaaactgcaaacgacgccgttcctttagagaagaagaagaagataggagcgagcgagcgagcgagcgattagaagaagaaatgatggaggaaggaccaccagctccaaagatgcttcgaatggtctacttcgtcggcgccggatgtaagttcgctttatgctgcttcatatttttttctattttgatctcgattgaatccaacattccaataaaatataaaatatttcgcagttctatgtacattcgcgatcaataagtggcgtgagatggagagaaactcgcttctgaaacaggagcaggagaagaatcaacaaggagatgttggtttattgcctagagattcggttcagaaagctatgaaatgatgatcactctcttcttcatcttttcttgtaattttgttttgatcttgtgattttagtatcgttgacctaaagtttgcatctttttttaatgaaccctagaaatctgatactcgtactcattggtttctggctttgtgcttaatttaaagattgctgctttctgaactcaatttgatcaaagggtttcaataagtcactgcttaaaatctcttacgggtttagcattttcgagcattttaatgcaattcccgaccgtggatgtaatcaacaacaatcaccattaccaaatccaagtgagtgagttccggttgatcgattaccaattatctggagaaatcgttcaggcaccggtcgtgagatctgctcgtcttcttcgtcttttcaaacagcccaatgaacccaattccatagggcccattaaccctctaatgggggaaatgcctaatttgattgcaattttagtactctccactacttgttctgcagcatttgttccattttagccccactacttttgcgtataaaccatatataccttaaatatatatcatctcaccttgcttggcctcactaaaatttgaagaacgtcatagcgtttggtatgtaaatatttacatactttctacagtttgtactcacctagttatatgaaacaagattcgtatatatacctcacaagaattccatcaactaaggctcattctataatacacttgatctagatattgataaaaacaaaatagtggattatagtaactctgtcaataaaaattggatgagtcaaaacacactaaattataatctctgtatcatttatatataaatagataggtaacaagaacaagtcaataatcattaaactatgatgattccaaggtgatttaattaggcaaattaagtccaagtagtactagttcccgtaccaacaactacaagacgcttcttttttttgtacaaaactcctctcgccttcgcctgtgaacctctcacttccctcagaaaaatcctaatccctccccgggcaaacgggtttttctccgttaagccaccgttctcctcgtaagctgctctcagccgtccgatcaaagcatctaagcttccccacgcctgtttcaacgggcagttacactctcctggtggctctttctgtccgaagaaaacgcatccttggatatgaacttttgttttaccaaactggtcacgactttggaggaaatcgaggatgtggtttgattcacactcccatacgtgaactggtggcatcttggtcatgagatactggcaaaacgtgttccagtcgcggcttttttgtgactcataacggcttagagtcggtggtggtccttctactatgcatttgcctttgtttctcgtgtttgtactcgtcatttctgaaagaaaaaccttcagaaccagagacgatggagaaagtttctaccttttttttattattattccctttcaacttacaatgtctcggctctttatatagattgagcttacaatggtttaacctacttgggcgcagctgagctgtccagcatatcacatcagcacaaaatcaagagggtgtcaaaacgacagttttttatttgcgcctccgtaccgtacgacatgaggataaggactggctctgcatatcctttgcttttggcttcatttgcagctgaccgttgtcatttgctggactgtgattttgttgagttttaattgggcttcactgactttttggcccattaccaaaacatcttcacgttttgagttttggtgttgtcgttttgataattgcttctcttaaaagtcccaaatcaatttggttcgttaattagattgttgacttccgcatccctaaattatttacgcagaaagttatgcaatgtgaacgcatagcacgagatcgttcaaattgatagttttgacaatgcgttattgctctgaactctaaagaaagcaccttcataatagcctaattagatttttaagaacgtcatagcgtttggaaatttgtataaatatatacatactttatattctagggtttattctcacgttgttatacgaaaaagatttttcatatacttcacaagaattcaagttagactcatatatgccaaaaaggcaaaaatgaagtcctaatttcgtaatagcactctacacactttctcttagatattgattaaataggtaatgatgatagtaactcaataactacatatatcaatcaaaattaaatccgagtcaatacgtatacactctacatatatatatagatgtgtgtttttttaatgtaaagataaatgggtagcaaccaagatctcaagaattaataactatggatcataaaggtgatggaattaactttaaataatttgaactagtactagtacccgtaccattcataagattccttttcttcttcttcttcttatacaaactcctctggccctttgcctgtgaatctcttactgccctaagaaaaccttaagcggcaaagaactgagatactgattatagagtgaaggcagactattttttgtaaggattatagaatgagatcacatacatgcaagcgacagttatttgtttgcctagttaaacttgaatggtaagacttgggttcgaaccataaccatatttgttatatttaagcgcagtgcaaccaatgacagcctataatttgtaatgtctccgcaatctcaaaatcatcatcatacgatgaaaacgatctttaaaatcgtatccccaaccacatgtgcgacgtcgtatagtacggcttaagaaatttacacgagcatacaaattttcatatagaatataaacattaatttagaattaactataaattaattaatccgttttgacttctttatttcttattctaaattttgcattatatacacatctgtttgatccctttatttgtttctatcaagaccttgaaaaaatggcattagcatcacatattcttattcttctttctctttttcttctgatttccctcgtccgaccacaagttcctccaatggagcaattccggttccttaacaacggcgactttggagaatccacggtggagtacggtgcaagttacagagatttaggtgtaatacgtaaccaatttcgtctatgtttcttcaacaccacgccaaacgcattcacactcgctatcgggatggggacaggaagttctgattcaatcattcgttgggtttggcaagctaacccacaaaaaccagttcaagaagaggcttctctttcgtttggaccggagggaaaccttgtcctcgcccagccagatggcagagtcgtatggcagaccatgacagaaaataaaggtgttataggcttgaccatgaacgaaaatggaaatcttgtgttgtttgatgatggaggatggcccgtgtggcagagctttgaattcccaacggatacactcttggtcggtcagtctttaacactcgatgggtcgaagaacaagctcgtaagccgcaacaatgggtcttatagtcttatcttagagcccgaccgactcgttctaaaccgtttaatccctcgtagcaacaacaaatcccttgtgtatcacattatagagggtcggtttattccaagcgccactctatactcggctaaagaccaagggaccacgactcaattgggcctagccacgccggggctcaggcctgagtttccatataaacattttctcgcaaggcctagattcaacgcctcacaaagtttccttaggctcgacgctgatggaaatcttaggatttactctttcgattccaaggtcacgtttcttgcatgggaagtaacgttcgagcttttcaaccacgacaacaacaacgagtgttggttaccgtccaagtgtggagcgtttgggatttgtgaggacaatcaatgtgtggcttgtccgttgggagtgggcttaatgggctggagtaaggcttgtaagcctaagaaggtgaagagttgtgatccgaagagttttcattattatagacttggaggtgttgagcatttcatgactaagtataacgttggtcttgcgcttggagagagcaagtgtcggggtttgtgtagtggagactgtaaatgtttggggtattttttcgataaaagtagctttaagtgttggattagttatgagcttgggactttagtcaaagtgtctgattccagaaaagtggcttatatcaaaactcctaatgtgtgatcagtaacgtgtagaaaaggcaaaaaacataatgggcttaaagtactaataagcccattatatgtacgacttaataaaggcctttttatctatgtaataagcctctaattcgatgagatacttttcacaaatctttttcttcattgcttcgtcgagaagagaatgaacaatgaagtgaactaataaaacttccatttgcaatttcacgacctccattttcgtgctgagattctctaagctcgatggatctaacgacgacgcgtcagaggcgtccacttatatctgactcttcttcttcgtcttctacgaaatcttactcgaagaccgataaacctggccgatctaatggcggtgatgcggaggatggtggtctccgatggttcttgccgtttatagcgctttgttatcttcgttacatgagcgcgacttctaatatcattcatgactgcgatgaagtgttcaattactgggagcctcttcattatattctctacaagtccggatttcagacctgggaatacaggtttgcttttccgctacatttgattatgttactactgagctaaagacccgatgttagctcgagtgagcatgtactttgagctgtgattctatacttatgtatcggtgactactgattctcaacattttgtttcaatttgaaatcagaaatgtgaggttgggatttggttttagtggaacttcggtttcaacggaatctttattaggttatcgagctttgttttatatgaagatataatcatgagattgattactttttttttttttgtgtgtgtgtgtgtgtgtattttgcagttccaactttgctcttcggtcgtacttatacattctattccatgaattggctggacggcctgcttcttggtggtttggtgatgacaaggtaagcaatgcatacttactgatgtacattctaatcggtatagatataactgcatgtttcttatccagtttacgtctatcttttggataggttagagttttctatgcagtgagactctttctcggactggtttctgcagtttcagatactgtcctggttgttgcgctctccagaaagtatgggaaacgtatcgctacctatgcagttgcgatgctctgcttaaccagtggctgcttctttgctagtaccagtgagtgttttgttttgttttgatttgttgttacacttgcttaagctttctgtcatatttccttaatatgcatatataggctttccaagttattcttgcatccgataggttttagtttcaaatgcttgtataagttattccaaagacattgctctgaatttggctttgtgttctggtttcttactaattcatgtttctctaaaattttgataggtttcctccccagttcattttctatgtacgccataagcctctcatctggtttattacttttcgagaagtatgccatggctgttgcagtttcggttgtcggggtgattcttggctggccattttctatcttggcctttttacctgtcgttatttactctctggttaagagattcaagcaagcatttatcgctggtgcagtcaccactatatttctccttgtaagctaacaccaatcctagatgctttgtctgtgtgaattttatgggaattattggatctcgctgactttcattagcacctgtaactttaaattactattttctcttctaattagttttgtctcttttctagggagtctcactacttgtggattactattattacaagagatggacatcatcagttttgaatctcttgatatacaatgtgttagggggtggagagagccatctctatgggactgaaggagcgttattttatataagaaatggatttaacaacttcaacttctgtttcattttggcaatgttgtttgtcgcaatatatcctgttatcagaaggaagtatgaccgtgccctgctggttgtgatttccccgatgtatatttggctggcgttcatgtcacttcagccccacaaagaagaaaggtgattttctaagatctttcatcttgtaattttttgagcattcgtatggtggcttctatatcgttgaggaaaccagttttatgatacttttacaaaatcacggtattcaacaaacaatgtttttgattgtcaattaattgactgcaggttcctttatcctatataccctcttatttgtgtctctgcttctgctgttattgagaacatccctgagctgttccgggaaaagtatagctcacgtgaaagtcttctggtgacagtaagttccaacttacaatatctcagtctctgatttatacctttccgcaaattgaaaagaagtagattgtacgattctcacatatctgtttaatacgcagataaccaaatacatgcgacctgtgattcttggttgtatcttatgtgcttcacattctcgcacatttgctcttattaatggctattccgctcccttggaggtctacaaactactggagcatcatgatgatgcaggaccaggtatatccaattcgaactgaacttcttgatcattataatgctaagacgagtgaagatcacatctcacttttacttcaagaatagtaatttgccattggaaaaagggtaacaaagtccttttgacaaaagttttctaatcactgatgacttcttggttggttttgtatgtcaggttctgttctatgtgtgggaagtgaatggcatcgatacccatcatcgttttttgtgccccactacattagcgaagtacggtggatcgatgatggattccgcggtcttcttccattcccatttaacaatacacttggaggcacttcagcatcacctccatacttcaacaacaagaaccaagcatccgaagaacaatatgtaatactcacacactcttctctcatgaaaccttcaaaatatctctaaacataaacttaatcatggcttgtttactcgttccattttttccagttaaagaacatcgaaacttgtacattcctcattgagttgcagcttagcagaccgtatcagtatcgaggcagcgacttatctacatgggaggtataggaatcaaaccatcttcctgaaacagaatccatctttgatttcacttcacttcttcaattggttgttttgacccttttttcaggctattgcggtgttgccttatttggacagagagctgtcgccagctaagtatagatcgttcttcatcccgcacatgtggcaggagaaaaatgtgtttggcaaatacgtagcactgagaagagtcccaaaatgatcacaaatcgttaaaactccttagacttgtagctttaactcagttcattgggtagttttgggagaatgtaataactaataactgattagtatcggctttaagttcaggtacgttcacggttcgtagttgtgttgttgtgaaagagactagttttaactttgtaagaaatctccaaatggtcagaagaacgtggaagattatgtttatgacattattgtgcaaagtctatattctttttgtcttttgatattgcggattccaattttggctatcgagaaaaagggagaaaatgagaagactatggagggcacttcataattcatatttctgtcctctttaagttagcgtttgaccaacgcgtcgtaaaaaggtacagaagaagaacgcaatagaattgaagataatgaactaaaaaagttgtgtatatatattgtaaaagattatctttgaagaaaagaataacctaaacaaggtattaatttttctaaaaatttgatcgagtcatcgagatcatggtaggtatattgacgtttgtaataatgttgtcactatgttaccaccagactaataaatagtgcatgtcgtttacaaaactaagaaaagattattttcttagtagttttcaatcatggttaaaaaagtatttgaatatggaaattattcttaaaaaaattgaatatgaatatggaagagaacttacagaaaattatttactaaatgtattccttacatatttcatgtaattatatatttttactagcataaaagcatcaatttatttccgtaaaggaaaaaaagaaagaattaaaaggatcaaaggggcacgaaactagagacgacgaagcgtactcgattattatcagcctttggtagcttcgttctctctcaaaaaccctaacttctctgtgacgatcgaatccgatagcgtgcgataatggccaatagtaatcttccccgacgaatcatcaaggttagttttccgatcctctgtagcatcctccgatccgtatctcccctcagtttcattttggggaattctaatctgaaatccgaagaaggaaccgacggattatatacctcagcagaactgggaagaattttcgatagcttgtacgatcttatatcatcttcgtcatcttgatctgacttttttttgttcttcgatctgataggaaactcaacgtctgcttagtgaacctggtaatttcatcacttcattcgatccttgttgatttctcacagttgattttagctcaaacagttggttttggtagctggaactattgattttaattctaagttgtatatctttcgaaattgcagctcctgggataagtgcgtctccatcagaggaaaatatgagatatttcaatgttatgattcttggtcctactcaatctccttatgaaggtagtcaaattgttttaatctcccaaagatgctcatcgttacttcttcctttttcttctttaatgcatgctgctcaacgatttatcgttatcgtttctgctgcaagtagtgactctgctctgtctctatatttgtttatacaaacggatatgttcgtttaggtactactaggtctcatagattgctcatgttcggattgtagtgttatgaataacgatgagtctttaagctacctttgagttcatttcgacacattttatttgttctagaatacacaatgccaagtcgaatttccagaatcaagtctgctgttttatctatcatcatatttctgttaattgatgtttaccaataattttgtttccttctcaatctgtaggaggagttttcaagttggagctctttttgcctgaagaatatcctatggcagctcccaaggtaagttgcttcaacttttgtgtgtttttcttctttcatttcatgtttcacttgttttggtaacattaggattaccccacataacattgttaagtggaggtaaatgctctttaagtgaatgtctctctactcttaacactaggattttatttatgggtttatgagattggtgattttggttttgttatgactactccgaatgtattttcttatattatattagacaacgtatccaagtttcttcattgatgtagagtttatgggtcttattgatgatatcatttgaaacacaggttaggtttctcaccaagatttaccatcctaacatcgacaaggtctgttgtgaaaaatttccttttcttctcttactgtcaagataactaaccaaacacatggtcttttatacttatggatcatgttttgtttgcacttatcatgtatatatagcttggaagaatctgccttgacatactgaaagacaagtggagtcctgcactacaaatacgaactgtgctcttgaggtatgaatatatccatagaatcttctttccctactaaatccaaaatattgtagaaattaagatttaattattcacactttctgattttccattgccgtgtaaaaacagtatccaagctcttttaagtgcaccaaacccagatgatcctctgtctgagaacatagctaagcattggaagagcaatgaggcagaagctgtggaaacaggtgataaaatacgatcgaaaaactcaaaaaagttgcaacaaaaactttattcctctcctctctaatctggtaatctcatatcaatgtgaacttatgcagctaaggaatggactcgtctttacgcaagtggtgcttaaagaagactgcaaatggagaaagatcattgtcatttaaataacattatatatggtgaaactctatctcaaggttttatctgaatcctttttctgaaaacagaggaaaaagatttgtactctctgaatttgtataactagggggatctaagactcgtttacccatatctggaatctaactttcttcaattgtgcttgcttttgatctttgtttttgttatatatgctctataataatctttataaagtggtgtagataatcagattttcacaggttgtgaatcaaagtaaattggatgaatgatgcataatgttactattacaggtgtatgaagcagcttattttggtcaaatgtaaaaaaaaaaaaaagtggtaaaaatagtagtcacgaggaatgagacttgagattttgaaaaatgggcataatcagaaacttgactcgtcagttgatggacgcctcaagaagtacctcagactattagcaaggacctacaaatacaaaatttgatttcatttcagtaaaaacatttcaacttatcaaagagaaaagtctaatttcagaattttaacctgctggagaggcttgattagggctttgttcctgtagcttacatgaaacttcaccttagccaacaaaccctttttgtttcacatacaacaagaagaagcaacatgagaaacagagcgatattatagcggagggtatatgttttagacattaaaaaacaggattattagatacctcggtgtcgaattctccagattcaacagcgacgctgatatctgaaatgatcttcaccagctcaactaatagtccaggtctatccgctgattctatgaagagtaaactgcatcatcaacaaataattatggatcaatgatcagatcatatatcataagaataaaagcatttggataaggttctagagttgagataaggtatgggtatacattacctgcggtctggtccatcatcttcaatggttatatgtgttgctatgtccacgtcaatctgtcaacatcccaatccaaaatacagaagaaggaaaatgaattttgaagctactttgaagttgcgtgggtattcccttcttcatcaaagtgattaatactataatgaagtttaatacttgtactctacattgacccgccaaatccaaatatgttgattattagttaagtctttgttttctctattattgtttcttatctgtacgtgaccgaggaaacgacaagcagtcttgacctttatgttcgaggatgctaactacttgaagaattagtgcaatacaaaagaagtggataaggttataaaaagagcatcacagtttaaggtttttaccggttcagttggaggaagaacaccaaaagctgctcccattgccaactgagaacttgattcctgatccaaatcatcgagaagcaatgtgtgagttaaaaaattatgcaagatataggaaaaatagaaagagaggatattaggatgtgaagtagttacaggatgaaactcaagcagattgtttatgactgtgagacgaatggcctcaagcaattcagggtcttctacttttcttccactatctctgttgtaacaacaattacagtcagctcaaaactcaatctaaagtcaactatttgacagagtcaatcgattcaaagcaacattaactatctaaacgactcttggagctcaaaatactctttgatgatatgaaaagacatacgctctagtaatggcaaatttgttgtgcttgccggaagaatcaaggtaaacatttgccttgacgacattcaatcccaagtttttgagcgcattcatctagaagggcaaagttgatcagatcaagaagcagtcaaaaaagcaggaaaggaagtaagaagcttttgtgaatgttggtcgattatgcagagctagcaacaagtgagtaagaagaaggtatccttccttacagtgtcaagtaaagctccaagacgatctccgaatgtaacttcaagaacggttgcatcagggtcagaatcttggtcgattataacaactggagttggaactttatcagaatcagcagcacttccttcttgctttccattcttcaaaatcaaaaacaaaaacatataaactttaaaaagtctattcaaattactagtgtccttgtgtaatcatttcattttcatacctccacagcagtagcatttgatgctctaatcttcaaagtggataatctgaagaaaaaaaaaaaaaagaattgaattgaagtatttgaatccgtagaagatcagctcaaaacaatctgtgctttgaatcgaattccagcaaaagatacgaatttataaccagcaataaaatcatttggacattttaaaaagattagcaactcggaacacaaaattctgataatcgttaaaaaaaggtatcagatgctttttaaggatttagagatctgtggagaaaattcactacaaaagaatttgtttcggaaacagtatttacttcatgaaactcgaatcagcacaaaactaagatcacaatcgaaaaagcaatccaaaagaagctcgaattcaaattctcaagaaggcatcaagagatagccaaaaaacaaaaaccttaatcgctcgagattgacaagaggtttatcgacaaatccaaacgtaactgtcctaggaggcaagcaaagagctccacaatcgcgtcttaaagcaagagagctagaagcatcagtgaagcaaagagcagaaccagaagcagaggccatagccatcactcaaaaatcggaattaagaagaatgaggaaaacgttagagaggagtagtagtagtgatgacgaagaagaagaagagcctttggacaggtctcgtgttatccgccatgagaggataataaaaaagatgtgacacacacacacaaaaaaaaaatgcccgtttcgtccttcttattatcttcaacgttagatcgccatttctcttgctttccctttccttgcctacttttacattttctttttaaattccaccaaatattgtcttcttttaaaatttaaaaaagtacacaattcgacaaattcttcacattcctattggccccgattttatcggatgtgacatgctattggtcagtgttttaccgactagttaaaacattaggtggcgctaaaacaaataactaggttaaatggaacatgacgtcatcctttataagtaatggcctttatggcccaaactttcatctcaaacgcttcagcccactgtttaatgggcctaacgctaaagtgatcatcatatcgaaaattacaagtttgccactttctcgctgcttcatccctctcgttggttcgtcagatttgcgtccaaatccctccctaaaaccttgagtcagactcaagagatacgaaccagagaaatgtggaagtacggtttaagaatcgccgccgggaatgccaaattgaatcggaagtcttcgattctaaataataccgtttgtcatttctcacctccgacttcagccgccgtgggaacacttttcccgagtttagatcacgttcatcgatgcttttcatcttcgaagagcacgaaatcttcaatcaccaaaacgaagaaatctgaaggcaaaaaatccaaacctaaaggcggcgatcctggtgccgccggagctgaggaaggagagtttggagccgccggtggagacgaccttgaagcgggtcgtgccaagagactagctgatgatgagaagattccgtctctagatgttggtcctaatggaaggcctctctttactcccaaagatactacactatcgcagctgactcacaaggatattggctcctacttcaaattcgagtaatctcaattctctctttcccttatgtttctgtttatctatttttagaattttgtatgaatcgttttgtgtgtgttgatgtaatatatatattgtgggaatgatagtgaggcagcactgaaagcagttctgccggaaggattagcttcaggaattgaagatgagtttaatgaatcatggagacctgcattgcttgtcagaaaaagttacttggctctgagggataattttagacgcattgctgatcctcccatgtggccaagtgacagtaaaggtgtgttctttgtttccgttatgttgatttctaagtatcacgattagtgatctcttctatggttaacagttttgtgtgtttttattttcctttgaaacgaaagcagcctaatttgtttgctaagtcttgcttgtcatatgcccttatccggggatctgtaataccataggtatttataatcattgcttcctctttctttctgaaaaggtgtcaaacttcagaagcagattgtcttggatggccctgttaagtgtggaaagagtattgctctggcgatgcttgttcactgggcacgtgacgaaggctggttagttttatatgcaccaaaaggacgtgactggactcacggtggctacttctataagaatccacatacagggttttgggacactcctctacaagctgagaatattctcaaggcaagattccacatgcctcctcttttggaatggaattcttcctatttaacagcatttcttaataaacttaacttctgtaggattttgtcaagttcaatgaatcccgcttaagagagttacggtgcaaaatccatgatcctatcgtgcttggagagggtgcgggtgttggatacttgaaaggagcagatgctatgcctattcccgaggattcaactctgtatgaccttgtgcaaatgggaattaagagcactcatgcagctgttaatgtcgttgtgcgacttagaaaagaactctcagttgtaaaagatgtaccagtgttgattgtaatcgatcaagttagtccccagttttcccctttatgataccatatttcgccttctattattttaaatctctctctttttcactagagctaatgctgcttgtttcttgttgtttacttgtctttcagtataacagttggtttacattcagcgagtttgaagagcccgtaacaccgcgttcttgccgacctatacatgccagagaacttacaacggtgaatttttcttccaaattgatttatgatccagaaaacaaaaatcgcaattaactcaattcttttggcaggtgaatgctttcagaagcatgatgcatgaagatatgatggtgggtgcattctcacattcaacagcagtaggaaaactacgcaaagacttgccagatgttccagttgatgctcgtcagcaattcccacgttattctttggatgaagcagaagctgtctgctattactaccttcggtgagttaacatgaaaccaattttaatagtactcagctctgtaatcctcctctcaactgatcagacccgttttttagttatagttcattattgagtctatctacttgacatgtgtatgggcctaaaccgaatatcgatttcacgaacgttcaatatggtattgtttcaggcaaagactagttcggcgtgaagtattcaacgaagaaaactggaagaagatatactatctggcaaatggaaatggagcagagatgcgttggttagcccctttcatgcgttgaggaacaatatacaaacaaacaaaatagattgtgatcttgatttgtcgccttttctggtgttttaagttatcccgttagtttgggagagaaactcttttcattgacctttctgaattaaaggaagatttttgttgtttgagtttgtagttttaggtttccttgttgtctgtaaaacactggtttttggacctaaatttctttctaataaaatcagtgcctctcatttattatcgctcgagttgataacaatgttatgcaaaaataaaaagttgtgaaagagtgaaagaatcactcacaaaacaggcaattgatgggaagaaattgcggaactgcatatttattgtgcggagttatgattacaccaaaaccatatagcatagaagatagccaaataggtttaaaaagaacaccaaattgatgtttgttttcacaaaaaggaaaaatttagacataacataacacattgagaaaagtacacaagttctattgaaaaagaatagacatgaagagctatacaaaccaaaaggcgaagaagaagaatgagaagaaaaaacaattagctcatcttaggaaaatgaaaccacaccctccaagcatcaccatcctaaccgtaataactcggagacccaaaagaaaaattttaatgagaattaaaaggaaagaaaataacactacaaccaccaccaaacgaacccaccagcaagatcacattttttccagattcatgaaaaatatttaatgaacccaaactaggatgttggtgatgatgatgatgatgactcaaaccggtatggcatcaacattggatgagtcttcacatctcaatactattccttcaagacttgttgggaatgtgcatctcctccattgccaaccagctgctagtggctctgatgatggaactatcatcaacacattatcgtttctctgcaccactccaatcacactcactgtacttccttcttttatatacctgaaattgaaacccagcatcgagtatcaggatcgaagcttctgttaagtttttattactttaggagttgttaatgaagtgcttgttcattacccttctttgagccgcattattcgatcatcgcttgttagattcttcttgcctaaccatcgtacaaaatcgggagacacttgctcgcttccttgcttgaagtcgatgacaacagaatcatctacaagaggtgttacctttgcaccgcttccggttttgactaaggctctgagcccagactggaaatcagagatgtaaaagtccaccacatgtctctgcaacataacattacaacgaagtgttttgatgggttgaggaagataatataacatttcctctgtcaaaacgaaaatattgggaagggaatcactaacctctgatgatctcagtccccatgtgaagtgacgatgggaagaattggctggtttcgaaccccatccacgatactcatatagacatgtcgatgtgtacacacatctgggaactctgtggaaggatgactcaagcggtacattaccacaagttaccaccttcaaacaataaaacaagaatcaaggtcataaacataacaagccaagattacaaatgcattacaatatccatccaaaacatgttctattccactatttcaactaagtagtactatgcttgttattagtttatcaaaggccacatgcaaaaaagcaatagccttctcccagttgcagtcatatagttactgtatgatcagagaccgaatatacatcctggcaagtagacaagtagcagaaggagaagccaaaaaacagtcaattgtaagacgcgcatggatgcttaccccagtgaccttcacgtgttgaccatttttggcagttctaagatcagcatcaggataacgagcaatgaaatctgtgataccacgtcttccccaacaaatattccaaatgaaaagtgcagcaacaactgtgaacaagatggcgacaacaacaaggagaattgggttgtgaactgcaccaagaatgaagcctccagcaaggaaccccataatgaatataagaacaaccagccacagcacaggctttggaaagctcttcaggcaggaaaagtcatcttctggaccaagggtagttaccgcctggttgtggacaacagtaggcatatgtgacttcatcaaaccagaagagtctagtggaccagaaaccttcctgggagccccagatgaattcagagggcctgatgtaataggcccagaggtaatgagacctgtagctggaagaataggaatagaaccagaattttggcgagttacaccaccagattgagggccagatgatttcttcaaaggctctccatgcttagataatggtccggaattcgttttcttcattgaaacagagccagcagaagctaaagagccagacatacggccagtggccataggagcacctggacctgattgtgcagttcctgcaaatgagccagaccttgaaggagcacctggtatgggaccagacttcctggacttagtcccatctgctggaatatcaaacatcttccccaattctcctgatctcttgatatcaccaccagtgtaaggcatggctactgcactcatagttggagccctttctttgggttgctcaggccgaccagacacaaatagcccattgctgagctgatgagatgggtatctcgaacccattttggtgatttaaagaaaaaccagagcaagttactctgagcagccgggttcaaaacgtaagaagttcaaatcctagagaaacaggagaggaagaagtgagaaatgagccaaatgcatactgcttcacatgtatatagacataacaagattaaaataatgaagaaaaagtcctcgtcagattaaagattgtgacaggtgaaacaatgggcaataccacaaatcagaaacagcatcaaagacctatgccgacaactacaaggctagcagccagaagtgagtaactcagccatttgtattactaaagaggaccactaactataggctcagatctctaagtttctaccagcgatttttgcggtaaccaggttttgtctagttcaattctaaataacccaatttatagaaaaatctgaatgaacagaaaaaaaactaaagataaattcaacgcagcatcacaatcacatcaaagaaaggagttctctcagtttccatttcaagtaaaacaaccaaaatcggaaatctagatcaccatttttaacaaagccccaaaattggaaccaggtggaaatgaaattggaaaaacacgatcaagcagaggaaaatcgaatctgggaaaatgacaagaggtggattggaacctgagtaggagaagagagtgagtttcggagaaaatgcagctaacgatatcaggaaaagtgattggtattgtgggagtgacagtagaagatgaagaggaagcaatactggggaagccaagatcccatcaccgttgagctctctctctctctctctcgtctccgtcgtgtggatctcgatctcgatctctctttgagccgcaacaactgatgagttgtctcagtctctctctctttctctctcctcttccttttcctctctctctttctctctctaaaagggctaagttttttaaaaaaatgtctaccaaactgatacaaagaggaagaagaagaaacactctgtacttttttttttaacaagagaagaaatgaaaacaaagatgtgaatttaagaaaaaaaataatgtgtcgacattacaaaactgtatttaatcatcatttgaaaacatttaatcatttgataaactatgtaacattacccccttaatcttctttccacctaacctttgtatcatttgttggtctttctattttataacattccttaaattattgaattaaaactatctaaattctgttaattactcacttgtaatccattttgttcactggaaatgtaaattttactgtcttattttgcaaaacactcttgaatttttttttattttttttctggtcaataagacacaaacatgttggattataaactattgtgatcataactctgttcggtaatgttttcaatatcaaatttgatagttggtgattggatttgtcaacatctctttttttttttgtttaatcctttgctaagttaagtcggccacatatatattgggtacgattttcataggtctttcctcacgccagaagtgttgttttattttgttgattgagttattaattattggaagcttttctttcaagcaaagtaaaatgcgtaataatgattagtcacatccaatggttagtcagtctattacaccgttaatcaagctctggtcatataatttttttatttttggaactaacacttattagtttaggtttccatcacctatttaattcgtaattcttatacatgcatataatagagatacatatatacaaatttatgatcatttttgcacaacatgtgatctcattcattagtatgcattatgcgaaaacctcgacgcgcaaaagacacgtaatagctaataatgttactcatttataatgattgaagcaagacgaaaacaacaacatatatatcaaattgtaaactagatatttcttaaaagtgaaaaaaaacaaagaaatataaaggacaattttgagtcagtctcttaatattaaaacatatatacataaataagcacaaacgtggttacctgtcttcatgcaatgtggactttagtttatctaatcaaaatcaaaataaaaggtgtaatagttctcgtcatttttcaaattttaaaaatcagaaccaagtgatttttgtttgagtattgatccattgtttaaacaatttaacacagtatatacgtctcttgagatgttgacatgatgataaaatacgagatcgtctcttggttttcgaattttgaactttaatagtttttttttttagggaaactttaatagttgtttatcataagattagtcacctaatggttacgttgcagtaccgaaccaattttttacccttttttctaaatgtggtcgtggcataatttccaaaagagatccaaaacccggtttgctcaactgataagccggtcggttctggtttgaaaaacaagaaataatctgaaagtgtgaaacagcaacgtgtctcggtgtttcatgagccacctgccacctcattcacgtcggtcattttgtcgtttcacggttcacgctctagacacgtgctctgtccccaccatgactttcgctgccgactcgcttcgctttgcaaactcaaacatgtgtgtatatgtaagtttcatcctaataagcatctcttaccacattaatttaaaacaaagaaaacatcaaaatggctgaaaaagtaaagtctggtcaagtttttaacctattatgcatattctcgatctttttcttcctctttgtgttatcagtgaatgtttcggctgatgtcgattctgagagagcggtgccatctgaagataaaacgacgactgtttggctaactaaaatcaaacggtccggtaaaaattattgggctaaagttagagagactttggatcgtggacagtcccacttctttcctccgaacacatagtaagtatatatactcaatctttgcttggtcggggaatcttttgttttgaactcaacgagccattttttgtttttaaatttcctctctttttgaatagttttaccggaaagaatgatgcgccgatgggagccggtgaaaatatgaaagaggcggcgacgaggagctttgagcatagcaaagcgacggtggaggaagctgctagatcagcggcagaagtggtgagtgatacggcggaagctgtgaaagaaaaggtgaagaggagcgtttccggtggagtgacgcagccgtcggagggatctgaggagctataaatacgcagttgttctaagcttatgggttttaattatttaaataattagtgtgtgtttgagatcaaaatgacacagttttgggggagtatatctccacatcatatgttgtttgcatcacatggtttctctgtatacaacgaccagatccacatcactcattctcgtccttctttttgtcatgaatacagaataatattttagattctacatttctcagcagtcagtttaatgagaaataaaaatagggatttgatattgtgtttttgcattagggattttagaactcataatacatgactctaaaagtctaatcttatatagagtgggttaaagactaggatacgtagtctagtaaataggaaatggtgttgtccacaaaagggatttagtccctctcgtatgctataaagttatcgctacccactgacccaaaattatctaagacgatcgtaaatatctattttcgaatttacaaaaaaaaagagaatgatctatttctgatccaaaatatctatttagcagaaaaggctggaaatatttatatcactaagacttaaaaaaccaatgattgtgatatgtgacggtgattcaattagattactttcgatcatgttagaagatagatactttcgagtttcacttttgtcggtaaaagattgaattagttatcagacacatatatgtaaaatgtgatttttattcatttttctactttggaaattatcttcattcatcaaattgtgttacacttacaaaattcatattaattttctaaaattagattgaatacgcccctaggatataaaagtctaaaccatgggtagtaaacttcctaataatccgtggttattcgatagtactaaaaaagacagagctaatttagttaagtcggctgaaaaagttaaaataataaatatttttgtaggtaataacaaaataagcaaacaaaaaattacgataaaaaggtgggaaaaataagctctgtctcacacagcattatccaaaactcaaaattacagcgttgaaacagaaaccgatctcgtcgctgattctcttttcttcggatccttctagataatggctcgatctttctctcgttcactttctctatccaaaggccgtttcgccgccgcgtcatcctctctcctcccttcgtcgcaccttgtttcattccgatctcaatcttccgatcgtcggggagatctgtacgagattgatacctccgcggcttctcaatcgccgtcggatcctttaatacagaagctagaagacgccgttcaccggatttttgtgcgccgagctcagcctgattggctcccttttgttcctggtgcgtcttattgggtccctcctcctggatctggatctcagtctcatggaatcgctcagctcgttgtgaaactcgcgaatccgttaacacacgaagaatctttatctaccaattcttctcatggatggccttcctccgattatttccttaaaggttcttattggtcattctctctctggttttttatggataaagcttggattggaatcttcaatatgttactcatgctttagctaccaactaaattgattttgaaattgatcaaatttttgttgaatgtaagcattcatatgatttaactagtggcaggtttttgatatgttgataatgctatgtcaatcgtaaagttagtcattgctcgatgctgttacaggttctgaatgggagatcattaatatgtgattaacatttttgagaatctttaatcatataggcagtactagcgtctttggtggaacaggttcttaactagttgtggtgtatgagaattgtttgattgttggtcattcgttgacatatggtttttgtttattgggtttaggtgttcaacctcaattgatggagaccaagaccgagacaacttcaaattccgagtctcactctgaggacgaggaagtgtaaaaatgacactgcttgtttgggtgagttatttggcaaaactaaagttatgaccttgatggattgagcaaatcacatttctatctatatccatgaatcctcaaggtcttatgattttgttgggtttctgataaaagaaagattgaagcttgcaggctcttcaggatctcttgtcaagaccaagagctgccgaattcggacaaccaagagcaagtgaaaagacgtgaaatagaacgaccatatttctatacctgataccaaaatgtggaatatcgaataagactagtgttgtaggcttgtgtagcatgtcccgctgtttctcttttaaacagttgttgtatatatatatctctgtttccttgctctttcacttatttaacaaagagttcatgttaatgaaattggaaatgaggtactcttagatatttctttctataatacagtctacaaaaagaagtacagcgccaattgaacattatacatttacctcaaactcaaccaacagaaacaaataattcatcgtcggaatcggaaacatccacattttctgtaaattccgatttccatttctcgaaaaccgatctaaattcagaaaagtctccgcgatatcgagacaagagactatacacttgaaacttagtattaggatccaactcaactccctcctggatgcattccctcaaaatctttctcactttctcagtctccttctccttgcacagaccagaaataatagtccgataagtccgtcgattcggataaatcccaccttctttcatgtcgcaacacaaagaataggcttcctcgatccttttcgcacgcacaagccccttaatagctactgtatacgacacaacatctaaaggatacttctccaagatgcatcgtttaaacaaatgaaccgcggtattgtatttaccaagctctataagactgtcgattatcgcagaatgaaaatgagcatcgagatgttttttctccttgattattattttatacatcttaatggcagcgcgaggtgctcctcctcgacaaagtgcactaagatacacagtatatgtataacaatccaaagcaaaatctttgtaagacatgatgctgagtactttcaaagcgtacgaattgtaaccaatcttgctgaaacagtttgagagcaagtttccagtaaccagatcaaaatctgttcctataccgtgggtgatcctaggaacgagatcaaacttcccagacaaacatagactagacagtattgatgcaaaagtatactgatccggcacaagtttccttttttccaaactagtgaaaaccttacgagcttcttcgaatcttccgagtcttgtgtacgtgtgtatcatcaaattgcaaagaacaatatctggagctaaaccttcagattgcactttacttagcacggtaaacgcttcatcaaccattcctaaatccacaaaccctttgatcaaactagtatacgtcacaagattaggtgagcaaccaatctgaatcatcttattgaacagatcaaccgccttttgcggctctcctgaacgaaaaaacccgctaaccaacatgctccatacattaacagatacagagattccactacaaatcatcaatccaactacttgaaatgcttcagagacgcagcctgttctacagcacagcctaagaatctgcccaaacctctctctgttaggataaaaaccttctccaatcattctcttcaaaactatcttcacaccaaccaaatcccctctaccccctctactgcaaaaatgactcaatgcaatgtcgaaactaaagaaatttcgaaaacggattccttcaaaaatttccagagctccattaacaacattgagtttgaaattaacatccatcatcatattcatggcacgagtgttgggcacaaatccaaaactactcatgccagtgtaaacctcaatagccttatcatagatatggccacgccaaaatatttccagcaacaacaaaaaaacccgaggcttaatctcacaaccagagattttcaatctctctatgattcgatcaatgctatagtattcacgagttagtttctcaacaacaccaaccatgtgatcaaatgctcgatcatcgtggaagtaattgttctgcttcgcgcaccagaagaagaaattcaaagttttgagatcagctggagattctcgtaaacaagaatacacattatcgtgcgtgagtggcttcgcggcagtatactcccgaggatattgaccgtgaatcgaagagaaactgagtgtgttaaggattctcttcctctgcttcacccaattgcatctccatagcatcttactcgtgacgctaagatcctaaccatgaaacggggtttctcgggaaagagagaacttttatgggaaacccagctgagatcgaggacaaagtttgtgacatggaaagggaacaacgccggcgaggttagtgaaagcaagaaacggcgaaagggtttttggtttggttcgaagatttaggagaatttgcggtggattcaataagggatgactataccgaactcggttcggttctttaggtatcggtacactccggttttaggttctgctgttcatttaatttgctagatattcatttccttagaaaagattaactatgattaatatttctacatttaggaactgaaagcattattacaactatccaaagctatgaacatgtaaaggtggaaagaggacaaagaatataacacgtttaggcaaattgtgtattacaactctgaaggtgtttctcaatccaaaatctctccgtttcttcggttcaatacggagtttctaattgaactccgaaaaagcatggagagacagaacaaacatagtcctgttgtacacagaagaattaacagtgtcagaaaaagtatcctacactaaatatcgaaagcatcattccatattatggttaagacttaagagcgaaccattgtgcttttacctgcataggcaatggtcacacccgatatgattcgtcctagagctgccaagaagtaaagacagatcacaacctgagagacagaaacaggcgaagataaaaaaagttcagtttagaattctgccaccaagcataaaaccagagaactgcattgcatcggagtggtaattggctaaaaccacaactgacaggttctgtggaatttcagtcaatggtcttaaccatctttgtcttcatcaataaatgcttgaatgttgttatacacatttcctattcatgcaggcaccgcaccgggtgatcgaagaaactacctcttgtaatgcaaacaaggaagaaaccagaatgcacttgccttaacaaagagcctcttgtcatgtcctgttgctgcaacccgcagaacggattcagctgctccaacagtattagctaagcgcgccacaatgttacaggctgtgtcttgtgatatttgccactctaatggatccacaggtacccttcacacaaaagttactactttgttaaatcatgtgaccctataaagactgcaagagtatttcaaacagtgaatcatcaaatcaattatactaataacgctggtaatttctgcattgatcagagaagagggatgaaaatgatagaatgatgagaaatacacagttgaaaaacacaactttttccccaacgctcatggtcatgaagatcaaaagctgttacattcaaagaaacaaaagattgagctttgtagataatgtgacttttaagaatgcaagagtaaatttaaaccgtttatatcatcgaatcaaatcacacttttatggttcctagttccttatgttgaaaccaaaagcaaaggcaagcaaaataaaaccttttcatgtcgtaaacacgttgaaactagctagtagcatcacaacaacaattcacacgattatgtgaaaactaaacacaacaaaaagctcactcattttgaattctgaacagatcaaacagccaaacaaagaatttctcaatttgtaaccttagatcggcaaatgggagatgtaacagaaagcccaacactcaaagaaagaaaatttaaggaggaaattagagaaacttacgagacattgaggtgacgaaaaagaaggccgagaatggcgagtgaagataagagaacgatgagaacgtcggagatgagcgagagaagagtcgcgttgcgattagcgcaatggtgatacacaagcgtcccgcttatcagcaatcctatcgcctttcccatttcccccatctcttcttcttctctcttgaatttttggttccgacattttctttcagatgaaacttcccaagagtttcggtttggattccaattgctggtttgtttggttcagaatcgattttgcctttggcttattaagaaacaaaccaaattcttggtcagtttggaaacccagcaatttcgtaattagatattgttaatggttttgattggttcaaggcttcaagcctcaatatttagttcgatatagcttatttaaaaatttatatgtatttgacataaaagaaattttcactgaaattggcgggttgagccggcccgtgcagtagtgcaacgcatgggcgactcgcgaaagcccagatagcaagctatcttagtgggctttctcccttaaaaaatagagttaatatcgtgtgggccgatggcccacatatcagatattaaactgataagaacagatactacacttgatcttagccaaaaggccgagaaaggtatgagttgcgatatggatacgaagtgtgttttatatcaaacgtggtagagcgagtgtttcttaaactagcgatgtgggactttataaaaaccaaattgaatgtacgagctcttgtaactcttagaattagatcatcctcctccttcaaaatataaactctgtcatttgtttgagaaggagagctactatggctacattcgcaaggtctgatttgctctctatctaatttttttttgaaggatgttcctatttgtgatctaattttggccggataactaaatttgtaagactgaatctgttgattcttcccctggtttgcgaatttatgctttgtcgattctcacttgtttgacaattttttgtccggtggaatcaatatttcgaaatcagaatggaattacatgagtgtatcagaatgtaggtttcgaacaaacaaggtttgtgttggcttttgtcttgagatgatttggtttggtttgtagctaatttatatatttctgctagccactatcagtggagcttggatcaggaatattgggaaatatcttttgatggaatcaggttcagttggaattttagagttttagattggaaataacataacaagttagagattctagcttctcactattgctagagagtattctgttaataacataaaggcctttggagactactgcaaagctatagtcttttctgatagtcaaattttgaaatgtatgactgtctttgagaatacgctgacgacacaccatgtcgcccttcctcatgatgcaatggggaatataacttgagtaaattaactgtttacttctgatagaatgtgacagctatgacaaattctccccttcctacaaatccgtgtggatgatgcgtaacattattcatttctacaacttggccaatcaggtatcgatcttgagttatcaacctttttttgcgtgtttcttttggtttttgaaaactttgtatatttgtgatcgataacacaggctattgacagagcagctggagtggatggctcagacggttacttacactctcatcaaacatcgcttgggagatcttttctaccgcttagtgtaagcaaatcttctactgatgaagctgttttctcggttagattttgtttagaaaagaaatcaagatctaaacttagagttttggttattttaggtttcagaagtttgaagatccagctgagggagaagatacacttgtagccaaattcaagaaactgtaataatgatctgacttctggagaacgcgccttggaagatggaactcgagaagcaagcagttttcagaaatcggaagtattcgagcatcgagcatcatcacagtggggtaatgatgagtccatgaatccaggttttgagcccgaaagaaataagtggttgttgtgatatatgttctcgcttcctctcttcatgatttcatttatttgttggtgtacagacaaaaggaatattaactcttacgacaaggttcaaaaaggttaaatattctcacaatttttttaaagaagttgagaaatgcagaagaaatattccaagaaaatgtgtttttgacattacagatttgcgatcacatcattcaaaagttaaagggactaaacataacagacatccaaagtagtcgtttaacgatgcaaaatagataagcagagtaaaacaaagacaagaaagaattatattaaccaggtccgactttagggatatcgtagtgctcactcatgttagccagatactgattgaaatcctcaatcctgttacggtgagacttgttcgcttccttagctagcttctgcacatccaatctttgtttctgctctatgtatcgcctttctgctggcgttaagtgatcatcatcatcgagctgctgctgcaacttcgcatcctcgcttgccttttcactcctgttcatttcttcatctccttcttctccttcaatcaatttacccaatgcttcagtgctttctcctatacccaaacccaaaatagccaaacaacaattaattgactctcctttgtcgatgaatgttgatgaacagattagttatggttatgagaagagagctgttgtttcttaccttctatgagttcatgatcagtaattttaagagcttgttcttcctgtctcttatgtttcttcttcttctttactccacctgctttcacatccaaagccttcccttttagctttagcttcccaccaataacattgtcgtatgccgacatctcttggctgctagtcagaacaaagtaccacacaaaacatacattcaagttagaaagcttgagaattggtgatttctcgaaacactgataagcaaaactaccaaccgacttagcaaacggagagcacatatcatcagtatacatataatcaaaattctttgaaaggttccaaaatctctaactctttctttctttcctttgtgtatgacaagagatcctagaactaggacttgaacacgaatcaagcttatcaatcaaaaaagtaaagagccatcacataacccacataattagtaaacgaggcgtagtagatctatagtgtatgtataccctaataatcaaccgaaaatcgatagttgcaaagcatacacttcatgattaccatatagagaaaaaaaaacagaaatctagaagcctaataattgacgcagaagcaatgaattgagctaaaactcgaaccctaatcaaatcaatcacctgaaatcgagagagcagaacgcgagaaagaacaagagagaggatatttttttttacaattttaaagagaaagtaataggactattttgaaattttccatctaggaaagcccaatagggcccaatatggttttttcccctagtataaaacgacatcgtgtccttttatactgcgctcgcttttttctccccactaacaaacagtaagggctttgaaaattggttttcctctcaaaatcgaagaatttgtgtaacgagcgagacccaggaattcgaattaaggcatttcaaattggttctcctcgtttccttcctctctacttcggaaaccctaattcccgtcgccggaactcttgactacgccttctgttagatttttttattcccccgttgttgaaattgagagtaaaatgttgagtaaagtctccccaagtggagagctcttgaaccggtggaggagaatcgaggaagacgaagaggagaatgacgattctgatccttcagcagttcggcgtcttaatcagcgcaaagaacaatggttccttctatatctctctttgctctgaatagttcactgttaaatcgactgaaatcagaaaatcatcagacaaaatttagttattacattgctcggatttcagctctagctgactgtttttgttttacatcttcttttaggtttacggatgcattcactttattgatatcgttgccgaaagatactcatatttggtgtgggcacggggatataatgggacctcttatagagactttctacaattacttcaaagatgatagagttgattcacctctcaaggtcttgtggaagagaatctctgaagagatgcggctttgtgcgcaatgcatttgtcagcaccatcagactcaagagatgtatgaaaaagagtatgagtgctcttctgttggtccattacttgttgtgttgcggaaacttgatgaggaaagggtgacgaggcacttgcaagagatcaatttgaaaatagaaaaaggaacatatgatccagatcatcatcatgctgaagttgttagtgttatgtacgaggtattgtagtatatgtgctttttcatttcacttaaaataattactggattgttcttttcactgatgaatcatttgcgttaccgactgactctgatgatctgtatttttctattcattttgaatcctcatgtcatgtcatttctttgcatcatgggattggcatctagtaaatagtaacttatgagcctttattttggtgtcaggttttgatgtttccattcttctttgatgatatgtccttatgcactgagtttgagaaatttattgagtcaatcgacaacatacacgagcttgcgtttgctgagaatcaagaatttccggtatgttaataccagaggagagcttcttgtgtttcctactaaactgaatctatctgacttggtgttttctcatatttcattctgtttagggtgtgtatgcactcctttttctcaatagaagggtgcgtgtaattggttatcgcttggcaagggccatgggaaagttgaggtattttcctttttcatacagcaactaagtaaattaatagctaactctgttatcaagactatctgtagtgcgtatgaaaccatgtatgatattatctgctatcatggcaggtcagcaacccagttagagcgcctccagccattgctcaagaaattcattggaattc

SEQ ID NO: 1126 - DNA, 7604 bp, Arabidopsis thaliana
ctaggaaattctcaacaagtttctcttccgaagggtctctgaattccggttataattatttttgccatgaagcaacatatcagcggaaggaaagcaatcttcagcattcatagttaagtagtttttatgtttatatccacaccaagttccacttagtagagcctagcaatcctaaggtaagcaaatctgacaaggaattctcacaagctttacctaatggcattcgcaaacaaaacacttccaagtttctttattcatccagtttagataaaacaaagttaaaagcagggaacttagagagtttcatgagaaaagtaaacacttttgtttcctggaagtgtgatcaagaatgttggaagggacattactagtctatactcaagcggttcaaaagaaaagaaaacttagagaaacaaaccttatgtacttgtaatcacctgataagagagagggcaagagatacgaattatgatcaacctgtggactagaaccacattactaaaacagaaatgaaaataaaaccaagtacctatatcatggagaagagctgcaagctccacctgcaaagtatcaacagaaatggttcactctaaagtaaaagagctgaaatttgacaataaacagctatagctaactagaagaactaactagaagaaggttcatcaggctcagctgaactagaactttgagatttagggatttttcaaactcacaatttccatggagtcagaattggaagagagaccttcctcgcgagcaatggagagagcaaggtctcggaccctccacacgtgccaggcgtcatgagaagcatcgtttcctttcatcgccttctccaccagctcctccgccttcctcatcgtcttcgccgccatctatctctctctctctctcaactgctcagtttcgaagattggagagattttgattttgcaatttcagcgtcggaagctctgttttaaaattgattcaagtttgccgtctcggctcgacgttgaccaccggagtcaaagagaaattcggggaaggaatttactcattttacctttttacccttacgtatgaaagaatttatttatttatgtttttttaaaaaatatttaaatttacagagatattttcacatattattgtagattaaactacacaaactttgccactttctgttaattattttaaaaatctctgtactgattgttatagaaaacctattctttacattaatcgctggctatatagtactgatttgtcaagttgaaaggtcgatttatataaacttatgacttttggatacatttttcaaaacaaatttgatccattgaaatggagattgtctttggtgttttccctagtaagatttcaaggtttatctttgtccccgaaccttttcaattgcattggttatgaagtggtttatctgctttggtgtttataaatattcgggattttagttgtttctagagaggtagttcaataattgattattttccaagtttctgttcttaaactctttttttttttttttttttttttgttctatggaatagattgtaatcaagtaacaaggatgtcatcaaatcacttcttggccacgaatgagatacttaattaatttgaatatgtgatcaatttgtcacttagacattttaccgtgatatttggaattcttaaatatcatatgtgtaatttgaatatgtgatcacttcttggcaagaagacgtcatatactcatatgtttttcttctgcttggcatgacataattgttctacatgctacgtttgtatatgtgtacgtgatagtaaaaagagattcgtgtatatttaggtagactatgcatatattatataaatataatgtgtatcacaaattcacaatcgattattcaataaacgactaaaatggaaagtagtatctcggattttatattatttctataacttttgtataagacaacacatgtcttacatttttacgagaagctatctttgattcattgaatcattccgaaaaatattaattaattggaggtgcatttaatacaacattccataaacgtacgaagaaaagtaagacaaattaattcctttattattacataatcatgaacgactataaatccctcgaccaaggaaaaacctaatgatattttcatctctcccctctcggttagtcatgaaagatttgttcatggaaggagaaagagaaacttcatcgatgacttgcttgacgcccaaggattctgttcaaagccctaacatgttggttagacaaccaaaaaaggagacaacaacacaaacccctaaaacgacacgaggaagacagaagatagagatcaagaaaatcgaggaagagaccaagagacaagtaacgttctcgaaacgccgtcgtgggctgttcaagaaatccgctgaattgagcgttctcacgggcgcaaaaatcgccgtcataacgttctctaaatgcgataggatctacagatttggccatgtagacgcattgatagacaagtatcttcgtaagagtccggtgaagttggagggatattccggtgataacgcggcggatgaggaaagtaggagaccgtggtgggagcgtccggtggagagtgtgccagaagaggagcttgaggagtacatggcagcattgagtatgttgagagaaaatatagggaaaaagattgtggcgatgggtaacgatcggacggttgatatggttccggcatggccaatcaatgtgatgggatggaaaccaacgatggatatgcaaaaattggaaaatctgacggatggggttaatcgatgccgtgtaggtcaaaacggtgattgattagtccagtcgtgaagtattcctctaatgaatttctaaaatattttatttagttttgttaagtttaattatatgattttatgctattgatcatcagattgtttcatctcttgtatacttcatactttggaaattcagttgtttggatttttaatctttgaaccatacatattacataatgtagaacagtattctatcagttaaaccagctttcaattttttttaagatttgacctgcacatgtaccatatttatataccacatgaagtatttttggcagattgaaactgcattttctcttggtcgttttcttattttatgtaaggcgtacaagaaaaagcaaataacgaaggaaacaagtgattcttacaattaagaacaaacgggaaaggttggaatgctggttccttaaaacaaggaaaccaagtcactcttatttatttgcacgacacaaattgacacagaataataacatagactaagtcttagcttaatccctaaacatgcaattaggttttctctttcacgtgtttgaccagccgactctctcaggcctcaacacatccagtctcatcattgaccaatgttgataatttctccacggacagcatactcatatttgagaacctgtgtgatcatttatatccccacaaataaaaatcagaagcagtcaagaaacgttttaagacatcagtctctagagtggagtcaagaaaaaccgaccttggtattgatggagtcaagagttacgggaagagaggaagaggaatcagaagcagagatatcggaagaagaagcagacaagtgacgcgatgaagaagcaggagtaggagtagggactcttcggaagctatctttttctcctctaactgatgctttctcctgatccttgtcaatctgtatagggtttgagccaccccttgggattcttcttaagctatctttttctcccttaagtggctctttcttcatctccttgcttacatgcaaatctctcgcagcttgactcgaatgtgtcatcgttaacaaagaacggccctctacactatacttgctgctaaagaaagctacaagtaacagaaccagagccactgaacagtatctcttcattgtgatttctcttcttgtaaatccgttaggattcttgaaagctcgtatcttattcttgtgacagtaactgagacaatcttggatagagatatgagttagataactagagacttctaaagcgtgttgctttatagaccaagatttgtgtgtgtttgaagaaatagttattgggatctaattacgtgatcttactttgactgctgctataataatcagattttgagtcacttaccttatcatttactgatgatgatattactcagcagcatctacattatcatatgtacagtacacattacctaactcatgtgcatgctttgaagtttaagagatggtggccatgtgaatagagaacgtgactactgtctacattttactaagggaatttggaggtattagcgtaattctccaatttcagaaagaataaattgcaggtaacagctgttttgtctctcaactaatcactacttttctccacaatctttaatcttatgcagttatttatattttcaaacgaaaatgattctgtgaaatcgaaactttgaacatggaattcaacaatggttcaatcttgtgttttcttgatgagattacattttgactaaccgtttataagaaactctctcaatttatattacggtttttcactataaagagaacagaacaaaaagtgaataagaaagagagcactaactaatgctctcacatcttagcttctgtaaacacaaagtcgatgaaaaagaaacggcatgggacctttttcttattattactcatataatctatagagggatcttgaaaacagaatgcttagtcgcggaactcgtccatgaagctctggtggaacgcagttagacgatcaacaatcgctggaatcttatcctcttggggaagtatagtgcacctgaaatgccatgttccaggtacctacatcaaaccgaacaaagacataatcaatatcagcaagtgaggttttagttttggttctttggagaaaaagctatttctttttttcaaacctgtctaaagccagaaccagggacaacgactattccagtagcttttagaaggcgtttgcagtagaaattgtctggtgctgtcttttccgcctcagcagctgcaattgccttttgtggaaggtgaaggcaagggaatagatacatagctccttctgctctattgcatgtaactccctctagcttgttcagagcctcttcaagagtctgcaaggttagagttcaaacactttaagaacagaaagttctaatcttgaatattcctagttgtctattaaatggctaacctttgcacgtcttgccaaagatgagagaattccatccttctctgctatgtatgattcataggagtcgtcaccaggctgatcaaatttaataaaagctattaaggtcaattatcgatgtgcaagtccaagccaacaggtggaaactgaatcaattgtgatgataaagtcatatagatgttttataccttgggtgggctcatgatgaggctagcaagaatttgaccagagatgttggaacaaagattcacagaagccattttgtatatctgctctcttacatcagaagtgaatccagtaacctccatgtaaccacctcttttcccacactctccatagtaccctgtcagaaataatgaattcagttttctgactagtttcccatcgcaatgatcagaattatcaattgactaagagatttgtttttgtatcaaacctttggagacagattggaaagagactaaggcaagatccttctcaccgtagcccatagagcgggctactttcttgaaggaatggaactttttgtcagggacatagacattctcttgataaacctcgtctgctaaaagaactaaaccctcttgcttgcagaacttaacaacgtcacgctggttttcttccgaaagaaccttttaccagaacaaagcagaggtcaaatttagacgaaactatgaaattcacatcggtataaatttgtgagttttagtcttgaagattaatttacctgccctgtcgggtttccagggttaatgacagccaaagctctcacagtgatgccctttgacctagcatcttcaagttgtttcttcagctcagatatttcaagaccccatcctgatgcttcatcaaggtagtatggaacctaccagaagaacatgacgacaatgagaagaaagacaaaagaaactttggagacagattcattttcccatttgatatagtaatgcgtcaaaatgatatcatcatcataaacaaagataacgaacataccaaagttccaccgtgaagggcaattgaagctgagtacaatggatactgaggaataggacaaaggattccatctttctctgaagttatgagaagttgcatcatcatatgaacctagaaggagaggaacatcactgtcaacttcaaaacaaggtgttccagattctacgagttacgagaagattagtttgataatccttacccctggacttgcaccatctgtcatgaatatatcattaggatcagcagggaaaccatcacgggcttcgattccatcagcaattgcatcacgtaaccccttgataccctgaggaagaacggaagattaagagagggaatcatcattgagagagaaatgctgtcaagattcacaatgccacaaacctggctgtggctgtaagcaccagtcgctctcccgggaatttggtccagaatcttccaagcacgctcaatcgaatcagaactgataaaatttgtaaagttgaatgttaaaaaatcttacaccacagaatcaaaacaactaagaaacatataaaccacttttgatacctgaacaaaccgtgtgttgcactctcatccaacagggctgtgtaggaacataaagcaagaacctgagatataaatgttacaagctaactcatgattaacatatggaacaaaccagcactataaaagctcacttatttacctctctgaagaatgttataggctgttgaccaagagattgaggattcccgatattacagtagataatctgccaaaaacatagaaccttgtaagcttcactcatgaaaagaatcaagcttgaaaacacgaaaaggactaaaccgattataacgtacctcatcaaagggataagcgtccttgttagtcttcaaatcttcttgcaatttctgtaagatggaaacagaaatcaaaatgagcaaaacagtctccactagaaatatacaatcaaggacaaagatgttaacctgagcaatgttgacaatttctccacggacagcatactcacatttgataacctgagaacccccaaaaagaaaccatattgttagaataaaaaaaaccaaacaaaacatcagtcactaaagctagatttaagatgcagaactgttcctcgacaataaactattcaattgtaaagtatgagctaatcacaaggaagaacaaaaatgaagaattcagaaagcaacagacttttttaatatacgcaaaaagctgaagaacaaaatggattctaaatagtcctataaacaaaggatcacctagtaatataatacgtaaaagaaataaatccatcaagggtcaatgatcaagatgcggagacgaggatacgaatcataatatgcataaactcgaaacatgatgcccaaaaag

SEQ ID NO: 1127 - DNA, 127968 bp, Arabidopsis thaliana
gaattcgatcattggatgtttccatgtttggtccacatagtgtagagccttgaccacatctctccaactaagtttggctattacaagattgcccccgttgctaataaaccacatcttataccaaaatcattaaccagactacaaatacaatcgaatctctagcattgtttttatgtattgcttacttttgaactatataaaatcgaattaatttatcataattggagacaaaatggtccaaaccggttgtcattgtattggtaaacccggtttactcggagggtaatttggtaaagtaaaaaaggatggtatcttcgtcttgacttctacgactctgcgtcatttcgtatttttcccattacagactgttacgcgaaggcaagataaaaaggtgaaaggtgtcccaagcaagctttctcttctttctccacacattataaatctacagtatcttacataaagagactgtgtgttgatagagagaaagagcagagaagagataaagcaagcttcttcttccatttgggagaatatttcatttttcagcaaaaaccattgtagactctgtagtaacgacaacaagtattcagacactgtttgggtttcttagatttttctgttcaacatccatatatctgatcagaactcaagtttactaaattttggagagtgatcggaagaaatcgaattctgttcaatgctggatcggttatgtcgtaagttcgtcgactttgattctttagcagctcaagtttcttgcttttgattgttttttatcatcggattctgcaatttagcataatcagcgtgttctagagatggattttgcctaatttttagtatcagaatttttggggtttctgttttctggggatgtgtcaagttgggattttttggaatttgtctttttgggtttttagttttggggtcagatctgggaagcatcggttttgattcttatagttaatggagctgcattttcatctgtagttgttgaattgatttctgtttcgtaattttgggtaaaggttttatttttacatttaatttgcgtactagtcttatgagattgaccaggtttgttgattaaccactcaattttactcttttgtggtttcctcaggttcttatgaatgattcacattttggtctaagaaagaggctttgacttgtgtcataaatatgaaggctgatactgttctagactatgctgtgtttgagctttcaccgaaatattcacggttagtaaattctgttagtgtatgttctgtagcaattgatcatgcttgtatgtttggtctcagttgtatatttgtgttacagatgcgagctgtttgtatcgagtaatgaagaaagagagaaactggcttcaggactgatagaaccatttgtgaatcatttgagagttattgaatcacaagcttcaaagagagatcaatcctctgttagactggaagtagaacaaagcgagaatggcgaatcttggttcacaagaagaactctcgagaggtctcaaagaacgttttgcatttcccttttacacgaaaatgttggttaccttagctatcttttaacctgtgtaatttttgttttccagatttgttcaatatgttaatagtccagaagtgttggaaagagtcaatacatttgatttggagatgtcacagttggaagcagctcggacattatattctcaaggtgtgtttagtttcttatttgcttgatcaaattctaagcatacaagttacaagtgaccaaacttgataactttttttttctccttttatgttctagatgatggaggcgtagcagatgcaacacagtaagtaaatgtctctgtttttacgttgaatcaaattgtgttcttaaaactgttttgttgattgtttttctttgtatatgtacaggaaggagctagtaagagctatagatttaagactcgaggcaatcaaaaaggacttaaccacggctattgctcacgcgtcagctaatggttttgaccctcaaactgtttccgatctccaacgttttgctgatagattcggtgcacatcatttgaagtaagcaattttttttattggttattcattttcttgcaactatgtttggaatctgatcagaatatatttctttcatcagtgaagcatgcagcaaatatatttcactatcgcaaagaagaccagacctcatcaccaagaacgtgaataccaatacacgaacatcagtggatgagacaaacatcagtcaacagctaagtactaagaatgataaagaggagaacaaagatgagagtttggatgagtcttcaacggttaagcccattcatcatacaaggagacttagcgtacaagataggattaacctctttgagagcaaacaaaaggaaaactccaactctgcaggaaacaaaccggtggttgttgcgaaatccacagaattgaagagaccttcctctgatacctcatcaactgtccctgcattccctgagaagtctgttttgagaagatggagtattgttagtgacatgagctttgattttacaatggaaaataagaaatctgatagtggtagcaacgaagaaggtcccttaagtacaccttcgtccattcctgatgccacattccccaaggagtctgaagagaacagcaaaaaggacgatgatgatgtctattctactatatctgatgattctcaaaaccagattgataagccaggaaacttcatgactgatggcaattccatgccgagagaagacgagagctatgcttccaaatcccacaatgtggcacaatcatcagtcatgtttccttatcgccattcgcgctctcggtcagctcatatagcaggtggtattgatatcaaaagtgatgaacgtcaatcaaaaggcaggaagaaagagctgtttccatcagacaagaaacaagccttgacaagccctccaaaaccggtttctgcaggttagttttagcagaagagttaacagaatatatagagaaagttacccaagagagtttataaatttacaagatcttataaatcatatcaaattcagtgttttgaatacttaaactgatagcttttaactgtacatcttaatgattctgcagggtctgaacagagacaaaaatcatttggtgtagaggatgaccttgtaaatgcagatgcagctggaaaatttgacaagaatagagttcgtgcaacatctgtggatcaaacacagaggacaagaatgcctagagaaagccctccagggtttaacgatgagttgaaaataaaagcacaagatcttgaaaagattttcgccgagcatcaactacggattcttccaggagatcaatcagctggtaacgataaagacaacgggaatgttgtaatgcggaggaacttatctgagttaagattttcagatgattctaaaggaaagttgtatgaagagtatatgaagaagagggatgcaaaactaagagaagaatggagttcaaaagaaagtaagttgaagtcaatgcaagaagctcttgaccaaagtagaaccgagatgaaggctaagttttctgctgcttccatgaagaggcaggattcgatatcaagtacccgccaacgtgcagagaagttcagatcttttaactctcggacaagttcgaaaaagtatcaggtaatcaaatcatttagtgtctttgttgatgatgacaacaaaactttgtctgactgttttgtaatttgatttagtgattcttcttaatctttttacagcatcctataagctcattacagagtgaagaggaaaacgaaaaagataagctagtcagtggacaatccattggaaaaggtgcttctaagagctcccaagttagaaaggttccatccccaaacgggagctcacgagtctcaaaaccgtcaggtaaagtttcaaacacaaacactaatacttctgggagaggacgaaaaacatcagagataaaactggttacacaatcttctcttcccaaattctctgatcttaaaaaggaaaacacaaaaccatcttctttagctggtagaaatactactaccatgatgcgaacacaggcgagaaatggtaataagaagactacaaaggaagatataccgtctcctgttatgcctcgaagaccacgatcactaaggaaaagcttctctgcaaatatagaattcacagagttgacaactctatattctgatgatatgatgaacaaagagaggaatcagaagcagaacacagacattgatgatgtatcagagaatttgaaaaatgaagcctttgatgacactgaatctgaggctgaagaagaagaaaaagaagttttggagaaccctgtcaaaggagaagaagaagctagagaaatggaaactctagtagttgaggaggatattggtgatgaaacgccttcacttactgaaatagttgagaactcatcagagaatgaaaactacacttctttgagatcagtttctcatgtagacttacaggcgaatactctaccttcttcaacattgcagcataatgttgcctcgttatttgattcacctagtgagagtcctctttcatggagctcaaacttgcaacacgcgttctcttatccgcatgagcactcggatgttgatgcttcagtggatgattctcccatgggaagtccagcttcttggagttcaagaatgagaaagaaatggggaacaacagctcagagtcctgttattgttcccaactctaggaaggatttaacgaaagggatcaaacgttttcttaagtttgggaagaaaactcgtgctgcagatagtctaatggattgggtctctgtaacaacatctgaaggagacgatgattgtgcctatcgatcatcggatgagttaaggaaatcaagaatggcatcttctcagagtcagctttctgaggatgaacaaggtattaaatctttttacatttcagcttcattagggtcttagaacgatgtcatgaaaactcctcttgaccatagttttgtcttttgtgtttcgcagcttcaaacaatatgattcaaccacatcatcatcaagcgagctttaaagtgaaagatggtgattttaagcgatcattcttctcactttctacattccgcagcaaaggaaacgactcgaagccaagataacagagaaacagaactcaagtctctatgtttacatttacaacaacacaagtacaaagtgtgtagtattgaatgagaagtacttgattccatttaaacacagtattgttgagtttataatatgaaatgagataaacataattttgagaggtaaaaacttcaaattataatggttctacataagatatacgaacttacgacccaataaataagattaagttagagaaagagaaagagaaagaagttgaagatgtgcaaaaacgtaaaccgtagtagttaacaaaagaaaaaacgtggaacacaaaccacaaacccacagctacatgataacattataacaagaacataagttagaagaaaagaaaaagatacaataaagacgttacataacaaaaaagaagaaaagaaagaactcttcgctcaagtaacggctccgaggaagatcttactggtagtacatgagctgctgcgcgttctggtaaccaccgtcatatattgcctggtttgaaccagtggctcccattgcagcttgtttaaaagcatgttgtccctgcgggtgatgcatcatcggattcattcctgccatcttgctcatcgctagttgcctctcgtaagccaagagatcactcgctgagaatcccgggattggtgcaggagctggtggaggaagcgggtttgaagctgttcctgctggagttggcttgcttccccaagaacactgtaggaacaacgaacacaacaattttagcattcccaaaccaaaaagaatggtgagtcccacaaaagaacagtttaagttagttagttttaccttcatttgcctgccactaaggtaggaatgtgtgtttcccatctgaatagcgagggctgcctctacatgagtagagtatctcacaaatccgaaacctttgtctctttgaacacggacttcctctatgaccccagcaccaagggaatggaagtggcggtgaagatcaacctgggacacctggataacgaaaatatctttgattcaaaaaaggtatggatgatggttgagttaagtcacagaatacctataacagtttttctattttacctctggagcaagattaccgacgtaaacagttgtgtactgagcattgttctcaggagcttcaccattagtagtatctttaccatcctctgcaggaacaaataagccaatgtataaacatcaaagggttaagaattaagtttatttgaggcttttctctatttccatttgattttctatttcatgataggtaatagttaaacatacccgagacaccactggtaagttccacgacgcttttggaatcagagctctgtttgtcctcaccagaagtggctccctttgtcgcccagttgcaacgtatctgcctggaaccaagccatttccctgaaaagcagaagagaatctcccaccaattacaataagctcaaaaacacaaagctaaaataacaaaatattaacatcaactatcaagggggaaaacaaattgcaacactcaccagttatctcatctattgcagtctgggcatcctgcataaggaaataagatttgcagcaatcgatcagtgtttaaagtaaaagccaatctatacacaaggactgagagttagacagtcaagtacctgttggttacggaaggaaacaaatccaaatcctcttgaacgcccagttttctgatcccacataactcttgcatccctacatacaatagcaattgtcggaagagtttctgcaaatcttaaacttccatttccaatacaagaatgctgaggatggtataaaaaacttacgagcaagtcgggtagacagagaagcaagtaaacagcattgcatcagtaacctccggactcaaatccccaacaaatatattgaagtgacctgcacatgaagatcacagaagtgcgttattgtatcaatagaacacccaaaatactgttttagcaagaaatcaagcataagattgtgaaccaacttgatgtatcctccctctggccactcgcataagcccagttaaccttgataggttgcccaaacctgcacattagagtaaacaatgtaatccaaaacttggaaaacagagtatcttgttcatgctaaaatgcccaaaggctaataatcatgtccattaacttacaaatgccttccattgagagaaaggattgcaagaccagccgatcttcgatcaaagtagtgcacaaacccataagaagactgcatcagataaatgtgtcaatcatagccaataccaaaagcaaaagtttcaacataaaagattaaacatcctgaagattactactagaatgttataaaagtgtaacataacacaccttttctttcctaattagtttacagctttctacaggaccagtgccagcaaaaacctcttgaagcagaggttccgtcacctgaatatggatgtttccaacgtacctgcaatttctcaaaggcaggcagactaaaaatctaaacaagaaacagaacaatgaaacaaaaacataaaaattagcagggctacaagtccctcaacatcaagaagaatcacctatgagggcatcataacaaagaatcaccttttctagaaaatagaaacaagtctttagagaaacgttgtcaaattcaactgtacaagtatgaactatataatatagtacataactacaatgcagaagtgtttccctggactagctttgagagtgacaaactgaaaacttgagttcactactgaaacttttaaagccaaaacaccaaaacatacataaaaagtgaacaaaaataccaaaagaaaaaacgaaacctaacactcacacactgcggcaagtacttggatcaaaaccaggggggagatttccacttgggattggttctatctgcaaaaaggaaaaaaataggaagccaaagaaaatgaaaaagaaagaaataaaggaaaaaactttacttcctaaagtctcagcaactaagctacgataacgaatcagtctcacctcaaagattttcatggagttgttgaaccaaatatcagataataagacaaacactttaaaagaaatgtaacgaatacacaagaagcaagtctattagtggtaatccccataaatttcaaaactttttctcgtttgaccaatcaaaaatgaaacaaaaaacaagagaaacaagcatcttcaatcatagaaaatgaaaccaaaaatctcgagttcctaatcttggaccttatacaacaaaaaagagagaaaaaccagtgaaatcgagcttgggaaaaagagcctagaaacccaaatcgagcatggaaatggaagaagaatagagcaaacctgtggcggggcaaggagaccaggatggtagagagactgttgctgcataagagcttgctgcatcataacttgttgctgctgctgctgctgcttcaacctctgcattttctctctcggggaaaaaattattgtctttgattttgcttttcgttcccaggtaatgaaaattgacacagtgttctgtcttttagggttcgaaagtgttttcggtgttcgagaaaaatgtaagaaaaatgacaaaatattaataacaaaaaaaaaatgaagaacaggaaaaaaaaaaggaagtctcttgatagaaagcgaaggaagcaatcgagtggctcttacgaattttattggatttattatttttacacatcgattagctaaagtcacaggctgtaagaaaatttaaaaagcaacagccaatgaactcgtcccacgttaaacttatggctcaggcccaatcactgtccaaatcagacacgccttcaatgaacttgaacctgacaactaattacaataaacacccctgagtttagtgaaaacttgatatacactccaataataatcattttcataaattacaccctaaataaattagaaaggagctctgatcactttcaaccatctttacccgcattacgattgcagtcagattcctcttcatgttattgcagtcagatcaattcacaactcctaaatattcttcctcttgtctaatttgctatttctcgcttaacgttatgtaatttaactcccaagtgttgtacgtagttaactaattataatataactttactatcgtctattgtgtttatgaatgaatattcaagttagaataagattacatactgtagtacaaagcaaaataaaatcacttagataagtcagaaaaatcgaaacgttaatctaaaaactcagttcctacaagaaatttagcaaatattactatagccttagatcgagatctttcgaactttggccttcttcaatcttcataatatcatctttatcaccgtctgatttgatatgggccatggtttgaccaatggcgttatccggcggtctttgtgacgactgtcctgcctctagtggttgaccggttacaatctctggcttgggaggataacgatgatgacctgcgttttggttaacttggtacggagccctagccacagctctgcaacagaaaaattaataacgtaaattacgaggcttgttgaggataatttaggagaacttatatcagagggaggatccttaaacttttgagttttgaactaactagagtgattggaaatttggaacattaaaacaagtttcaaaaagtatgataaggttaaatacctgtctttccgtttagcaaagaatcgatggagggaagctctacgtgctatacgttccacgatctgattttgttcttgttgctgttgttgttcctttgttaggtgattattatcagtaggctcattgagatcaggaagaaccatgctgctcttgttgttgttgttttcgtcattgattggtgtctgaatgttaatctcagtcacaggcttggcttgttttgctacttccataatctctttagctttgtctacggggaactcattatatactaaaactttccctccgaagaatatggtcagctgcgaacttcctggctgtgattcactgcaaaccaaaaacagatttcagaacaaaaccaattttaaccggattaaccgattatccttttctctaatctccaataaccaaaaacaacaagtattcccaaggaacaaaaggagagacctgaggtcagcaacatctttgactttgcctcctgatgaggtagagggttcgcctttggaatgccctgccttatgcatcgcattttgtttccctgcataaagagaataaaaactttcgtgaactataataactttagaaaaatgatatagcatcttatatctttggaattttattaaccacatctcaatcaatttctatatcaacttattcgttatttttgttacttgtcttcataattacaaggagaaattatttctgaagtaaggaactgacttacaaatgaagaaacaatacaaaagtagtaaatctggcaaaagcaagtagtaacagaactgagtttttaaagtactattaccaagtggcggccatgaaagaagaaagagataataaaagtacctggtggatcgaattttccgggcaacgcgagactggaatcgggttttcggtataagccaagatcaatgtttccgaaactacccttctccttcaagtaacggctgagcaaactacatctccgggtaaagtcagatttctccggcgcttgtgccttagcattttcattgctcgacgacatgttgttgtttattgagaagaaagaattctccacacttactttttaaagatattctttatctcttcttttcttttctttttgttggtgcgtggattgcgcgtaaaatggaagagtacaagaggctactagctcaatagctcatgtgtttataaactcattcacccaataagtttctgtgactttaatagcctctcataaattaatgaaaacaaaaataaataggaactttttagtttcttaaaaatatttcaatatattgtgaccaaaatagaattaaacttctcaataataaatttattaacaacaaccaaaaaaaccaaaaaacaaatcttacataaagccatgagattatatcatatttagtaatattccatcgcatgcatttttaactagttaaagaactatatctagtgtgaagaaaggaattttcatccatgattaatagtaagaaaattaatgttaataatccatcattgtgcaagtaatttatctattgttttatgagttggtacaacaaatttattgccctgtcttatcataaaaatatgttcacctcttgtttcttgtttggcacagtttagttgtctaccatcaacggccagatttcaaaattggactacttttttatatatattttcggttagaatttaccgcacgttttccttacgcgtaacgataaaagagaaaaagaataaagatttcagaaccgacggcaaacgttattaaacggcgtatgtcacaaattcgtaaaagactcgaaatttgatcgtatttacaaaatttgcccttccacaagagcacattaccaactccagtgatggcatcatcgtaatagaaacaactttcatggcctttttttacatcaccgcgacgttcctcacgttagttaacaaacttaacggcggtgcgaattgaatagtaagtggaccaatgtgggatcctaccatcaaacccctacgaagtttcatgtgccataaaaattcaaagtctccgatacgatccgacagaagttttttgattaaaacacgtggtttaaatagaacagaccgtcaagattgtgacacgtatcgcaatctgtacgacgcactagcaacagtatcgtgtgaatcgcgtttttcccactttcctatagaaagaaaaaaggaaaaatcttaagatcacctaatcagtttggtcaaaaataaaattgatggatcaattgaccgaactgcccctttcacggatgcccataataatcaatacgttcgttggttgcttcaaaactacgactcgttcaaaaaaacgtgttcggggaaaatgataccaaagatataaaaagtttagatgtgacttagtttaataagtgttgttgatgggactaaatgaagcaagattagagcaaaccgagtgatcggccaattgatcgaaccagattgtcaaaccggtttggtaactcgttacccctagctacgccactacactacttgcattgttgcaaagaccaagtggctgttgtgttttggaaaaaaaaaaaacgttctggggtttagaaaaattgggtagcgaatgggtccttttgaaagtgatatttttttttgtagaagaggggggcgaacccccatttttattaaaactgaaaaaactaaaaaaattacacttgaacgttccgggggtacgcagaccccgctacatcatcgtgaacaatcgacataacaatatccggagtagaattaaacaaatgaaaacctaacggtaaaaaaaaagcatagttagctaacccatccgcgagacgattagcttctctatacacatgcgaaatccggactgaccagtcctttgaaagtaagccatggcacaaccgcaccaggaaggacagcggatgcgaatcatcaatccctgtccgaagaaaacccactaccatctccgaatcaatctccatctccaactgtgtgacaccgcgctcccaagcgatatttaaaccgtaatatgctccccatagttccgcaagcggagccgaacaaattccaatattcaacgaaaacccataacaccaatttccatccccgtctcgaactactccacctgctgtagctagtctcgggttaccacgcgaagcaccatcagtattgagcttaaaccaacccacccttggcggagaccacgcaatcaatctctcctccctagctgtccgcgtcgtcactcccattttgtgcacatgcgccttccaaacatccaacgcacgatccttaataaaacgaacccgatcccgacacttcttgttctcgccaaagatgttaccgtaacgccatttccacccccaccatatggcctgcgaaaaagtgaccgcccatggacaaccattaatctctatctcctctcctaaattcgcatagatccattctaacagcgatttcgaaaagaaagaagagagtctccgtactggtaacaagcgggtccaaattcccgccatcgccggacagtcccgtaaaatgtgtagaattgtctcctccccactctcgccatgtagaagaccatgtacctttagacaccatccacgctctgttatgaatatcaccgacacggtacttgcttctcaaaattttcgaccatagactcacatcatcatgaagtgatatagtactatataactcttgtcttggttttaataataaaaacaaaaatgatattttctttacattgaaccgaaacgccacagatgctctacgctaatatttgacccgtttcaacctctcattacataatccacttctttcgaatttataattatattccaacactatatatcactaaacttgtaattgtgtcttatgttgttactgttagaatatttatatcattaatagttaaatactctattggagaatatggcatgggcttggtgggaacttaacattgattttgggccaacaccaacccatattttaagttacggtcttagagatcatcatcaaggcagttttcgtcctttgaatgagaagatccatattattttgaaagcaaaactttcgtatttcaaaaagctaatgaagaatcaagaaacaataatattcctttgaaatgttcgacattcgttaggcactaaccttaaatttcaatcttatagacgtagatttatatcatattctatgttttcgaataatttttttccaattgacgaaaaagaataatctatcttcttaaaatttatatattaattgatagtgtaataccgaatttataaactctattttaaatacactttttactaaagttaaacgttcaattttttcaaattttgaacaaagctaggaaaagctatattccaatgtctttatagatatgataatacatcaaggagaaacgagagaggagtatctcaagagttgacttgactcctacataaaaagtgaaccaaaggcacaaataatgtaacaaagaagaatgattgaatctttataagctgaggttatccaccttaaaattacacaaatcacacgcacacaggtatgtatgtatatcactctgacatctcatatacatatctacacatgtacgcaatttcaagaacatgtttggttctatggacacaaatgcccacagatcaaatcatgcaaaaaaagaagttaaaaacattctgaaacgtccagggcttaatttgcagatgcaccaaaaaaattcctctgaaatgggagactcattcattacttctttaaattttctcgagaagattttgaatctgcattaaatgaaagagtatcttgcatgagttcatgaaagaaaaacattgtaacttaagagattttatcgttgtgtcttaattacctatacttggaagaagattttgcaagagcttgaatgatgaaggttggatcatatctcgagaactatgactgtaatcaaaagaaaatagaatcagtcgtttgtttttgagttttactaaaaaaataatgaggatctgatgaaaactcacaatcagaatctgttttgacccatttatatccatcgctactacttcttctttcgctagtttcttcttcctcactcttcagtgagagctgtttcttgtcttgcaagtatctctttgttgtcaatgatgttggtttcgaggaggcttgagcattaatcttcttatggagcatcatcttcaacaactgtaatttgatttgatcagaggtagatattaaaaaagatatttacactacgaatttgaaattcgttcctagtttaccttctccattcttgattcttgaagcgtgtctctcaagctagggcttggggctgtagaaatcccatctgcgcagacaaaaatcttcttgaaaagatatgagacagagttcttgcttatgtctctcttcttcttgttattcttactctctattgatatctctttgcatctacctagaataacgttaatcgttcgctccatatcttcctccttattctcctctgacgaatccacaacagcgctaagcgcattgctgattcgcctatccacctctaaactcgatggacagttcaagaatctatctaaaggaagatttttcatgagctctctattcacatcagacttccttttcttagttcttgacaagagcttcatcaactctttctgcaactttccaacctcttcaggagtgaaatcctcaagattgacagaggaagaaggctcttcttcttgctcggattgtgccgtacacttcttctccgcttcaatctcttcatgaacattcttgctctcgttttcgctcacactattgcttgttgtaccgaatgttccaatagcaagcagcgcgtgaggccagtcgctaaactcctctcttggttcttgcttcacatgatctaaaagacaagatgcaagacagcaaaataatttcagatcaaagacaagaatcttgtcaaaataaggtacaacgagatataatacaagcaaattctacgagacaagaatctcggggcattgtttacacatatccctagtagacaatataatcttgaagttaagtttttatgaaagtaagaaaaaaacttacgagaagaagcagaggaagtgcttgttctgttatgatccccattaagcttgttctgcatccacccgaagaactgaaaacaaaagccagaagaaaacacttgagaaatcatctgagaaaaaagtcaatgatcgaactaaacacaatggattagaaaactaaccttcatgtttctttttttctgacaattgactgtaacagagagatcaatgtatatatttctcaactcgagttattgatgaatcaagattggttattatagtgatcaaaaaagattagatttttagacaagttggagtaaaattgatgaattttatggtgttcaagttccaaactttgactacttaaaagagagaattttaagtaagaaaaaaacttttaaactgttcttgtaagtttgtgttcagatgttatctcacagttgcttctttatacaactcacaaacccacattaatgcacacatccccacgtaagcaaacgagtccaccaacattcttctatggcccataaattaattgtattaccattaaaagtttaagccccaaaaaacttagttaattaattgttaacccatgtatcggagagaacgtcacggctttgatctcggctcatacacagtggagccaactcaacgatatatagactaaagtttgatctgtttttactagttgaatccctagaaattcattacattcaatggttactatggtgacacacggacacggagagggttctcatgaattttgttaattacatatataatatgaacttgttgggactagtattcacattccttttttcgtttgctcttctctttctttttttcacttttattttgttcggtcagatattaattagtaactcaatttattgtcgattgaataaatgaaattgtgttatctgattctaatccaaaattcttatatttataaggctttagtctcttcttaatctgtaatcgagaaagttggagaataattattctgtaacattgtgtaatattggttttggagaatgcatttaacctagacggataacatttatgtcaattcagtgtcataactcataacatacaatgatacaaactaaacgtcaaagatagtagagtatagacaagccggttaaatccaagtttaggaagatcgactatgcaatgtattattgctcgccaattatgtatccactatagtcttatagaatatgggaaaaattattaaaattggaaaattaatatagaagctatgttcttttcaaagaatgaatagaaaatccaaaggaaaagagtcagaaagaaagaacgaaaaaaataaggaaaatccacgaaaagatctcgtgtcgatgtccccttaagtctttaacccttatatattagggcaaatagtttttcaatcttgtaacttacatcaaaaaaaaaatacaaactattgactaatatccattgcttagctaatcgccactcaaacttgcatgaagtttgaaaacccaacgtaaaaacaaaagctattgagtttttttaaaactctcgaattcttgagttctttttctactctcgattatctagactatgagatctaagtgtatatttaaacgtattaaagtatacatttttacgtactgaaaaaagagttgagaagtagacagtagacagatggaaagtgaaattttataaataagagtaaaaaaactaaaccactgaacgctttttcgtttatgaagaaaacgttgtgggccaacctacaccactccaaatcacgtacaatatccaaccaaagatcgccatgtcatacacacgtaaatggcagaggaataatatgtacacgtgtctgagaacagaggctattttggcaatcttctgtcggtccaaataggtcgggttgacttttaaaggccattaccatattttagatgcgagtataaaagtttaaaaaacattttttaaaaaaaattagtgtatatgatatatatctagtatctatttagtagacaagtatctttttttttgttaaaatttattagacaagtatcactatcaaataacgtaacaaatccaagagattcagattctcttagttttaaggagttccggattttacattttgatagtcaatggttaagaagcacattttcttatggtttcaaaaggggttgtttagtagcgaaatcgcattcaaaatgtatttttaagaaaagatattattatttgtagtaagcaaaaatgtgtgtttaaattgatatattgattgaatacatgacgatatgtttaaacggagttgtctcgtgaaataatcttatatataaacgtagttgtctcattatactcatgaacgatatacagtagatcatttttcgttaacataaaattttatgtatttgaaaactctcatttagtttagcatcgaaatactttcagttttctgcgaacatatatatatatatattcggatctagtggattctgattccagatattaattttagtgtttcatttttgtaatcaattaatagataatacatcttcgcaatatccatagtaaaaaattcatcccacctctatggatcggtcaacttgcttacaagtacaagatgtgtaagtaaaataaaatataaaatgatcatcacttaccaatagaatttcatgttaccgaatgaagtgacatcattggatagcaaacattttcttggtctccatgaaactttgtcatttactccaacttgctctcccaccttctcctcttttttctttctgatcactatcttaaaccatttgataattacttacaagtatctttaacaagatcgagactaactaaatgtaaagttacacataaatccgaatgtttctagcgacaaaacactgacacgcacacagaattgattaaaagtgtagttaattaagaataagtggggacattgggacaagaattaggattagggaccactttaaacagtgattaatatgtggttcatagacttaagacgttgcctaaactcttgtgaattgtcatttaacacaaaatctagggagttcttaagttgtctttgtgattttcaaacagtacacgtgttaagcatctaaattctttaattttactccattttagaagcatatgtatttcttttaggtggctggaaatatatataaaataaaatttattatgttgttaataggtgctcaatcgtcacgcaattcgtcagaattgacttatatcttaattagttaagtgcccacacgtaataaataatagattaagatccttcgaattaaacagaaaccatgttgttaaaccgaaccagcgtattactgtaaaacctatttagttgatggcgaggttctttttaaatcgttacttaaatcttttaaaagaatacgagtttgaaatctaaacctattagttaatataggggtgtcaaaataggtagcccaactcaacttaactcataatcaaatgagtttatgattaaatgagttataggttgacccaacccatttaataaaatgagttgcgtcaacccataactcatttaatttgatgggttgagttgttaaacggtttaaccaatttacgtaataatttaattaataattattataaaacaataataaataattataattattaataattattaattcattatcatcaaacttagaatatttacggattctaatttttataggtttatgttttcggcgggaaaattatgggtttacgtttttggcgggaaaatcacgggtttacgtttttgacgggaaaattacaggtttatgtttttggcgggaaaatcacgggtttacgtttttggcgggaaaattaccgggcttacgtttttggcgggaaaatcacgggtttacgtttttggcgggaaaattacaggtttacgttttggcgggaaaatcacgggtttacgtttttggcgggaaaattacaggtttacgttttggcgggaaaatcacgggtttacgtttttttgcggaaaaattacgggtttacgtttctgcagaaaaatcacgggtttacgtttttggcgggaaaattaccgggcttacgtttttggcgggaaaatcacgggtttacgtttttggcgggaaaattacaggtttatgttttggcgggaaaatcacgggtttacgtttttttgcggaaaaattacgggtttacgtttctgcagaaaaatcacgggtttacttttttggcgggaaaattacaggtttacgttttggcgggaaaatcatgggtttatgtttttggcgggaaaatcacgggtttacgtttttggcgggaaaattacagatttacgtttttggcgagaaaatcacgggtttacgtttttttggccggaaaattacgtgtttacgtttctgcgagaaaatcacgggtttacgttttttggtgggaaaattacggatttacgttttggcggaaaaatcatgggtttatgttttttgcgggaaaattacgggtttacgtttttggcggaaaaattacgggtttacgtttttggcgggaatatcacgggtttacgtttttggcggaaaaatcatgggtttacgtttttggcgggaaaattacgggtttatgttttttggtggaaaaattacgagtatactttttctcaatttcatcgcttgtatatttaagaaatttggaaaaaaatgattttattaaattggtttagatgtgttggttaaacttagattgacattggtttaaagattttagttggtttaattcaatttataaaacttgatgggttaattgggtaaaccattaaccattataacccaactcattttactcattaaaccaattgacttaataactcatttgacccataaactcattggagtcaaaattttcaactcattagggttatgggttgagttgagttgagttgatccatgaattttgagctattttgacaaccatgagttgatgctatcattttgcattctccgtttcaaatgaaacgacaatagcaaactgaattcgatactacaacattattttcgtgatgcaatgttaaagaatttagatgaatacacttgtgaagatgacattttcagtttgaagtaataattattaattagtgatctccattatcgcaggacaatagatattaatagcctctttttacactatccaaatgaaaatgatacttatgtttagagtttaaaagaaactgtgatcattgactataaagttagattatgattggaaccgataaaagacttataaaataattgtagtgtctataattgtttacataataacttaaaatgtgtataatgcaatcaaaattacaaaaaaaaaaaaggaaacatcactatatttaatgatttttttttatcatagtaatatttgtataaatttataggaattattaatttatgatatttttgaggtcatatatacataggagttttcttattatttctaactgtgttaactttaacattaacgtaactcgaagctaaatatatttactactttattagtagggaagtctaatccggtttggatgtagattatacatttatacctacagtattagtatttgttggtttttgttgaatgtatgtatgtctcgtatagtgtcttgattcatttggtcattgtacattagtactgatataaaccggtctaaattattgttgtttctggctaagggttcctgacctcctatttattaaaagccgagtccatatacttaacaaaccgcaccatctacatgtaacatgtctcagaattagtgagagtaagtttaaaaactcttcagtttggtttttgggttgattttcaaattacactgtttcagctcaacgcttatcagcttaactggtttggacactaaatcttccaatgatgaataccgaaccggtaacgtatcagccaattcctactcgtcactctggtcgtcaatcacagaaaaaagttttagtttattattaaagagcgagggaaagagaggaaaacctcgagatcacaaattcactagaaacgaagaaagacggtagaagaagaagaagaagaaatcacgtgagtattgttggtgaccgagacgaggcctttttgtgctttgaatcgtttcagtcacttaataagattcctatattcggaaagctttctacttcgggaaagttttccttctacgttttttcttttcttttcaataatttatttattttttagttcttgcaaaaaaattcaggaatatgacccataaactactaatctaataggccttttcacatattccccacttacttgggctaggcctgagttatgcaaaactaaaagtaaagaaaaacaaaaatcaatgcataaagcttcggctctatctaaagtacattttctgatgtgtcaatgattgaaatttttgtgatatgatagtcttaacatagtagcaaaccacaaaaaggtcgatccaaatcaatactatcaagctatatgaaacaatgtatctgattaattgattatagataagataaaaccaacagttacaagattacaacaagacaccatggataaagaagctgtattggtgtttcttatagttcgtcatgttgttgtgtagcaatgtcacctgccattacaatggggtttggttggtcagtgatcataagtcataacagataatacttgaatcgaggaaagaggtaagagtttaagaagtaatatagggggtgaagaaaataaacctgaaactacatccttgaagaaaaactttatctctctttcagctgacgatgttgaatccgagccgtgcacacagttcttctgtgagttcttaccacataatgctctgatgctacagaaacaagagaaggccatattataagtaaataggatcaaagaacaacctaatgattcataacaagtcagagaacgatttcaagtaatacagcttacgactatattcatcttagccctcacatttgagtttgcaaagtcaagaattgtgtttggcaacaaatcgaacctgtgagggtgagatatcttagccttttccgcatctgttggaccgattaaatcacgccaatcagaaactgcatttcgcttctccaataccatcaccaacaccggaccacttgtttcaaagatacagtttacacacattagcaaatgcagacatagcagagattgcggaagaattatggcaagcacactaaacagaacttaccaacctcgtcatgtatgtaacaagatgaggaaaaaagctcctcgatgagtgctcctcgtaaaacgcagaagctgtctccttgtccagctgagtaagcatctccttgacgatattgaaaccagcctcaacgacgatcgttttgatttcttcagtatagttaccagagactccatctggctttatcatagccaatgttctctcttcactacttgctccataacctaaacacctaacagttttatcaataaaccctaatcggtgaaaaaaattggaaggcaagcaactacaagattcatccgggaagtattaatttagattcagagcgagagagaagttatcaattggattgaaactcaactctcagatccattgcaattgagttcacagacaaaccgataaggtcggattattcatactaaggaaaacaatagaacccctagaatttctcgctcacctgaccggcgacaaggagacagaggcgagaaggaggaggaacaatatttgatatgtgattcctgacattgacttgaccggagaacacaaattcggcaacctatcagacgaattaggacgatgtaaccccgaaatttatgaaagccggaggaaaattgtgttcggagaagctaatgtcgtcgagtttgctcctcctgccggaaaactctgaaacgcgcgtttaacgtcgacttaaaagggctaaaacccgaatcttataatcttatataatcaaagccatttttgacaaaaaaaaaaatatatatatatatatttaagtttgggcctatcaacatttttaaaaaaaatattagggcccgattgataataactgttaggctgtagagacaaacactcttatttttattatatatttttttttaaaaatataaattatgctaaaaaataaatatgtttggtaatataggggcaaaataaatttgttaataagaaagttttcaaaaaaatttaaattcataaataaagaaatactgtagtaaataatttcagcaaataaaaagaaaaaaaaaatcatataaagatacagtttggttattattattaatttttaattaaccaactagatattgtacttaactaaaacgtctcactgatttcgtacacagatattgtacatcgattacgctggcaaagatatttttagttagaaaatgcttttatggctaaaacatggaaatgtggatgattttgccaaatggtaaagataaaacatgatcttaaggtctggccgtaaattacccatttaaagaaatggatcgagttttgatttgatttatttttcacattctatcaaaatggatctagttttgaacaaattcaacttcatattcaaagtgcctatctaagacataaacataacaagacatttcatttattagttagttacgctataataaatattattttctatttgagattaagacattactcaagtttaaatgctgcaaaactcgttttttgaatctaacaaattatattgaaagaaatttttttttttttttttttataactcagtgtccagaccacacagtgatctgactagtccattgggccgaaacccgcgatcagggatttttgagcctctacttaagggccccctgaaactggtggtctaaggcgcctgagcaagtccgcatgttaattccctggtggccaggaatcgaacccgggtggcgggcgcctcagtcgaggttcctttaccaccagaccacgatgcctggttaagaaagaaaaaaaaacttatacatatgaatgtaaacttttcttaaaccgaatcataaatatattttatctatccttgattttgatcttgccttgaagcaaacacacttgaatccctcttgcatacatcttcccaaacttgattattaaactagtcggtacacgtctgttgtacacttagttcactgataagggtattttgtcctaaaatatattaatggctaattggtgagagtctaacttgactttgccaactggtgaagagaaaattcatcactaaggtgaaaatttctttaaatagtaagcgctatgaaaatggtatctcataagcgaacatttgaaaatttgcatttaagagaagtagttactcacagttaccagaaaaagaaatagtagctaagcaatcaaataaaacttggttgcctacaaaaaagaacttggaagcctacaaaaaaaaaaagaacttggaatgcacagtacgaaacgtttacaacaaagaaaagaaaagaaaacaaagcaaagaagaaagaaaattggaaaacagattgcttggtgcaaagcaatctcaggctcagtgcaagataagagaaaaattaaggtacacactttacttcttggaacatcaaacccctccctccacttaggttagaaaacttcttcttcgaatagttgaattggaatagtattggacaacagtgatggatattgagaatgctacaactggaaatcaaactgaaggacaatttagctttttaacattgaggaatcgttcccgtttatcgggaaaacttccatttgtaccgaatagaaagaatgagattgttttcttggatttcaagagaaccgttggatgaaaacatattcaacgatggagaagaaaaaaaattctttgtttattggaagtttattgaatggtttcttatggttgcagtcactgctgtgataatcataaccatttcaatttgttccttgcgcagtaagctagttttgggaatgtctttgttgaagtccgaggtgtttctactaatggtaataggtgacagacttgttagtgcagttgtagttggaatcatcgttagagttctccacaagctatttagatactctgatggatttttatatgttgtgtacaaacgagagaggtcccttctcttgtcgctgagtgacatggacgatgcgtccacgataattgagaccatctttaacatatttttagggggtttgatattagcattctcaatcccactgctggaattaggcggagtaatatatttggcgttcatatacataaactctttaattataaaataaaataagcaaaatataagcaaaacataagcaaaatgtgaagaaaaaaacacttaaataaaaacaaaaagtgacttcatgtatatcgattgatacaattaccaactgtaacaaagaatacaacaatacaaatagaaaacattcaagctcgtataattgctgttgttaaccaaaaaccataatatatttgtggcagattagttttctcattgtgggatgtgaagtatgtcatagttatatcattgacgtcatggttttacatgcatacctatagtgagaagttatcatattctctattttctatacgtgtggttaaaactctcatgggtcttccattgactaaatacagaagatttttgcctattgacaagtgaagctttaagagatctacttaagcttaatccaaaagaattattatcatggcatatgaagcaaatgatgattgagaaagaggaagggataatgaagcaaagaggccgaaaggatctttcaaaatgtggcaaaactcattaagtctcacatttgtctttagcatttgtttgtgttcgaaaacacatggttcacaaatttttgaggtttattaatttgctaggtctcaatcgatttatagtgtcaccacttacccctgtttccatttctttaatttactgtctttacttcttcacctatacgtattgaaaaaattactccaattaaagacgaatgttgattatgaagtagagtaacaagtgtaattagatgaagctatatactttcaaaacttcagcgtattaacaaaactaattatgaaaagtaccaaaaagaaaaggaaaaatggacggtggaagagagaggacatgaacgttagagtggaaggattcatgagccggaatttccaaagacgtcctattcgtcgtgttgcattcgaattaaagatctatcaaaatctcattgattttttttttaaatatattataccattaaattgatattgacatgtactgatttacttggcttcgttgacaacaatgaaaaatcttgacttcttgaaattcttgttctgataccaaaatcacatggatgttgtagctggacggtgcgaacatactcggtattaaaaaaaatcaggttttttgtacaatcattgaaatggatagtaaaacagtttggtattagaatgcatagcttatgaattatattctgggattttattgggcaagtaactaattttgaggattttttttgttcacgaatccttcaaaatcattgtcagtaattagataagttgagaatgaaatcgacttataataataatttttttttttcgacttataataatataccgtcctgaaaatgtgtctttatgaaatttatcgaaaccaagaatgggtggttgatgtttttttaggtattcatatatttcggactgaaattagtctaacttctaaatatgcagaaattttgagtatttttgcaatttaagatattcatttgaaagataaaaggatagttttagacaaaaaaaatagatattcatttgactaacagccatgaatccatgcttgaaatcaaagtagaagaataggaaatttgatcctcgcattatatgaatcgttttcagccactaactaattggttatttagtagatgtttttctggtttgcatttttacatgtactcatttagtaaggtcttgagccgcaatcttcatggacggtgcaaggtagaaaggaagctatggtcataatttttatctcgacatatataaaagaactacgttttccattctctgcccatcaaaatagacctgaaccgtccatagatatgttttctcatcgttcccactatatcattatgattatgcatgctacacgtcctttctcctaaattaacgttttcattttggtattttaaaaaagtaaacacatttagtgataatatgtgaaattacacttatatcagaaatcgttaattaattatacaaaattaccaacaaatgaattgtgttatagctaaaaaaactgaaaattaatgacataatcaaaaataaaaactaaaaaattgtataatttagagaaaagcgttcttttgtctactattacatattgttaaacttaccataaacaaaaaacataataaacaaagaattcaaatgtttgtgcaaattaaatttacgtgtaaacaattgttatacttttaagaataccgtgttccatcgaatgtactatgtacgtcataaattttaaatttagatgattaatgacacatgatgtgtgtagatatcaatgccccgcggttgttttgacaaaaccttgatacgcgataatcttacaagcccacgttgaaagtggaccaagtgatcaattatttgtgaaaacacgaatcaaaagtcttagtactagttaattatacatttaaattatgttgaatatctgtttgactttgttcattctacttttagtttaatttcatggaccagtttaacgtgctgttaattggaaaagaagctgggaaccagttaaagcactaaatttcgagttaccaacttaaaccaattattcatttaatcgtttgcagatgagagtgtcttgggctttcaaactatactactctaaaaccatcgagctagagctgtcaaagcgggttgtccatgtccattagcccagtccaataatgtccatttcgatatttgacaaatagtgttcatgtccattaaagcccatgtccattaatgtccatgcccattaatgcccatgtccaaatgggttgtccaatgggcataacagaaccaaattttaacacaatagtatttgctttatattccaatcaaattatcaaatcgagaagcaaatttaaataacaaagtattagttgatttaaatatcaaatccaaaagcaaatttaaacacaattcaagtattcaacaaagtatcaaatccaaaaacaaattaacagcaaatttaaacttcttcctcttctccctcgccatctttgtcttcattaaggaactcgatattatcacctaagtacaacagtgacagaaacccattattgagtaatcaaaaacagaaacccaaatcgaattgagtaaaaaggatgagaatttgcttacttgaatagattaggattctcaggaggatccatgatgtgatggagatgagttgttgaaggaactcgccggagaaatcgccggagagaagaaatcgccgaataagcgccggagaaatgtttcccgacaaaaccaagaaatgttttttgcccaaatctatttttgcccaaatcgacttaaacctaatatttttgaccattgggccgcccatgtccattacgtccagtccgctaatgtccatgtccgttaacgcccatatccattaatgtccacttcataatgggcttgtccatgcccggtccattaagcgttggacacgggcagcccacgggccgcccgtccattttgacagctatacatcgagcttttggattggagaccttaatcattatatttgaattcatatatatttttcgctaacctgttaaactaatcacatttggtgtccacacttatattttgaccctatgttactatatatatatatatatatatatatatgcatgtgcaattccattgtaaataaccaaatcgatataataaggaatgaacctcggtatgagcttgagtcttgatgttaggaagtgacgatagtctatagtgacctgttttgttatgcggttagaagagattgtggttcaaaatggtcagaatcttttggtaagattaattaagaagttgtagcattttcataaataataaagggtttatttgtataccataatactattttaagcatcaagtacatttatgtcacatctatttccggttagtttaattttattaatttcgtctgtaaaactattcataactaccaaaccccattttcttatttttttctcaaaagaactaccaacagatcttcaacggtcttgttgtcgaattatttatttactttctcggggcctttgttactttataattagaaaaaggcgatggtcaacattctccggttaacccccataatgcaaaatcttattttgggcaaatgagagggtaaaatagtcatttaaagaattccgaccggagtttctcctttgattcctcgcccctatactacgcgtcgtgtcagactcgtaactccgtttgactcaattaccccacatttttcattccatcatttcctttttcattgttttcattgtttttggctagttaacatagccaaactatgttcattatgcaactcacgaaacttaatacaaagatgaatctaataactctggttaacgaagtatattctccgttgacaaaaaaaaaaaaaaacacaaacagagaaaagtgaaatctgttgtattaagaactttgtagctcctacaagccttttcatatattgaaaattcacatatttagcaaaagaaaaaaaagaaaattgaaaaatcattcccgttttcatgtactaaaaagttttaacagtaaatatgcatatatttaggaaatgtatagttgccttgataaattggtaagtttgatttaatatgcatttaaatataaaactctttttacatatacttaatcttcaactatcattctaaagtcatacccttttaacactttatttatcctctcttttttttttttggacaactaactttattttatccaatcagcttttaaaatcttaattaacatggtttggattggacaagctaagtaataatactataatacgccacgtatatatacgacgtatccttcttctcttcacgtataaaataaaaatagtgtgttattgccataacatacgtgttttctaaaatttaaaagaaagtcatttatcatgaaaaggtatcataatcagaataagagtaatcagtttgaaaactagctagttgactaaaacagaaagaaaaatatctttacttgaaacatgtgttgagaattcacattatataaaaggaaaaaaaataaaacatgacttttgcgtagacaatccatagtccaatcaacaaaacgtgtggacggcaagggttccttctagctctctctatttatatctctcactcgccgatttttactagtaattaaccagaacgttcatctaccaacaaatcctcaactccttcttcttcactaatagtataccacaaaacctcaaaattgtaatttattagattatcgtgatggccttagctaaagagttaatgggttatcctctcatcacagaaaggtcatcacttgtctcgtcggcgtcgcatttcaagaagaggacacagtcaacacagttctcgatcaacccttttgaccggagaccaagaaaaaccaaatccggcgtcgttgcagccatcagcgaggatttggtcaaaacgctgcgtttttccacaacgaccggagacagaaagagcgaagaggaggagaaagcggcggtgaagttcaaggtgagagctgtggttactgtgaggaacaagaacaaggaggatttgaaagagactcttgttaagcatttggatgcttttgctgataaaattggtcgaaacattgtcttggagcttatcagcacccaacttgatccaagtaagtccttctcttgaaaagcagagcattcacatattttctgaagatcgtgtaatctaaaatgggtttccaaaatactaagaaaaaacaaaactttttgattcaaacagaaacgaagttgccgaagaaaagcaatgcagcagttttaaaggattggtcaaagaaatcgaaaactaaggcggagagagttcactatacggcggagttcacggtggatgcagcgtttggctcgccgggagcaatcaccgtcatgaataaacaccaaaaagagtttttcttggagagcataaccattgaaggcttcgcacttggtcctgttcactttccatgcaattcttgggttcagtctcaaaaagatcaccctgataaacgaattttcttcactaatcaggtaactcattaaactaagtagttaatcatggtttccaaaatctttaaaacacgtcattttcgttccctcacgaattgattacatatcttagtcagtttcaaaatcttctttaacatttatgtcatggtgggtccattaataatacccaactccccagctattaagtatgaaaataacgtcatgtaaattgaatattattcgcagccgtatttgccgaatgagacaccaagcggattaagagtattgagggagaaagagttgaagaatctacgaggagatggaagtggagtgagaaaattatcagacagaatttacgactttgatgtttacaacgaccttggaaatcccgacaaatcatccgagctctctcgccccaaactcggtggcaaagaggttccttaccctagacgttgtcgtactggtcgccaatcaacagtttctggtatattttgtagctcaatatctctatgaaacatttttagtacgatttgcattcaacaaaaaaaacaacactttctgttttggttttatgaaacgtttctcatattgatctgtactgttgacagataaagacgcggagagccgagtagagaagccattacctatgtatgtgccacgagacgagcaatttgaagagtcgaagcaggacacttttgctgcagggaggctaaaagcagtcttacaccacctaattccgtcgctcaaagccagtattgtagctgaggactttgcagacttcggcgagatcgatcgtctttataaagaaggcttgttactcaagttagggtttcaagatgacatctttaagaagtttcctctccctaaggtcgtagttgataccctccaagaatctactaaaggactcctcaaatacgacactcccaaaatattatcgagtaagaaccctaaattaataacatcaattatttagtaaacaaaaattgaactaatgccatttcatatccccacaccaactaaagcaagcatcccctaattgagtaatttccaagaattttacattattttattggtcttttttggcgatttgtgtatcgttggttattgggacccattagtttcaaaaagcagacgaaacgcattactagagtactaaaacaacaacatatgttccacgtgattctcttaattcgttttgcggataacaaaagcgcgtttgcttttacttaactcattcatagccgtaacttgctttttagttattaatctttggaaatattaattagtcaattgatttctgacgactataaataatgcagaggataaaaacgcatggttaagagatgacgaattcgcacgtcaagccatagctggaatcaatccagtgaacattgagagagtcaagacttttccaccggtcagcaatcttgaccccaagatctacggtccacaacactccgctcttactgacgaccatatcattggtcacctcgacggattctccgtacaacaagtacgtttatctatataattccccttacaatggattaactaaactaatcaaaaaatgattaaattaaatagtcttttctattttttttcaggcgttggaagagaatagattgtatatgttggattaccatgacatattcttaccgttcctagaccggattaatgcgctagacggacgcaaagcctatgctactcgaactatcttcttcttgactcgtctaggcacacttaagccggtagccattgagctaagcctccctccccatggtccaaaacatcggtccaagcgtgtgcttacacctccagtcgatgcaacctctaattggatgtggcagctcgctaaagcccacgttagttctaacgatgctggtgtccatcagcttgtcaatcactggttagtacttatacatgttaatacacatttatgtaacaagtagtgaatatagagttatatattgacatgttttgttatatttgtttgtaaaggttacggacacatgcatgcttggagccatttatattagctgcacacaggcaattgagcgctatgcatcccatattcaagctactggatccacacatgagatacacgttggaaatcaatgctttggctagacaatcgttgatcagtgcagatggtgtgatcgaaggaggcttcactgctggtgcatacggcatggaaatgagtgccgccgcatacaaaagcagctggcggttcgacatggaaggcctccctgccgatctaattcgcaggtatttagctaaacctttttttgttttagttgaagatttttagctgctaaaaatgtattttttttattgtatataatacctaaatttattttaaattgtgtttattttcagaggaatggcaattcctgatgcaacacaaccacatggtcttaaactcctaatcgaagactatccgtacgccaacgacggtcttttactctggtcagcaatccaaacctgggtccgaacctatgttgaacgctactatccaaacccgaaccttatcaaaacagactctgagctccaatcttggtactcagaatcaatcaacgtcggccacgctgacctccgcgacgctgattggtggccggagttatcaaccgtcgacgacctcgtgtcgattctaaccactctaatctggctcgcctctgctcaacacgccgctctaaactttggacaatacccttacggtggctacgtcccaaaccgaccaccgttgatgcggcggttaatccccgacgagtcggatccagagtacgcgagtttcatctcccatccggagaagtattacttctcgtcgatgccaagtttggcgcagacttcgaagtttatggccgtggttgatactttgtcgacgcattcgccggatgaggagtatattggagagagacaacagccgtcgatttggacaggagatgcggagattgttgaagcgttttatggatttgcggcagagatcggacggatagagaaagagattgagaaaaggaacgctgatcctgaccgtagaaataggtgtggggctggtgttttgccttatgagttgttggttccgagttctgagcctggtgttacgtgtagaggtgtacctaatagtgtatctatataattaagaaggaaattatttataagaagtaaatgtagaaaacacataaataatttcttgtaaaccatgatatataatatataaagataattttcgtaaagttatgccaaaatcaaaatgactagaaaggttaatgtaaactatcttcttcggtattgacctaagtctagcctgaaatttgagatggcttcttgggttctgacctaacttgggtctcaaactaccttctgatcacacggataaagtataaaccttgaaattataaggtgctatgagaaaaaaaaaatgagagatagaagagtacctttattctcctgggaactcaaggtagagaccctcagccattcacttgagagtgaagacaaaggtttcttcttggattttaacctaacttggacctgaagccatcatttcattggtagaaatctaggaacttaaagttggcaagagagatccaatccaacgggtaaaacttttgtctttgtttggtagattctgatccaacgatgcagattcaccaacaagagccagcgacttaatcgagtgtggcttattagttgacgtagagagacgacaaagagacgatatagtttataccatgagtacatgtgtgatgtgtggatcagtcgctctcgtgcgaggacattctttaaacagctgtaataataagctcaattacttagattttcatatatagatttgtttgttaaaatgttaaataaactttttatagaattagatgtcgaaacacttaacatgcactttgccacgtttgaacaaaactcaaatcaataacatcgcttaaacaagatttaaccggaattaaccggaccggtagaaactgtgtttgaaatttaaaagcacactctctctatcgccacacccacaccttctctgcaaaaacaaaagatttccacttttcttaaaaatggcgtccatgaaacacgttcatcttttccgtcgttatctctcaatcgttttcactctctttcaacgcttaatttcatgtttcttcgattttccgatactgatcaaaatcgcagattcgttcttatctctgtatttcttagttttctgcgatctccgacccgtaaccgtcgatctagacgacggagaaaccacagtccatttctggatctccggccaccgtagaatctctcggcagaatctcgtcatgctccatggatacggaggaaactccaaatggcaattcgttcatcaagtctcggatctctcgaaatcgtttaatctcttcatccccgatttggtcttcttcggaaaatcgtattcgaagaatagagatcggagcgttgagattcaggcgaggagcgtcgtcggaggattgaagaaactgggatgcgttgaaggaggaggaggaatatcgatttattcgattagttacggtggatttgtggcgtataaaatggcggagatttggccggcgatggttgagaaattggtgattgtgagtagtggagtgggatttacacagcagcagaagacggcagaattgaaaaaacacggcggagattgttcgaagattttagttccgaaaactccgatggatctacggttgctgattaagatatctatgaatactggtttaacgttcgtcgattgggttccagactttttcctttcccaattcatcgctgtaagtttgttctgtttctgttttatctgtttatttccgaatctggtcccgtaaattgtttgttcgttagtcatgatcctaaaggtttggaatttgcaaaattcatcctcttcttataggtaatgtatgagaaaaatcggcaggagcttcttgagctagctaagaatttgttggaacgagaggaggaaccagaattgcctgtaatatcccaggtagtataaaatttcgttgagttaacctttttttaattcctgatcactaatggtttaactctaagcatcaagatatatattaataagttggcgtgatgattaatgtgtcgctgatagagaactaattgatgttttggattgtttttatgggttttaagtattcatcttttggatagtggaaacactattctcgtttgtttgctttcacttttatattatttctagagggatgctatggattgagatgctttattcgaatctacgaataaaatatgactctgattaatttgatatatatgatgcagaaaacgttaatcgtttggggagacaaggacaaggtgtttcccttggagcatgcttatcggctgcaaaggtaaatactacattgatattttatggtaataagtcccataacaagtgttgtcataataactacatccgtataaaatatttaatatttctactaggtcaaaagagatgaaacatcgaacgtgaacgcatgtgattattgatcgtgaatccaatatgtcgaaactaataaaaattatatacttttgcaggcatttacagagttcaagattagagataataaaggaaacaggacacgctgttaacattgaagcaccaactactcttaataattttattacttcgtttgtcttaagtgcttgatttctatttttgtatatacttcttcttcatataaatatctatatgcatttgatttaagtgtatatatagttgacatcatttaacatatcatcaactgctgagtcatcaaagagctaaaactttcaagcttaaaatggagaggacaactaaaattacaaaaggaaaaaacaaaaacccactaaaaaagaagacgaaatagttagaaagtcccacaactacgaaaaaaataactgtattatttgattgcctataagactcatgaattttatatataatacatacagtttcactacttgtgccttcaactctccatagatgtgtaaactcctgcaacctataataggaaaagttgaggactatatatagccagccataaatacccgaggttttcttatttatgtaagtggtgtttgtgtatgataaaagtgtttaccaagaagatgaacatagcagtgagagctggctcaggcttctatattcaagtcctttagtatcgtgtcatgtgttgtaatatgtgaggaccggatgtctgcgaaaccaattgttctgaactttgggagggtcttaagagatgattcggaccatttgggttcaccatcgcttgtctcatagtttccttggaattgcttgcattcgtctctggttttgaggattctagtaatgcacgcacctggcgacacaacacaaaaaagaaacttcagagagaggtccataagcacgactgtacacaaagagatgtttggaatatcattcagcttaccattgcaagtcgcttcttgtggagatcagttggtacctgcaagttgttaacttgggatcaatatctagcaaactcatgttctttctctttttcttttattggacattcaggtggtgatgcacattcacatatactttttgtgcttttaaagagttttaaaaagaaaatcacttacagtttttgtttgacgtttatcctcacttgagaatccaggaattgtcaagtgcaagtttttctctgcaaaaaattataactcagcaaacagtaaaatgagtaacaatagcaactacttagaattcacattgaacagagctcatcaccaaattaagtacagacctaggtggagtaatatatccttgggctccaatacagatgatttacgatgcttagccaagctacatgcaaaagatgtgacctgcaatgaagtttaggtaagatagagataggttttcacaaatctgtaaataaaaaagctgaagttaatactaaataattgatattagcttctaaccgaatcaatgaagtcatctgccacctccaaaaggaggtcttcaacatcaggatccagtttcgcatgtacatccacctgaacatcatgatacaatagaatgaaacatatttctaaaggaagaagaagatagaaacaagctatagagttgaagagggaaaatcacctgcgaaaccagatcctgtatcttccttttaccaaggagttggtttgttgcttctgttccctggcttgagctaccacctggtgttgttgtacccgattgtgtagcctctggttgtgaacccgttaaactgacagatttttgtcctgcatgactcaacatccttggagatggctgttgttgattaatctgcatttgctgttgttgttgctgctgctgctgcatctgctgttgtggttgctgctgtagttgctgctgcatctgttgtagttgttgttgggaatgggattggttcatctgcgactggcctaattgtgattgttgctgctgctgttgtattatctgtgatatctgctgctgattcaaggacatagaagattgatgtaactgaggagaggacagttgttgttgttgctgctgctgctgctgtaagagaagagcctgtctttgactcggttggagtcggaatgaattggggctcgttattcccgacatttgcttcagccattgctgctgtgacaaagagttttgcatcatgccagcttgtccattctgggccaaacccgatagctgaggattcataaatgcgagagaagatgttctctggaggttctggacctacacaggggattacaaaaagttaccaagtgaagaggatacaggatacatgagattcgacgcaactctattttttaacttgaaacgaaagaaacacatgctcacaaaatgatcaggaatttgcatattgcacaacataaatgtattagtacctctatagatacataggccagattttacaattacacggtaaatctgtcaaatttaaggatcattcccgcgtcattcaggtattttagttgccaattacagatattggaaaaactctgcaagtcaatattaagtgattgattaaagtaccaaaacctcatggatcagtttaattaagactgtgcaacaataagtcaaaagaagtgaaaggatccaacacgagaattcatttgtatctatgagccataagatataacaagtagtcaataaaaaagttcacaatgtgagagaaagaagttcgtaagatacgactttttaaaactcatacctgaggtgaagtaagagcgttttgctgtgacaattgctgtctcatctgccccgggttgattctctgctgcgcatagagagcagggttacctctcatttgcgaggtcaaattcagtgatcccatcattcccatagcttgcatcccttgtaactgttgtccagaacttcccggatgaaactgcgaaccttgaaccatgccagatttctgcctcggctacaacggaaaagctcatttgtctcagaataaagaaaatgatttgttgttcacacaataatagaagaaactgcagagtttactatattcatatcaacaaaaacaattgcaacactatctccatctaaagcaatactacaagttgagactccatccacaaaaagaaagatatgaatcaacaaagggaaagagagtaaaagtaaagaatggggtaccgaagcagccaataattggggttgaatattcatctgagcagctccagcagcaccgttaagcataggcaagtgaccgctttggccaactaaacctgctctggacatattagggttaaccatctgctgattctgctggctctgttgaactgaacctgagccaccaaagttcatggttccgtacaaaccagcttgctgtctcaacacgttgccgtattgaccttgatgctgctgctgctgttgttgctgaatttggctcaggcgagaaagagaaggggatcgctgaagagattgagcaatttggtaactcgacattgggatttgctgtgaagtcatgtgttgttgctgcagaatctgttgctgttgcggcgataattgtggaatcggagatgaagagatttgctgcataatctgttgttgttgttgaggcaattgctgagtttgttgaacgagttgctgagtctgtgtttgctgatctaaagatgaagaagggtgagagagaggagaaggcgacgggatctgagctccgattggtgggttagaagaagtagggttgggagaggagatgttaggttgcgaattgttctgaattacaataccttcggtggtagttacagtcatcgccggagacgcagcggaattaacagaattggaaatcggagctgtcatgagttgttgttgttgagatgatgatgaaggtaaaggagtagaagatgcaggagaaggttccataggattaggagattgtagagatttcggtgacagagacgatgagggaatcggttccgccattagaagaaacccagctgtgaagaagaagaagaagaagaagaagaagaaggtgtattatttggttgagaggggttttgtcgattttctctcatgaaatcgtgttttatttttttcccagaagtttattgaccgataaaatatggtcttctattttttttgttttgtttgttgaatcagttctggggaaaaaagaatctgagccgtacacgtcagtagatttagcggaagatgatcgaaaagatacttgtactgaactgtgtttcattattccagactctcgcacaactgctctaacactttttgtaggattatctcatagaccaatgcaatcaatattttacatttttttctcttcaccatttattacatcaaatacgtcaacaaaaagtcaaactgtttcgttactcaggtgatgaaactagtgtgcactattttcacgtttttggtgtttcagaattatgtttttaaatttattcagcacaatgttttttctgcctcttgattctgtatgattcaaacctttattgattaactaagtaaactacactaactagatggaaacaacatcctgttgatcatttaattcattcttatttggagatttttccgtctacaaattaaatagaaatctttatttagttataacttgtaacttgtaggagaccttttagttgaataaaaaataagctctctttttaactgaataaaaccttccaaaactcacctataatagggatatgaatccaacactatgaatctataaagagaattaatcatcacacctacagctatacaaatacaagatcttgtggactttaaatcacaaaactataataatttcccacataaacattaataatttattgcatcgagttttggactgaactagagagactgagagagattttacagacattacaaggcaaagagtcccttggagtttgcaaacaagtgtttgcggcgaataagttccggttttctaggacctgttgagacgagaccggctaacagagacggaggaccggtgaatttggtttgcaccatttccctcactttcatatagccgtcgagtgtcatcaactccagaagctttctacagctctgatattgaaatttttttacagaatgttatcagagagcaaccaccgtatatagagacaacagacaaagagctttaagaagttttgatcagtttcagtaaatgaaaccataggagaagaggtttttagggtttatgattgttattacctgaggatttagtatgtccattaggtttattatctcgtcctgccacaaatgaatgtttcgattagtattttcatagagttcgaaaccatgatggcaaaaacttattgggtggaaaatggagaagtatttacctctggtataccgggattttgcatcacggtaccaagaacacggcgaactagtccatcaaagacaattttatttattgacccatctgcgtttacccatggatatataggcacaggtgacttttcagaagttgattcctttgtttcaccttcaatacccgttccaaaagtaacagatggagctttgatagatgcttcatgcaaaccgctcgtttgagccgtttcaggaaggttaagaattgtaaccttgtgaacgctattcccagcgacatgctctcgcatgtcctgtgaagtactgtagctgctagcaatgatatctttggacctatgttccccaacagctctctctaggtagttcactggtagagactgttgacttttttgggaagttccatcttcctccaatgtcaagaagtactttgatcggtagaaggaatggacaacacggaaattattatagccatttacctgaataagatattgtatggttaacaagttgcttgtaaaacgatgtaacatgaactgagttcacaatccaggtaagtaaaactagtaaaccaagcactgcaactttcatcttaataaaggcaacagggtttgtaaaataagagataatcagacaaaccttcaaagctaccccaaatgtttgaagtacatctacaatgcagtcacaagtttcttggcctgatgaatacacaaaggttaaataaaaacactgaaggaagtcgccagcacatgcaaaaataaaagcctgttaaaaaggtttgcctgatgcttacttgggatatcaataagactgtggacttcttcaatgctcagaccttggtcaccagccttctgaagggcattggaaacggtttcaaaaaccctgggactgaataaactaacttcctcatctgttgattcggacataatgctactagtaaaactggccatcgcttgccagggagaatcacctagactgcttggtatgacagtagaatctgtagagttgaaaagttctttcatgtcatcagaatcacagccactattcgcttctccccacttcaaatgaaattcaccagtgcgagagtcatcatccttaaacaactctattgcattagctgttggtatagttgcacgacgaacagatactgctataccagggaaacccttttcctttcggaagttgatttcaccttcgcctagtagcttcaatttcttagaactctcagcttcagattcttctatgtcatcagctctacgtttcaaacctcttcgatctccaggctctccaacaccttcttcaggcaaggatacagatatagagagttcaccagaagaaaccaatgaaaagaaatttaaaatatcaccacattgcaaatccgaagtaagagtgacacccccagccataaggtctctttcatgttcgaaaagccaactggagaacttggctgctcttgtcccagtattaactgggaatggagactttgaaatactgtgcaagaagttttgagaaagcacaaatggctgtccaccacttccaccaacctggaacgttcccataattcaatgacttttcagttttctttgacaaatacaatcattaagtttatctatacaagcaaataaacttgattgaaaataaaataataaagtgacgtgaagaaatgtagaaaactgtttcttattcaccatctcatccaaacatcaagcctgcacattatgtggttttgacagcaacatcgaaccaaaaaaaggaagaaaagatgatcctttaaagttaaacatgctatgctatgctattttcacatggacactcttatgcctcttcatacaactgataagcaaataagcatataacaaaaggaagtagccagaagttttaacccagtaacaggaaagtaataagaaactttaccaggaattttttgtctcggaggtagctataggctgtgaagaggtctcgctctgaataacgtcgtaaggtatcttccagcaaatttggcataccaggtgcagtaggcatgctcagaaagacaagctttaacagttctgcagcagtagaaactgccagagatttccgtacttgtatactatcgttgtccttttcatctaaaggcctgacagtttgatgaagacgataatgaccagatcgtcgagatgtatctttaacttgatccacagacacattttgaatgtcctctgagtggatcgcaggtggaaccatttcactcccctgcgagttcattttttagtttatcataaattgccaaaagcaaaagaaccactgaaattaagatcttccagatcagggtgaatgtttccagtaaaattatgtatgaatggttgtagcaataaaagtgaaacatcacagagaagtgaagaaattgtgggaatgatgtcaaacgaaagaaaagtaagcaataaggagcacctcatcaattatatctctgtttgaccattcccgagaactttttgtccgtttaggggccaccagtttagccatcttcttgagctcaagaacatcattaaaggcttgacttatactcttttcattgaagtcatcccatttttcttcatcaaaacatatatctttaccttgctcaacagaaccagaatccgttccgccaattgccggggataaatatctaacaagaacatgtgacttgttgctctcgggtaaacacttctgtttcgtctccagatgtcttgcataacgctcactgagcagattgcaaagactcatgatcgccttccgaaatttatcattcttcatcaatatttgaacccgtcgcttgcaagccaaaggaggggcaggcagttctggaactgaagcccacatcactccatgaaatttcgccccaagagctgcacgatgtctaacatattgactcaacagtttcctgaccagaaaatacttgtgtcagtggtgcaaattaatcagatgtcataaattatttaagacaggagaaagtttaaagaatgaacgactgaacactcaatcatatggaaattagttgacagtaaaaaagcatgaattcattgaaattgactcagtaaaggaactcccgaggtattggcctcctctgaggaatgaatcccctgaagaaagactcctaaaaccaacattatattggacgtttacagcgagaacctatttgatatatgaaaagcattcatataaacatatagatatacaactgaactttcattggatgtgtcaagtacctgtctgcctcatctgtccacgaaaatctttgtgaaggagttgatgtggtctttgaacttgcgtactggttgataatagaagagcactggccttcatcttcagtaagatcccttatctctgaattttcttgtagattatgctcctgatgctcttctaatgaatttagaaacttctcactatttgaggcatcaatggcatcggaattcagaaccttttctccgtctactattatggatctgacaccttctcctgtagtctttacgagagttcctctttttcttttcccagaagatgaagaagagctattatctatagctaaatgtttatcttttgatttggatttcacgcgtcttccatgcttcgcatgatagacatgcataacctggagtacgcaaccaaaaactattagctacgtcaccccagtaaaacaagaggaaaaaagagaacattcaggtcagtctctgtttgtggaccagatatgagaaagctttaaaaccgaaatcaagctgaaacatcaaagaaataaagagttggcattatctctaagatcaaggacaaaaagaaaattatttggcaaagtaacacctggtctcaaatattttttcccctaattaattaggcaggtgacttagacaatatatacagcacataaaaaacatatctttacctgctctaaggtcaggttcagatccttagcaatcttctcacactctttgaatgagagcttttccttctcatcgattgcaatgcgctttaagagcttagcacgctgttccgttgtcatgacacgatctgaggcccaagagcggaaacgaaaaacctagaagaactgactgttagaaacagttttctgaatacctaacataataggcagatgaaattattgtcacagggacaaaacagtttttgacagagatataagcgtaacacatataaatagtttgactaggttataatattttagttcaactgttatctttataataagccataaaacaaaaggatcaagcttatacctcttgaacaacagatcccggaaatgctagcttagcagctctgtgatcggcagcagcatagcaatattctaaagttagccaatattcatcaacagcatctctatttgatagaataaagtcatgccgaatacgtggacgaaaatcaagagacataacattggatgtagcagcaacaaacacaggttcctctatataaggcttaagctccattgcatgtgttagattagcatacttctcctcaatttcatcgcgtctgagtctactacttaccatctgaattaactacaaaaataggcacatttcattttttgaactgcacacacttctctgtaatatgtatcgaaataaggtacgtgaggtgatctttaattatatggatgataataccttcaagcgacgtaaaatatcaataagcatcgataatctcccagttgcaagagtgtccattagaagcttatactcttcaccaggaagctcagaaagacgcataacctgtttacatttcttcatcatatcatcagctttctgagtagatccaacaacttgtaaaaacagttcgagtggcatggctttaaaagcatcttcaagtgcaaacaaattgtcagatttctgatcatgtatagacgaaaaggcattgtcccagctagacaaagaactaaaatagtcccaaaggaaacaatgtaagagcttcacacgaaccatctttgcaagcacaaacccattggctcgcatggctcctgatttgctagcacgcgcatccaaatccacattcgtttgacctctctgaatgtcattcaatattggaattagctcgttgcttttcctctttgataagttctggccacggagtcccagttcaaaagacctaatcctatcatgaatttcaccaactatgtctcgagtcaaactttgaacagatggatgaaaaactaccacagagctacgattgcgaccacaattagtaacatttgggacactaatgttcatgcaattgcagagtccttcttcttgaagcctatttagaattctgtcaatggttttcctatccactttggagctcctgtccttctcaagactgagaagccatttatgtagctcggctcttacaacaaacttctcctcctatggccagcccagaaagaagaaacaattattcagttggaagggaaaaggagaaataaattatggcattcaatgtcgagaaaagagaacagtaagtacatttaagcgctcaagtattctccgctctcttcgagagttttcaacagtaatcggctgaggttggtgcacctttggtttagctggcttcggtggagcgagatggttcatttctgacaaagccaaatcaggggaccccattgcagtatcaacaaccttatcacagatctcatggaatgattcttgtaagttacggcgtgtaaggacatgtcttcttttggcatcagatggggaacaatccggaactcctgaattgctttcagaatcagttagccttccaggtgtagcaaagtggagaactcctgaattgttttcagaatcagttaaccttgcaggtgtagcaaagtcagcatcagaaattgcaatactgtgttcgatggaggtctgagtcaatccaccagtatcatgaggtgtgccaaaatcattaatcggtacattgttttcccagctacgattttcagctttctcaggaaaccgatcagaacattcggacccagcattaccagaagtccaaactcgaaatactctagtcttcttgtgactttctgcctgtaaatgcatcccgacttttaaacaaatactataaagccgagagtagctcttcttcttgtcaattccaagtctttcacatacctggtggaaataatatttaatgccttttcaaaaaaattcagccaaatacataaggtaataccaaaaactgtaaggcaaacccatcaaatgaatacctccatcacagccaagcctttagatccttcagcatcaaccatatcataaatttgattatctattggaagctccaaagtttgttctgttttttgaatactccttccgaattttaggagttgctttttcccagagtagttaaaatcttttgctgaaaatctttttaacaaacggaggcatcgttcaacctgcagaaaagacaatccaaatattttatagccaaataaaacagatcagaaatgctaaataaaggcaattggccaccatatgtggtgaaatgtattcgcatgatggaatgtgatgcagattatagttcaccttattgttcaccacagcatcaaactcctctactacatgagaatctgtcaaccggcgacaaacctgatgtaatccaaaatgcacacgtattaatttttcaaagatatatctaccaaaaagaaattggcaaagtgttgaaagtctctttcctcttgctctataagagaaaaaagaaatatatacttacacttctccaagctctatgccttgaatgtgatcccagataaccgaggtcttgcttaatgtccgagacgactagaacctgcactacaacaaatgagtatagagaaagaatgctccagcttgataaaaaaagaaagaaatgatttgcacttactaaccttctcattagtttcttcaagcttatcacaaattgcctgcattgctggtagaaaatctttaatgagcgtatcctcttttgtactttctgattgtaaactatctccggcgggagtagcctcttgctccaataaagagtcctctttgcaaatctcaaatctctgctgggaacccaaaggcttggcgtaacgacttaaatatatcatattggtgctaatgcatgaggtggttttggaatccccttcaccatcaacttcctttgttctcactatcgctggttgtttaacaactaaacctcgagactcaaggtgcttcacaatatagaagaagtttctaccttcgataccaaactctttagcaagcagattttgtgcaactccattggctctgcatcaaacacatacaacataatattatacgagctcgaactcttaagagtagctagaagagaatacagaatttgcacttaccgagcaacagcaagccgctcgagaacgcgacgctgaatagcggaaatagtcgtgttattggactgagcatcgtacaagccaacgaagttacctcggagcttctcattcgcgaagatcctcaaatcgagtcttagtgcctcttccagctgttgaatcgaagcatcagatggttcgtacacagtgtttttcgccttgaactggagctgagggacggcgagaagatttctccagacatgagccttgacggaaggagaaagaggaggaggagagagccttgaccagagagaaacgagtgggatccctgtatttccttgacaacagatttcctccagtgctgtgcatacaatcgaatccatttctcatcatccaaaaggtactcggttaggtttaggtcaacggaaaatcttccgccgataaattagttagtcagccgattaaccggaaattctcgccggagaggtgtcggaataatttatatagatttgggagttaggcgaagatggcgggatcagaagaggaaacgatcgaagagaaagagatattcgagttcttggtgacgggatcgatctcaaggaactgcgaaataattacgaggtaatttaattagggggtgagacaaagtaagtgacgagaatggccatacgtcagcaagttaaaacattgattcctcacgcttctaaactacgggccgtttttacttccaatcgaaacgacatgctgtttatgcgaattaggcacaaacaacacgaatcttttgcgggtcgggtttgttcgatccagatgtctggcttctctaacctccgtatctctctctgcaaaaagcgtgattcagagtaaatacagaaaaatatatcgtttttataaatggcattttttagaacatattagcttcgctcaaatatctctgtctcaaaagacaagtagattccttttttttacagtatccaataatttgtaatcatataaataatcggtgaaaaagaaggattctttgtttgtttcccgagaaaatatcctcgatttccatctcctatctgtcatcggagctttctacttccgaaggtaaggaaactggatcggaactcttttgaattctgtactgtgtatttgcttagggtttctgggtcttattgcattgttaaggattgcgaatcttatctgaatctgtgtctactactattgtgatgttttaaagctatttgtggaacagcttttacttgtccctttatagatctctttccctcttgggttcataagaacaaaatcctcttccctactttgtacgattcatgactattcagctgaatcgtgttgggttcttgtctgaatttgagtgttttaagattggattattactggaaatgtctgtactaatggaatcttatgtgagctttaaggattagagctctaaaatcaagatagggtcaggtcaacgcatagagaataaattgtgttattgtaactacttttctagtcaacgttttctgttaaattgaatccctttcttggctttgtttccatgtttttgacatgattgtattgaaacaggagtaaaggatcaatcaagagtttgatcttgttagaatagccgataatggaaggagatgtgttgtcaggatttggagacagacacaatatggatgggaaattgttgcagagtttccagaagagctttgtggatgttcaagacattttggaccaaaaccgattattgatcaacgagatcaatcagaaccatgaatcgaaacaaccagataacttgggtcgaaacgtggggttgatcaaagagctcaacaacaatatcagaagagtagctagcctttatggtgatctctctcattcttttgcaagatcagtggatgcttcatcagaaggtgaatctagtggaactttgaaatctgatgggaaagctaaccagaagagatttagatccggttagtattgtaaccaagaggtccaagaccatcaaagttgattatcatagattcatattcagattcagagctaattgattgaggagaaaggagaaaggagagttttacaaatgtaatatctctattgaaatgattaagagtctttacaagaaacttgttgtaaagtttacacatttcggtttaaggattcttctgtttttcttacctttggtctccagtgttatcattgcatgtttgtttgttgttgtatagcctgtgcgagttttacatgagtgcagtattttgaactctagactaagacgacacgtattcgaatcctgaagtgtaagacggcacgcagttgtggtgcacgagagtcgggacggaacgtagttggctctttttcggcagatatttcgctattcgctgacgtggcaacctctaggagcttcccgcataactatacggatcccaattggcattctgaaatcgagtgaataaaaagctttggaatccggacctgtatggcactgtattagggaaaaaaaaagccgaaagcgagccaaaacaaaaaaaaataaagcagaacaaaaaagtttgcaaatatccaaggtttttagcttagtcaagaagcctctcctccgagatttctcgccgatgaaactacgagctcactggaaagtctgatttttttcttctccgttcccgttctactttctctggtaactctcttgtgtacttgttgctcggttaactgctttcctcgtgacttttcatatttctatcctgaaaattaagtagtgggtttgtttgatgcgagttaaactgagtggaatctaccaaaaacttgatgtgagaactgcaacacgcaaattccattgaaatttgataaatggtagcttaaagttgaaagcttttttattattctgaagatgcagtggtgttttttattggggatagagtataatcttattaggattattactatatatcttgtgatagagtttaggtcctatatttgagggattagagatatataggacctaaactctatcacaagatatatagtaataatcctaataagattatactctatccccaatatttttctctctatgaaagggtaaagctaggatttttgagtatcagtgattgtattgtgtaagagttttttgcatgactgaaaaatttattaagcatataggtatatttgcttatgcctttttgtatgcttgaagttgcatttggtaggttaaaatagggtaacaatgtttggaaatgtgaaagactatggagagacgtttcaagacagtatttttcagacaagaaacggatcactttcctcaacaaatcaaattggaaaccctgttacgtacaagcttgtgcgggtatgttcataaatgtgtatctctgatttatagaacataatgtttttgctgttcctagatttaagaattctgactagtgcggttacaagttgtagcctttcagtatcttatttgagattggttatgtgaatgtattaggttgcaggcgacgggagtctagttcctgcaactgatgaagagatgttggaggtcaagaatttgcttgagaaaaacgagcaagatatgcctgttttaccagatcctatacaaactgaggaatacattcccgatgaaggttcaccttctcagtttctgcagctagaaaattttgaaggtttggtcctaatcactctaagcatattatacatgttgaatcactcctgtttgagcctttgtcggtttaatttgtgtaatctgcatgtattgttagaggaaagacttattgtatacacgcaaagacggatagaatttccttaggactgcacgacaagggtatttattgggttacttgcaatgtcggaggtctgagcagtgttttatgtgtaaatatgtgttcgtgtctgtagcttttcctatctgatgtctaggacagtcagttattttttagtatacaatcatttgtgaatcttagcgatatattttctattctaactcagctattcaatccaggcttctttcagtcggaaactgcaggaccgtatacagaaaatttgaactctcgacatgaggtttgttttcttgcttcaaaatctagaaacagaactttctaatattgttattcctgtataactatcatgggtcagttggctgttatagccatcaattttactccacctttgaaacttttgcagtctaaagaggaattgatgaatggatctcagatgctttttgttcttccggataccaaatttcagatttctactgagctgtctgggaatgtggagctagtcccatccaaagttttgctgcaggaaccaattcttttttcatcaaatggatgcagtattaatcaatctacggatgtcttaaatgctacagctagtcctaaagaacctgcattgtcaactgctgcctcaaaacctgatttttctagagtaccaggcgagataagcttggctaatctttcaattaaagaattacaagaaactttcagagccacgtttggtcgtgaaactacttctaaggacaaacgatggctcaaaagaagaatcaaaatgggactgattaattcatgtgtagttccaacaactaccctgacaattaatgatagcaaactgattggtggagatcaagatgcaattgatgcttttagcaagggtacagtagatgaagaaacagctactgaaagcatagatacaccagctagtcctgacggcataaaggggcattcaaatgattttgggcatagtcctgttgaaacttttgtggaccattattctggaaacgaagattttgaaggtgaagatgggtctgcaaaaagagtgaggaagcctacaaggagatatattgaagaaaccaatgaaaaacaacaaattgacgggtcaatgatcccttcaaaagatccaagctctattcaagccgtttcttcagaagggagagttgttgtcaccaggatggtatcccttgctggttccagaattcaggttccctatgtttctcatgtaaggagaagtcgtccaagagaaaacataatggctcttggggtatgtctctattgttcatgctcttcaatatctttattaaccccattccttatcatatgagctatcaaaatatttttacttatctggcacatgctaaatttatgtctattgttacacactggaaaaaggaatatagaagtattcatcttttaaattgtgtttgctgcaatcaaggtaatagaggataatgttgtttacctgtacattttgtaggaatttcgttctaagtcatgggaggtgaaagctgctccagaggagggtaacctgaatctaagcccacctcagttgagcaatgatgtgaaccgagttccaggtgtcaaatctgcatctagatgtgtccagaaagaagtaagatcactctggcatttctgtataacttggtcatttctataatagtggagagcattttgtaaatgtaaaatccattttactttgattctatctatccaacgaagtctcaattgctctgaactttatggtttttagttgagatggtatgtaaaaagactgtttctaatcatctagcagtatattttttatttctggtatgagacagttgctcattgctttatctattttggttatcagagtgacaaagaccatttaaaaccaattttcactgatgtggatcaagagatgatggagccagagctcttagactcatctggagatagctcagatgataatttcgttgatgcaccaatcacgcaaagtgcaagtggaaggaagcttcatcgagcttggactatctctgaagttgaaaaactagtcgaaggtgtgtccaaatatggagtagggaaatggactgagatcaaaaagctttcattttcaccatacacgcatcgtaccactgtggatctcaaggttggttcaacataactaattaactgtctcatctcaatattcttaatccttttgtttaatcacaagtgtctcttgtgataggacaaatggcgaaatctacaaaaagcaagttcttcaaacagaatggttagcacttgccacatgttttaaccaattaaccaataacttgggtttaagattaaagtggtgaatggtttgtgtatttgcaggaaggaggtctgaagaaacacgggtcgatggccattcctactcacattatgttgcaggtaagagagcttgctcaaaaacaatcaccgatttcacgtgtagtgagcaaggctagagtggtgaagagatcgagatcaagaaacggtttcttgtagcgtttctactctcgtataaatttgtagttttctgtgaggttaacttctctgtttttacttttcgagtttgtagttttaaggtaggttcatgatttaaacagaatcactaaagtctaaaggtaaactgactggtgtttggaaatttctagatgatatgaacacttctctccatattactgaaccaaaccaaaccagattatcaaattcgcacaacaagacacatactactaagaattcactttcacataaatgaaacgcagcgtttcatacccttttgttaaacgcagcgtttcacgaaaacaagataataataagcatcgagatggaaaaaggcctttgggctttaagatacagtaaatgggactgtaatcctttttgggcgccctattacaggcgtgctctctctcctctctccatctatctccctctcttcgccggagatcgcccttcaccaattccactgtgagtcgcacatcaaatattcctactttttcatgctaagattttgatttattgttaaatcagttatatttaaatgattcctgcatttcgagctcgtctaatggaattcatgtttggaatcgatgtctcgacatacgtttttttgttcgattagacgtaaagagctcagctttcgccttttggcattcaaatttgtttactgagtggatatatatggtttgataaatttaagctaaatatgaatcttaaagctttatattcttcgggtttgattttagctcttttattagcaatctgaagttttttgtttgagttattgataaaatttttatgttattatctatgaactctctgattctgagtctattgataagtaacaatctttgtcctttactctctctccacagatagtagcaaaaacaagtgaagcacaatggggatcatcgaaaggattaaagaaatcgaggccgagatggctcggactcagaagaataaagctacaggttctctttttacatagagaacattcagttataggcatgggacttatcagtttcatgttgctcatccttagtagacgaaattagataacaaacattacgaattaaacagattgcgagcctttacaacacattatagacacttaagccaattttccaaataatcactatgacaagtttctggtccccttcttctgatcttacatttgctaattgataatgttctgtttgtgaacagagtatcatcttggtcagctcaaggcaaagattgcaaaactcaggacacaactgttggagcctccaaaagtaatgcaagctctttataaaatactaaaccattagcctatgcgcttatatttctatatagctgagtgattcttgaagcttgtttgtttcctttcttactcggtttatagttttccttgctggtgtgttgctgtatgtttactactaagatagacgatgagtaactactgttttcgtcaccttagcttatctatttagggctataatctatttaagattttcctgctgctttgatctgaagtagaatttcaaacatttttcattactgctttcagtttgtaattgtcttccgaattcctttaacagggtgctagtggaggcggggaaggttttgaagttaccaagtatggtcatggacgtgttgcacttataggatttcctaggtaaaggcatagatacttatactcacaagatccaattacaaattatttcctgttttataaaattatgttgctccttaagaagttgctggcataagtttagggaaactgatggaaatggttgtactttgcagtgtcggaaagtccacgcttttgactatgttaactggaacacattctgaagcagcctcatatgaatttacaacacttacatgcatccctggtgtaattcactacaacgacacaaagattcagcttctcgatcttcctgggattattgaaggtgcttcggaaggaaaggggcgaggaaggcaggttgaaatccaattgctttcttttcttgttggttatctgatttctttttggatgcccaagttcgcctatcagaaaaagataatcaagaggatatgaactttcgttatgactgcttatttctcaggttattgctgttgcaaagtcttccgaccttgtattgatggttcttgatgcctcaaaagtgagttacggtttatatgtccacgtgaattggtatatggttgtcatgctctacttgtttattaagctttgtatttgcttgtttaaatttgttagagcgaaggccacaggcaaatattgactaaggaacttgaggcagtgggcttgcgactaaacaaaactcctccgcaggtaaagcttgtcttatcagcagtatcaaattatagatgtgtcatgtaatacgctgaagtctaaactccttcaggtttacttgttatgctccattcagaaacttgggttcgtgtggaatttgtttatgtatatttggtttgttctgcccaacagatatactttaaaaagaaaaagactggtggaatctctttcaacactacagcacccttgactcacattgatgagaagctctgttatcaaatcctgcatgaatacaagattcacaatgctgaggtacgtggttcctgctttattcttgtcttgtctaagtgttatgagtagaattttataatcatcagacatttgtgagtatattgaaagctttcttatggtagtttttactgtggtggtgagtattgcaggtgctatttcgtgagaatgccacagtggatgactttattgatgtcattgaaggcaaccgcaagtatattaagtgtgtttatgtctacaacaaaatagatgttgttggaattgatgatgtggatagactatcccggcagccaaattccattgttattagctgcaatcttaaggtaagttttgtaacgagtagtctttttagacctgcaaggatagaaaatgctaaaaaaccaatttgttgctgttctaggtttccgttttcattccgagtttgatatttgccaaatttattgatattttactgctgcttgaaacagcttaacttagacagactacttgcaaggatgtgggacgaaatgggccttgtgagagtttactcgaagccgcaaggccagcaaccagatttcgatgagccttttgtcctctcatctgtaagtattctttcactttgcaagataacccttgaaactcttccatacctgtgatattcatctttgagtacgtgtgattcatcaggatcgaggtggctgcacagtggaagacttctgtaaccacgtccacaggactctggtgaaggatatgaagtatgcactcgtttggggcacaagcacaaggcacaatccacagaattgtggtctttctcaacatcttgaagacgaagatgttgttcagatcgtcaagaaaaaggtacataaaacgaaaatctttccattgacatactctcattcaaatctatgattatgatctctgttccttgatgagactatctaactttgtactgctgattctggaatctttaggagagagacgaaggaggaagaggccggttcaagtcacactcaaacgcccctgctagaattgcagacagagagaaaaaagctcctcttaagcaataagcttttagctgataagtcatctccatacatccatctccaccatcatagtcgtggatggtttcacctgagtaagatttactatgttgtatctgaatccgttttgttgttttctctcacaatataagttttggaacaattttacttttttgagatacaaatggaagtacgagttcctatttaccctttttggtaagctaagtttttgatttttgtttacaagtctgcctttaattcttgatatcttattataaacaatactagcattcatatggaaggttaaacaaacaaggagaaacgaaatcgactctgattacaagttattgagaagtggcctaagtagccaaattacaagctcaaataactcatcaatattcttatatatgtaaacggtacacagaagctgtttctgtatctatagttcgtgtatacgtttcacaggaaccgttcctgaaacaagacaaaagataaaccaacaggctgttgaatatggcttgacaagaatcatcatggcttgctcttttagcttcgctggctcttggcccagacattccccggagggtatagatcagtacactggtctgaaccagcactgcgtcttgcatctccgttgcaagataatcctgattgtctctgcttggcttgagtagattgtgtcaggctcatgtagctcggctttcgatagtacccaccaccatcaagaacactgctggagaatgcaactggtgattgagatgtcgatgatgttgatgtttcatcgtgtaaagaatcataactcatgccagacgaaaccggaggaagaagaagaggaggtctggcaagaactctagttgaagaaagattgttcttcctgactgttacagtctcatattcagataacacactgctctcactacttttccttgaaaatgtcccaacatcatcataccagttccaaccaggactgctcttgcgcaaaccatgatgcgtaatcgctcttccgcttggacttggacacgtcctcgactgccaaaacaactcatgagacattattacaattagcgacaacactctgaatttctgttctgaaaacacattgaccaacctgatgtgtgagcgcataaaccatagctctctccctcttaatagccccttcttgcttcatctgtaacttcgttttcacttcttttatacttctggggctaccacaccaacccttctgtaaaaacatcaaccagattcacatactttaaagtaatgttcaatagactttactcaatagattaatatatacctcggtctgcttaacaggatcttttagctcaagcgagtcagaaggcgctctacgatgagctcttacacgagactgaacacgaacaagagcttgcatacacctgagtgtaacggcagcttgtttcctaacttgtctgccacgaaaaatggcctgaattctcacgacagccttcagagctctaaacgcctgtcttgcctgaaaaaagaaaagacgcagacaacacaatgaacaagaagacccgtgagtactaatgatcaaaccacaactagaatagctcatgtaactagagattagtgaagattcacatacgaggaaagcacgaaaagcagcctggattcttgttgaagcccattctctcttaaccatcaaaaaatccctaggaggagctcgaatgagtgctgccatggccgtagtaaaagcctcgtcagccgagaaagacggtagctctgaacctaacgaagaagctgcatagcttcctcggctcttgaaagaagaagatgctaagctctccgatgaaatcctccacagcttccatttcttcttgctgctcttatcacttaacttctcctgctgcacaattaacagagagatcaatgtttggtaaagtaggaagaaacaacaaagatcgaggcattttagcttacctgatcatttacgggttttctgttagatatcagtgatctaatccaatttcctgacccacccatcttctcaaatcgagaccttggttttcgaattctacaaaaatcacaacttcggaagctattgattcaaaaattcgaagctttggagcttgaaatgtgggaaaagcaaaaagattgtttctgggaatttggttgtgttgattgagattgatgttgacaaaagttcgcaagtgttaaaaagaagaagcagagagagaacttttgaattttgaaattgttggggtacgaaagcaattttcttaaaataacggttaaactttaggttttctcttttatattatttgttccagaaattccctgagaacccctctacttttgtattctcaatttttaacccataagttattagactgggcaactcaatccattttagtgtcgggtttgcacaatacccgagtcggttcgatctactcgttaatctgttattattacattggatggttcacatttgtacacactatttcaagctcagaccaaactaaacaaactcgtctacatttgaagaactcaaaaacaagatcaaagaaggaagatcattaatggcggaaccaaaacaaagctctctttctggtaagacaaattctccgatttgatcaatttcacgaattttgcgcccttttttttaataaagtttcatcacttattaatttgtctaattcctcctagagattccccctgatttatcgaatttagggtttctatatgtaatcgaatcagggaccttttgggttatttaggtttatctaggagatggttaatttgggcgaaaagacaactcttttgttttaatctcattgatcgtttctgggttttggtttttgttgtttttttagaggtgaagacaaatgtgattggaagcagaaaagaagagaaggaatcgatgtttcatgggaaagagactcatggaagaagtgaagacattgatgagaagacaagggttgatgatgttaaaggacctggtgttctcgggcgtatgatggaagaaatggaagccattgttgacgctgttactcctaacaaaagttctgacaagtaaaatgattagtatcgtttctagttcctaagatccggtcacaaactatatacttctgttgtaagaactgtaaccaccccctttgcttaataaagacacgagcttttagattcttgacaacaccatatctatagatttcaatgaagagattaagaacacaaaatcaaaagaatgaatctctttttattagtctaggaaaattcctcaaaacctaaactctcaatgtattctacagctctctcaaaggctatgttacaaccaacatgtcctttatataagattctaatcctaaacctaataggattacatgatttagatatctcctaaatctcactaatcttatcttcacattaaaccatatctcggtttagccataattcggtttagtcttggtttagactttcttcttcttcaagtctttgagcttactccaacaatctctcctttaagctcaaagtcttctttctccatatctcttacaccgatgagatctcgcatctctttgaacttaatcctttcaagagctttggttagaatatcagccttctgttcttcaccgggaacatgtgtaacctctatttgatcattctagacgcattcccttataaagtggtaacgtctattgatatgtttacttctgccatgaaacactggattctttgtgagggctattgctgatttgttgtcaatgaatatggtgactttctcacttgagtttcctgtgatttcacttaacaagtcctgaagccaaatggcttgttttgccgcttctgttccagccataaactcagcttcacaggatgacattgccacagtatcatgtttctttgaccaccatgatattggactctcacctagatagaatacatttcctgttgtacttcttccatcatctggatcaacgttatgactactgtcactatatccatttaactttgctttatcacatctgttgtagagtaaaccaagtgaaattgttcctttcagatatcggagacagtgtttcattgctgcagcgtgtgattctcttggactctgcatatatctgctcaggactcctacactatatgacaaatctggtcttgtatgaagcagatatctaaggcagcctatattccttctgtaaactgttgcatctacttccttttcagtttcaacttttgatggcttgtagcttggatccattggtgtatggactaagttacagtctttcattccagtttcttccagaatcttgattgcataacgactttgattcaaagttatgcccttactgtgttgaatcacttctataccgagatagtatgatagtagaccaaggtcactcatctcaaatttggatgacatttctttcttgaatttgagaatgagttccaagcttgttcctgtgacgaataaatcatcaacgtatacagctactatcataacatggttgctaacctgttttcgatacacagatggctcctttgaacacttgttatatccaagttccatgagaatattattcagtttgttattccatgcccttggtgcttgtctcagtccatacaaggctttgttgagtctatacactttctcttctcttccctgtttctcgaatccctctagctgacagacataaactgtttctttgagttcaccatgcaaaaaggctgttttgacatctaagtgatgaatctcccatccgtgtgatgcagcaaggtcaataagaagtctgatagtttcaattcgtgctactggggcaaagacttcttcaaagtcaactccatattgttgtacataccctttggcaacaagtcgagctttatgtttgttaatacttccatctgaattccttttgagtttaaaaacccatttaaggcctattggtttggcgccaattggtagctcaactagttcccacgttttagcttttcgatggagtttatttcttcttcacatgcctgcacccacttcttatgtccccttgcttcatcatagtttcttggttcatcatttagagttagtaacaagaattctccttcttcttagccattagaacataatcttcaagatatttaggtttattgatctgtctttgtgttcttcttaacacaggacttggagagttagtgttctctgcagtattttctgcagtttcatgttcctcttcttcttttgcttcatattctgtttcattctctacctcatgctctatttcttctgtctcatcatgattctgcttattctgttctatgttagcatgttctgattgactgatttcttcataatcttgaagtccatgatttccaaagttatggaatgttatatcaaaacttccatccccatcctttcctgtgttactgtacttccaatcccaaccttttccttcatcaaagaccacatctctactgactactaccttttgtgtttgcggatcaaacagtcgatatgctttagatccaggttctgttcctaagtgaataagtatccttgatctgtcgtctagctttctcagttgctgtttgtctatctttgcatatgcaatgcacccaaagattctaatgtgttcaactgttggtctcctatctcgaaagcattcataaggagtcttgtccttgagtgaccttgttatgattctattgagaagataagtagtgtgtctgatagcttctccccatagatagttaggtagatgcatatgcttcaagatactcctagtcatttccatcatagtcctatttcttctttcaactactccattttgctgtggagtataaggagctgtaagatgccttgtaatacctgatttctcacagaatgagttaaattcatgtgacacaaattctcctcctctgtctgttctgaatgtttgcactctagtacttgattctttttcaaccagacttttgaaattgcagaatttctgaaatgcatctgctttttccttgagaagaattgtccacatataacgaaaaaaatcatcaataagtgcaaagatgtacttgtttccagctttagtactcggtgttattggtacacaaaggtctccatggatcaattcaagtttcttacttgctctgaaagtagcttctaatgggaacattttcctagtctgctttccaagtaagcatgaactgcagatttctttctcaactttgatatctggaactccttgtactaattctttgtcaatcatagattttagtgtagcaaagttagtatgacccattcttgcatgccacagatttgattcgcttatggtagataagtacaaacggcttcatctctcaatcccatcctgattttgtacaatcgattctttgatctcttagctttcacaagaagttttccatattgatcaagcattatcaagtgttgtcctttcattcttatatcacagcctgattctgtagcttgtccaagactgattatgttgctcttcaagtcaggtatgtaataaacatcattcatgatccttgacttcccatccatatctgtaaaagctattgtacttttccttttatatcaattcttgaatcatctccaaatcttacttttcctgtaattgactcattaagattgtcaaagtatctcttatcaccagtcatgtggttacttgctccattatcaaggtaccaacattcatctccttctatgtttgtttcaaacttgctaggcacacagttcttttcatttaagtacacaacctcgtgcatcatgagtgtgtctgcgttttgtgtatctttgttatcattcactgcattctcttgagcttcttgcagtttaagtagtctgtctgggcattgagaggcatagtgaccaagcttgtcacatcgaaaacacattatttgagaggtgtctcttcccccgtttcgtccacgacctcttcctctgtaatttcctctgccaccacgtcctctaccacgtgaatctccttgataatagtcattgtttgtatctgaatttgcatacatcatctttgtttgatcttcttgaggttcatcgtcatcacagacacgatcctcgtatactttcatacgtccaataatatcctcaaaagatgtgttattaagatcaagaacttgttctaaagaggcgataatatggatgtatttctttcttggtagactattaaggaacttcttaacaagttttggaacttcaatgttaactccaagggctgcagattttgtagatatttcagacaattttccagcaaaatcatctattttctctgtttctttcatcttaattttctcaaattctgccattagggtttgtaatctagcctctttaaccctttctgcacctacgtttctagtcttgattgagtcccatacttcttttgcggtttgcaggttcccaatctgaagtgttaaggcttcgggtatggattgaaagagtaaacccctagccatgagattcttatcgaaatcatcagaaccaggatctattgtttcccataccttatagattccaagggtgatctgcatgcgtattgcccaaaccgtgtagttgttcgagttcagcataggacatgtgatggatgagggtccattctctgttggtttcatcgtaaccaagtctcccatgtttgattcaaaaatgttttcttctcttgatttaagaaaccgctctgataccaaatatagatttcaatgaagagattaagaacacaaaatcaaaagaatgactctctttttattagtctaggaaaattcctcaaaacctaaactctcaatgtattctacaactctctcaaaggctatgttacaaccaacatgtcctttatataagattctaatcctaaacctaataggattacatgatttagatatctcctaaatctcactaatcttatcttcacattaaaccatatctcggtttagccataactcggtttagtcttggtttagactttcttcttcttcctcaagtctttgagcttactccaacaatatcatctttgagagaatggatacttagcaccagaatgaagagtatagattcctttggatatttgtaagggaatttgtgatctaaccaattttgagttttaccatcttcaagctaattctgaattccgttgcgcaaccaagtgaagaaggacaatgtaaaaggttagagattcataatggaaactgtatgtattcaaccaaataactaggtgaagggtaagtcctttcatttgtcttgaagctaatcagttcatctccatttggaagaaggatctagatactattagtgagcaatagactatccttaattatactaatcatgaaagatcagtttctgctggggtctagagagttaattcatttgttgtcctgattcttgaatcttagactcgactattcccagtgtatatgtaccaaaatgaaagttagtcatgatctcaacttacagaaacaacttgcaatgtaaaccaaaaaaaataacacatactacaattagttttactcaggcaactagagagttagtcaatatcgtgcacctataatcggagaacatgtaaaatgtcttggtcgttttgttttattatacaagaccattctgcgcaatttcaatttttttgtcgaaagagtacatttttggtattccttcgttttataagaatatatatcaattgaaataaaatataatgtgagtttttaataacggaatcggtgtttgtacaagtcagatttattgattctttgtatgttgtcatcatcttgacatcattactttttttacctaacggaatcggtgtttgtttgaccatttagatttattaattcttcgtatgttgtcatcatcttgacattattatttcagcgttattgaaggtaagacataatatcttatgatttttccttatcttcctttagtcgatcaaatgggaagaaaaaaagacacggcgaaagaaagaagaaatcacacacaaaagcaagcacaccctctaatattttaagtcaacgaatggtccaatcgttttaaactttggtgttggaaaggaaaagagaagagagtgacatatatagggactttaagattggcaaaatactaaaaaccaaacacatcatttttgtttcgtgtctcgtagttttgtcttaatgctcttgtcacgtcaatgtggtgtatttttttgctttgtgcatgtgtttttggatatttgaacattcccatcacaaacatccaaacaaagtcaacaattgtcaccattatcatatttactttaagagaaatttggtccattagctctttttttcttgcaaattctaatgattaagtgcaatgatattatttccaaccacttgactgtccaagcaaaaattagatcatctatcaaaagctcttaaagtattttctaacgattaggaaattcgagtttactatatattttacattactttagaatctcggatgtgcagcattttgaaagttcataaaattgtattttagttgtaatgactagtgagattggaattcatagtgtcaagaatcaacataatgttataattcgattttgatatacgtgatcattattatatgagtttatataatttgtctttcatatataaatcacttggatgaccactcacgtagtcatttgtaggtgtatttgagtataagtggtcgtacgtaatttactactgttatgtttttgttcgagagcaatagatttttatttgcgttttgatataattttcatactactagttacgggtacgcactatgctttgattcttaaagatatggagttaaaataatgatctgagtcatctgaccaaaatcaaacaaatggagtgttaaaaatagacttgttatacaagttaaaacatttaaattgtagttttatactttaatcgttgtgggaggaaagtgtacagtaatagcatacgactacgtacggtggtacaatcaccatttcgtggaaatgataaaatgaaaaattctaaataaatataaaattaaaatgaaacgtatataatagccactatatatcaatcaaaggaacagtagtttaataaatgaaatttaataactctttgaatcttcatcatcaatatgggtgtcgtccttttgttttgtcacattatgatcacagggcgacatacccatatgaaactgaaatgcatactataaacgtatacaattaaaaaatatatccaactcatgcatgttgaaacaaaaaatgctttaaatggataatagttatgggacgccactatgtaagtactctctcacgtttttatatatggcccgttcgattgcttaacgaccctaaattgtatttctgtggaaaagtcaaacaaatcaaaaaggccaatgctagatgtttaggtgtaataacaattctctctaattacattacaaggttttgtctgaactccgaatcatgtgcatctttatcttatcttataaaattctaaaaaatatatcggctataagaggacagtgttattacctcctatataattacactgttttccatgttaccatgtttaatcaatataacaacctttgttattttctcattttttattatgataattttggaattaatattgattgcataaacagaaaccaactactgtataaactaatgaagggatattatatatttatataaagggtcgaagagaattcgtaaaatagtggaaactggaaagtataggtcaatgttgtgcacgggaaaaggaagtacataataacactagtgatgggcgaaaaactcgataaaggttcatggaatcatggtggtgagatcccatgtgattatccttccaacctaagaataattaaccatatattcactttgacatatgaaaatactaaataaaatccattagctataatttataaaagtatacaaattacaacacaaaaaaagacgtttggatgaggattactgactgatgatatattgagcaatgcttgatttggcaattgttgcagtctttttactgttttcttcattcaatttgtccatacatttgccgcttggatatcacaccatgcaatgtcttgtctccatctaccatcatactttcatatcattccattttgaaaaatatataacttggggaccagagagtgtaatgctagtgcctataaacatgtgaccaataaacgaaacaaccatgtaaaaagattacgaaacggtgcggattggttcaatccacttccccgcgatctcgcttcgtaaaaagaaaaggagtttctgacacgtcatcatcatcatctcccaatgctaataaaaatggctaatataatattagtacatgattctaaaaataaaagctacacttttcttttcaatggtaatttttaagcttataatttttccaaatactacaaaattgcacctaataaatacaaagactaatggaaaataacaataataaagagatgtcggcattaattgaccgattttaaaataaaataaaggtttatttttaacttacacaaaattgagtggaacaagtgtttttatttgtttgtttgaccaatcaaagagtgatccaattaattgaacgggaaaaacaagaccagttcatttacattataataatataattattgatttttccttaaaaatatttgtattcaaactcatagaatcagtccatttaatcacacgatttatcatttatctgcaaattgtagtattattttttcacctacattacaatttggtgtttttcttttgcaaaagcagaggtgactttatttttggtgatttattagtgagagtgtttctacaaaatactaataaagtaaaaaatattacttaaaatagtactagtttaatttgaagttaattagagagatcagagagaagaagacggagaagaagcatcaccgaaagatccttggcactgctgaagatttctcagtcttaagcaataagcaaaaactaaaagagaaaaatcagaaagacaaaccaaatctgtgtctttctcttaaaccctgtgtttgcttactacgtctccggataaaaaagtcaaataatctgagaaactttcttcatttttgttgcgtcttgatctgccattgtcatcatcgaagttctcagctcataatcagcttcttcctgaaatgagtctatgttcctgaaaccatcgggcggattttgtctctctctctttctccacggtaatttcctatccagatttggctgttttccatctcttgagagtcaaagttgttgttacttggtttgaagatcttggactatcttttgctgctggttactgcgttttccttcttttgttttcttcacattttgctcgcaatattcattggatcaatcggaattcgtggcaaatgcgtttgaatttaaagtttcattttttatttttcctttcggagtttcttgctagatttagtcatacagactcgatattactgacttgtatacactttcgaattttctctttcaaaagtagttcataaagatctaatctttatgttaaggaaaaatctaactgtgttttggtttttatcttccttctgtacagaccaacaacatttatgagacattgagcacatttgagaatcttaatgaagaagaagagttcttgataaagattctatatttgttcttgagtttaagttctcgagggaatggcaagaggtagaataaggtcaaagctgagacttagccatatatacacatttggatgtcttaggccaagtgcagatgaaggtcaagatcctcacccaatccaaggtccaggatttagcaggactgtgtactgtaaccagcctcatatgcacaagaagaagcctttgaaataccgttctaactatgtttctaccactaggtacaatttgatcaccttctttccaaagtgcctctacgaacagtttcaccgtgctgccaatttctacttcttggtagctgccattctttccgtgttccctctttccccgttcaacaaatggagtatgattgctccactggtgtttgttgttgggctcagtatgttaaaggaggctcttgaagattggagtaggtttatgcaagatgtgaagatcaatgcgagtaaagtttatgttcataaaagcgatggcgagtttcgtcgcagaaagtggaaaaagattagtgttggagatattgtaaaagtggagaaagacggctttttccctgctgatttgctcttgttgtcgtccagttatgaggatgggatttgttatgtagagactatgaatttagatggcgagacaaacttgaaagtgaaaaggtccttggaagtaacattatcgttggatgactacgactctttcaaggatttcacggggataataagatgcgaagatccaaaccccagcctttacacatttgttggcaatcttgagtatgagcgccagatatttccactggatccaagtcagattctgctgagagattcaaagcttaggaatacaccttatgtttatggagtggtggtattcacagggcatgatactaaggtgatgcagaactcaacaaaatcgccttcaaaaaggagcagaatcgaaaagacgatggactatataatctacacgcttcttgtcctacttattttgatctcttgcataagttcatcgggatttgcttgggagacaaagtttcacatgccgaaatggtggtacttaagacctgaggagcctgagaacttaaccaatccaagtaatcctgtttatgctggatttgtccatctgatcactgctctgctgctgtacggatatttgataccgatctctctttatgtctccattgaggttgtgaaagtgttgcaagcatctttcatcaataaagatctacacatgtatgatagtgagagtggggttccagcccacgcacgcacatcgaatctaaacgaagagctaggacaagtggatactatcctttctgataaaacgggaactttgacttgtaatcagatggattttctgaaatgttcaattgctggcacttcttatggtgtacgttcaagcgaagtcgaagttgctgctgcacagcaaatggctgttgatcttgatgagcatggagaagtatccagtaggacaagtactccaagggctcaggctcgagatattgaggtagaaagtagcattactccaagaattcctataaaggggtttggtttcgaggatattaggctaatggatgggaattggttgagagagccacatacagatgacattttgctgttctttcgcatattagctatatgtcacacagctattcccgagcttaacgaggagactggcaagtacacttatgaagcagagtcaccagatgaagcttcttttcttactgctgctagtgagtttggttttgtgttcttcaagagaacccaatcaagcgtttatgttcatgaaaggctatctcattcagggcaaactattgaaaggtgagacttcttagagatctattcttgattctttgattattggttttaagtacacatcctgaatgtgtaccagaaacaatacagggagtataaagttctgaatttgttggacttcactagcaaacgaaagcgaatgtcagtagttgtacgtgacgaggaagggcagattcttctgctatgcaaaggagctgacaggttagaagaaaagctaggaagatataatccatttgattttcaaccttcatgtaagtttgaagcagttcttgttaatttttttttttttgcagtatcatttttgagcgactggctaaaaatgggaaagtatacttgggacctaccactaagcatttaaatgaatatggagaagcaggactccgtactcttgcactttcatacagaaagcttgacgaggaagaatattcagcttggaacgctgagtttcacaaggccaaaacttctataggttcggatagagatgagttgcttgagaggatatcggatatgatcgaaaaagaccttattcttgtaggtgcaactgctgtggaggacaaactccagaaaggggtatatatatcagacaagtcaccttagtttccatctcctccatcttggttttgtgaaattgagatttcttttttatttgacttaggtgccccaatgcattgataaacttgcccaagctggcctcaaattatgggttttaactggggataagatggaaacagcaatcaacatcgggttagaacgactacaataccttgaagcagatttatcttgaaagttctttgaccaacttagcttttttttttgaactgcagatactcgtgtagtttacttcggcaaggcatgaaacagatatgcataactgtggtgaactcagaaggagcatctcaagatgcaaaagtaatataaagctaaaatcatttccctttcttaatcacaaggacctacattgtgaagtttcaaattgatatatctgttgatgtaatcaggctgtgaaggacaatattttgaatcaaatcacaaaagctgtgcaaatggtgaagctggagaaagatccacacgcggcatttgctttgatcattgacgggaaaaccctaacgtatgcattggaggatgagatgaagtatcagtttcttgctttggcggtcgattgtgcctcagtcatttgctgtcgtgtgtctccaaagcagaaagctttggtatttcccctcttcccttatgcccatgtatatgaacacgttggcatcatgagcatccttttatttattttgtttcaaaaatgttcccaaaccaggtaacgaggttagttaaagagggaaccgggaaaatcacattggcaataggtgatggtgcgaatgatgttggaatgattcaagaagctgacattggtgttggaattagtggggttgaaggaatgcaggttagtatggtctctctagaatctatttttagtgttcccaacttgtagcaaatgtacaatgattaatcctatcctggcatttcttttgctgattattatgcttttgcaggctgtaatggcaagtgatttttctatcgcccagttccggtttcttgaaagattgctcgtcgttcatggacactggtgctacaaaagaatagctcaaatggtatatgtgtttacaagatgccttctaattctaatgcatcctattttacacttttcacgtttctggtttctaagatatattgttttgcatccagatctgctatttcttttacaagaacatagcatttggtctcactctcttctattttgaggctttcaccgggttttctgggcaatcagtatataatgactactacctattactcttcaacgtcgtccttacttcattgccagtgattgcccttggagtctttgaacaagatgtttcctctgagatctgtttacaggtaaggtttactaagctgctgtgagtttctcacacgcaacaaactaactcgttctttgttctgcagtttccagcgttgtaccaacaagggaagaaaaatctcttctttgactggtatagaatacttgggtggatgggaaatggtgtgtactcctcccttgtaatattcttcctcaacattggaatcatttatgagcaagctttcagagtcagtggccaaactgctgacatggatgctgttggtactaccatgtttacctgcattatttgggctgtgaatgtgcaaatcgcattgacggtgagtcacttcacttggatccaacacgtcttgatctggggaagcattggtttatggtatctgtttgttgcgctctacgggatgatgcctccaagtctttcaggcaacatctatagaattctagtagagatacttgctcctgcacccatttattggatagccacatttttggtcacagtgactacagttctcccttactttgcccacatatcattccaaaggttcttacatccgttggatcatcacatcattcaagagataaaatactacaagagagatgtggaggatagaagaatgtggacacgagagcgtacaaaagcacgggagaagactaagattggattcacagctagagttgacgcgaaaatcagacacctacgatcaaagctcaataagaaacagtcaaatatgtcacaattttcaactcaagatacaatgtccccaagatcagtatagcttcctcaggatatctctcttaaaggttaattatataacctgtagaaacagtgtcaggttcatggatggaggtaggctgtggattttgatttcagattgtggagacagctcttgatgctgttgtgtgtgtatgagaacatacatggaagaaagtaaaaaatagtgtgagcttgtgaaagtagctgactgacgtttggggttgtctttgttgtatcagaaacagaactatacatagatttttttgtgtgtatacttaggacagattgcaacaccaaaaataatgtatcctccgtttttacctctgttgaaaacatatattctcattgttcttgattgctactagagtgatgcagaaaatgtttgatacaaagaaaacatatgaaaagattgatctttttggattttatatattgtgattcatacaacaacttgtagaagaaatccaacaagaaagaaacttgcaaactagaaatgcaaaagcttgatgatggaaacagaggaatcactttttggatcgaccggagtttggttttttagaagatactagtccagtgttgcgaccctcgagtaacttcatggtctcaccgatccctaccctgtcttcaccagacaacattttctttagcttctcctctgtgtaatcacccttcttcgtcaatcgaccctagagaaaacaacaagttacccatcattaaattcatcgctcttaaaaagagacatttcatcgaacaggtggtgaactgtttcaaaattatttactccggttacggatcttagaaatcagaagatagattatatgttacctgggcaattctgatgtacttggagactaataaatcggattccgagcgaataatcttgggaatacccagaaatgctcctacaccggaagatggagacaccggtggtggctctggaaacgccgaagatgaggctgagaactgtttctgttggaacttcctcgcagcagcagtcgccgttctcaacacctttcccgctttgatcgccatcgacaagcacgactatgcactctctttctctccttcgttatttctactttgcagatctccgttatgagcaaattcttaagtgaaaccaccctaccactattttattcggttatccatttaaccccgtaactttaatctgtatcaattcttacccaaactataaattctgaatttcataaataataacgcagagaatagaaaagatgatttttggtttgtctattaagatatataatgattatgtaatgaaaattctaactgatttatatgaatttcttggtaatggcaaaactcaaggatcagcaaatactaaagtataattatcgaaagacaagtcaaaatgtaagggccttaagggattaagatgattttaatttgcgtgacgctcaagagctacaaacggcgtcgttcttctaattttagattttccacaacttcaaaatctgatttataaaaaagcatattacaatacaaaaaaggtattaatacgatcctttccatccacaccagaaattttatgttttggctaaattactcagctacacctatttttatgataaatgaaagaaagttagtgtcattttttgtccaaacagttcctgagttcgtaacgtatcactaaaaacataggaagaagagaatgcaagctaatagcctattactattagtaatatataccaaaaacaaagagcgtctctgatgatgaaactccaaagattctgtgctgcttcttttgttccatcaacctcaattcaagtacataatctttccctgactacctgcaatacaacaaatctgaaacaaatcagacacaccaaaaaatcccaaagatttagagacggagaaatagtgtcaaggttagtttttataaatttatttacattcttcgtgcatctctctcgctatcactagcatctcatcagcctcttctgccagtttcatcagtctctctatctcttctgcagctcctttcgacacatctaatttgttctctacttctacgagcttataagctgctgttattgaagcttcaacaatctgctgtgaaatagagggtccctgactgtttgtctgctgccgggatttcgtgttgctctcttttggtctcgctacatgtggtgttctttgtaccaagctattatcattcatcttatagaagttctgtgtctgttgtgtatattgttgcattgttgaaggaacaaaacattaaaaaaaaaaaaagcaggaatgaggaaacaacacagaccacaagaaaggttgcacacttgttcaagcaaggctttcaagacttactgattttaagtggctaaccttttcaagctttccctgagctgcaagcctcctcaatcttgaactaagcatcctcctgaaatttggtggcacttcttgtcgttgctgctatacacataccagactattatcatgaacttgatcatgacaggttagctgctaagacaataagaacggatactgaacctaatagagctatgttatctcttaaagataatcatagtggacttctatgcaataactacgatcaatctataacagcaaagaatagttgaatagtataaaactttacattgggagctctaactgatatgaatagagattactcaagtataaaaatagagattactcaagcaatttcaatcttttgataagcaaaagtatctaaaaccaaaggttcattctcatctttaaatggtacaatgattaggtagtttgttcagaatcaaaggtgtttatcaggctcatttagttcgactatgcgttcaacattactgaataagcagcttgcggagtggataagtatttcagtgatgaccaatgtcaggataaagagcactgaaaaatatgtctaacctcaatgaagttgaaaattgcgctgacatcagatccattagcatccgtcaagtttgaaagagcttcaaatatcattccatcataccttaataaaataatggcacatcagaagcgtaacagttgcaagcagactaggaagaaatttacaacaattatgaaccgacacaggattaagtagtggctcggaggagaagaagataaaaaaaaaaaaaaacctgggagcattctttggatcaactacaatgttaaaactatcatcaatgctcaaatcagaagatccacttcggggaagagtagcaactggagaagagtgaccactatgagtaggagttacaatagcggcagcagcagcggcagccagatgaaaagcagcagctttgatttttggtgtccgtatcttatccttagagccttgaataccaggagcaacacttaaattacgccatttatcctagacaatatgatacatcggatgattaagaatcttgttttgtaggtaaccaataatggagacagtgctaattttcaaacccaaaaggtgaaataaacgacgatactaatatttcttcagggaactaatacctatcaatacagccactaaagttaaagtctatgagaaagatcatagaacacagaagtagtcaattttcgaaaagtagaagtaacacatcatatacttcaactccaaacccagctaattaaaatcaccattggggggaaaaaacgaacaaaacgacttactcaattcgtatccgtagcatactcttaaaaatgttctcaaaccaaagcatggaaagaagattatcccaatcataaaaatttcaaatgtctgcaactcaaatacaaaaaatcgaacccaaagattcttgaactaaatccgacgtactcaattaacaaattttccattcccgttgtgccttgaacttgataattagggtttccaatgtttcaacaacagcaataaaaagaggtaattaaaaagaagataaataaaaaccttgaggtcgatgttagagcgactagagagctgctcagctaattcaggatcgcggagaatattcttccactttccagggccatgcttcctaactccggcgagtaacgcctcctcttcctccgccgtccatttgagcttctgatttcccatctctacgcttctattatcgactcttctctccgttcctttacctagcttcgtcgtttttgaatatgtcaatcggtgacaaagaacgtctcgccgccgattcgtcggccgggcttgtcccccaaaaactattgcttctattttttaattcaaagcttcttcccaaatccaaacaaaatctttttctttttcttttatatgtaatgagattaatctacaaagaggttgttatggtaggatttacaatttaagtaccatattatgtaaaacgtcaaacattatagggtctaaaatgaaaaaacgtaaagtcgggaaagaacttgggttaaattattcaaaataaaacataaggggtcaaattcgaattagtcacaaaatcttacataccctaaaacatttcgcctttcttattctgtaccacatcataagctggaggttctctgactccgtcgtctctttctccgtcgccaccgttcctaaaacgtctcccgtcttcttctaatggcgatcaatcgtagctccgatcatgaatccgacgaaaacacccgtctttaccatccttaccagaactaccaggtcccgatcaaatctcagtatctatacaagcttccgacttctccggaatttctattcacggaagagtctctcaagcagcgtcgatcatggggagaaaatctcactttctacacagggacgggttatctagccggctctgtagccggtgcttcagctgggatcttctctggtatcaagagtttcgaaaatggagacacgacgaagctgaaaatcaacaggattttgaattcgtctggtcaggcaggtcgtacttggggtaatagggttgggattgttgggttgatctacgcagggattgagagtggtgtggtggcggtaactgataaggacgatgtttggaccagtgttgtcgctggtctgggaactggagcggtctttagggcagcacgaggagtgagatctgcggctgtggctggtgcttttggcggaattgcggctggtgcagttgtggcggggaagcaggttttcaagcggtatgctcacatatgaagaaccggagtgatctttagagcccacctatatgggaaaatcataaaaatcaaagctttttcgggtttctagggtagaattctggtttacattttagcgtatgttaacctgcgaacctttctttatagatataataataacaataataaaggttttaccttttgatattcgaatctccatgagttattgcttatgatcatgctagcttttgttatatgttgtgcttatttttcacttgtccagaaagcgtgtatgttggtgttgatatcaaaatgactcagaggtgaaatggctttcaatctatcttttatcattttgtaaagagaaatagtttagactgtatgattatgtgattatgtaaagagaaatgactatgtgtctgctatgtatgttgagggctcatttgttaatagttggccatctaatctctactttcttttctaagatttttttaatgcttcttggcttttctagctgttttcttttcttgtttgtgattattcagtgatccggaacgtggtagtatcacacttgatccctagttgtaatcagttttttacctctctggagtttctcttgaagctttttgtctctcatcgtcatctctggaatttctccaggtaacgacttaaacaaaaaattccatgatgtaatgtggatctgttgtgaacttctgcttttgtctcttaagtctcgagtctaagtgttcagcctaagcgcgtatagtcccaaattgacaaagtgccctgtcagctaacattgctggtgcagctccgacaggtattcccttaattctggttttaagaagaactttttttttgtgtgcgactgtttgcatcttctttgcagctaatgctgtcaaaccattttttattcaaagaagactatactctcaaatttcggtttgtagtttcgtagaaaagttttttatgtgctacagatggcattctctatagcaaaagtgactagatgagttgattttgcaagaaggatacaaatcttctataataaatgtgtttcttttcatgagaccaaaaataaagtgtttgataaacaagataggaactccgatacaatggaagttcaacattcaactttggggtggagtacaattcatgagagactgacaacaacttcctttgcattggcttgtttgtgatcatgtaaatcaccttcttgtggtgggtatgggatggcatcggatgcttaaactgaacaagtttatcgcggatctcagagatagccaatgtcgcttcactttgatttacgtcgaagttccaatctttctgtcaataggattttcccaagcatcatcctctgtctacatgattgaaagagaggactcaggaatcaatgaactttattaattttattccttttccaggtgaagattagaaatgtgttattgcagtatctaagaaaccaacctgacaggaagatattggggaaagaggaaccaaattgtgagcacgtgacacatgaaatgttctatcagagttatgtacttcatgatcctctgttgcaaactctcttagcttgctcagtgcaggcaacagaacggaagcaagatcaggtctgtcctttttccgcagctcgcagcactgcaaagccaattgagctagcaccattgtctcttcttcaggccagtctgatatttttggatccaaaacttctcggagtttcttcttctcaattgctttctctactctatggcttaaacccattgctggcatcgctgtgatgatttgcagaagcaccacaccaaatgagtacaagtcagacttcaccccaagcattcccgtttgctggtactcggggtcgatgtaacaaaatgtacctgtctcagcaattggatccatgataggacgttaaaaggagatggaaagttagatttgttgtttaaggtaaaatgaaagtatcattaccggctgcagcagtcatgtgatagttggagaagctatcagcaacagctgcaggtaccaaccgagctaaaccaacgtcactgattttgctagtgaaatgtctgtctatcagaatgtttgctggcttcagatctcgatgtactagcggctcgggtttggcctgatgaaggaaaagaagtcctgtagcaatctcagcagcgattctgaaccgtgctctccaagatagtggtggagtattatctttgcaaaagagacgatcttctaatgttccattttccatgtactcatacaccaggcagccatattcgggacaagcaccgaggaggatcaccatgttagggtgcctcatgcaacttagaacctcgatctagtgaggagacacatatgttaattagtatggagaggacatgcaatacattaggataatgtcggattatattattacctcttggttaaactgcttcaggccttgtgagacatctgacttcaagagtttgatggcaacagaagtgttttcaagaacggctttatacacaggtccataccctccttccccaatctttagagcatctgaaaaaccgtcggtagcaccttcaacatctctgatgctatatcgtctgtaggaaatactatcggccatattctgttccttgaacctggcttgcatctccacaagtcgtctcttctgggtctctatttccgctagacgttgtgccacttcagttgcttggatcgcagtctgtgttttttgcttgtccatctcagacaatgccctaagcatctctcttgctgcctttgcttcctccagcctttcagtttcggcggtagctctaggtcctagaagatgaggggcctacaagcattcattcaatgtctgatattagtcactcatctttgggacctgttcaaggaaacattctcggttgtgctcatggaagtaagtatcttacactttctctggacatggaagcattaaactgctgcaattcgaatctcaatcttctcacttctgcttcaagattttgattctgatcatagtcatgcacaaagaacacaaacatctcagaatcatgcatctgacactcagcataaccgaaacactatatctacttttctgaaacattaattttacctggtgttcagtgatattgcccccagataagctttcctctccatcagttatctcagactacagattcgaaaaaaaaatgtcaacgccaggcaaataggtggtaagaatatcgatttgaaacgtgatgggaatactaaccatggaagagtgtgagcttcctccatatgtggatcgtcctaggatgctgtagaagctagcatttgattcagcactgtgatcgctgggaaattcattactaagctctgacatagaactcctatacaaagatggcttgtaatgaggtgtaggtggagataattctccgttcaatgcaggagatgacctgcaagattggcaaacccaatgactactatgaagcaaaaaaggcattcattcacaagacaaccggataaaatttgagttcattaattaccttccggattcactggaagtggaacttgttgggccaggatcagacatcattgagggatgttttgaaggatgaggagggtgttgaggagcttgaggtgtctgaggaccttgaggcgtgtgaggaccttgaggtgtctgaggccgactcgctgatctgcttgttaagagcttccctttagacacaatgaagacagcacatgtatctggtgttgttttaagcagagtcgttggcacatctacgctcttaaacttcctgattaagaccataaatcacagagagttataggatttagcattcagattaagattacagtttaggttatatgagagaaagaaagagacttgaggaaagaatttcgagcagaggctccaatgactatatttgaaatggaattgttggtgatgtagtcaacaattgcactcgagatgtcaatatcgtgaagaagaacctccgttgctataatctgagagaaaatatataattaatgaggtcggtgagagctatgtgtatatatatatatatatgtgattgttgtaaggagaaagagaggttgatatctgacccctttccgagcacagaatcctctaaagggaaggaagaactgatgcgcctcttcttggttgtcatgtggtgcttctgtgttttctcctgccccaaatcctgtttcaagagttttcattagattgatggattgataacaatgatgatgatgatgatgatgccattacgtactcagtttggtttgaacatggagaaggatacagtttggagaatcgatgatgatattctcaacagcccatttcaaagcgtgttggctgttcttatctttatcaatggctatggcggtaactgctttgctgtcttttcctttgagtcttcttgcagccattgtttctcagccctcgagatgattgctggaaacttttgcttctggagaaactagaaagacattgtggtacggtctttcaattaccctcagaaggaggaaataaggagaccgaatgataatgaaaatgataacaaggaattaagaagagaagaggagaggagagctgttttgtttgttgagaaaatttaaacttataatggttttggcactttgctaaaattagaaggtttttcttttctccaacaatctaaacagtcataacgaacagagaggcagacaaaaagaggatttttttaattttagttgacgacttatctttaaaggatattccatatcatatcttgtagacaaaaagaggattttttatttttagatttgtgtaatggcatcttatattgatatatatgtaaactagataaatttggaattataggcagtcttgatcttttagaagaaagaagaagaccatgaggaaatccaaaggttgaaattagttttataattgtttcgacgaacgtgttaaatatcttggggtaacctgtttggttttgaaagggcaaaagggtttgagtttgaaggactttgtcttttgtgtgtgattcatgtcgctgatgaggaggacctttgatatttcaaagaaaccatatggagtatataatatatagctaataatgattttcgtataacaaacagccgtgtacaagcgagtgtggaatttaataatagttgtggacgctacaatggaagtggaatagaggatcatgggcgagttcttgctacgtccattatcctgaatgatgatgcggttcccacaacacaagtccttattactacaagtcatcatgataatgtagcaaagaggaaggaggtggagtgtctatgagctagagtgtatacctctttggggcactgtgtcaatctgcggtgaaatggaggatgctgttagagctttatctcatttttcaaactacctatcagaatgcttatgtgtgatcatgaagggataataagtccaacgctcacatgtctcactagtcacttcttcggaatttatgatggccacagaagaagcagacctgtttctggttctgtttcttctgatgataggatggttcttcaggctgtttcccctgagaccgtcggatcaactgctgttgttgctttggtttgctcatcacatatcatagtttccaactgtggtggttcaagagtggttttactccgcggcaaagaatccatgcctttatcagttgatcagaaagtataaaagctgagacagagctaatgaagtttcttaccttaatgtaaacaagtggacgctagagcccatataagtgacgctgactgggccttaatgtaggcccatttcaaactttggtctccgagaaaagtctttcgttgtctattttttaaccacgttatgataacactacatgtgtcatgagatgcatgaacatatgtcatgaacatactttcaatcttggatcaaaaaactaaattagaagaataaacagaagacttgacctttaagagggaaggacacgcgtcatctatgttgccattattgaatagattaataaattagttttataattgattggagcaacgtgttaataatgaaggtcgttgtcacataaagaaacttgggattccgtggagtgcttataatttttctaattttattttttgggtaaaaacctcattagatccaggagaacccatgtttcgtttcgttttggaaagataagagagataaaggtttcgacttttttaggtttttctgtgtgttttgtgattcatttcgctgattgatatcaattctctctgtttgttgtcccttctcttcaatttcacctgacttttgtttttgttttggataaagttttcacctttgtgtcttctctctgctctcttgtgtgatctatctgaaaaaggctgattttttttttgtgggtttctaaattagggtttgtgtgagtttattgtctttctgattcgatgaagatcaagagttatagaggatcgttagagtgatcaaaatcccacgaattcacaaaggatccgtcttcatagatccgtcagatctgttcagcggaggtacatacttcttcgtcattcactgctttctggattagttggtgagaataaacggctggtgggtctcggtgggaagctgaattggatgtagagttcatcagactatagcttagagaagaaaatgaagttttttgaatcgttttgctccagttgaggtttggaagctgcataccagctcatggaagagatttcacctgcagttgcacttactttgggtttagctaatacgatgtgtgactctggaatctcatctactttcgatatctccgagctggagaatgttactgatgcagctgacatgttgtgtaatcagaaaagacaaagatatagtaatggagtggtggattgtattatgggaagtgtttcagaagagaagactttatctgaagtgagaagtttgtcttctgattttagtgtaactgtccaggaatcagaagaagatgagccattagtatctgatgcgactattattagcgaaggtttaatagttgtggacgctaggtctgagataagtttgccagatacagttgaaactgataacgggcgagttcttgctacggccattatcctaaacgagacaaccatagaacaggttcccactgcagaagtccttattgcgagtctgaatcacgatgtgaatatggaggtggcaacttctgaggtagtcattaggttacctgaagaaaatcctaatgtagcaagaggaagcaggagtgtttatgaactagagtgtatacctctttggggcacgatttcaatttgcggtggaagatctgaaatggaggatgctgttagagctttacctcattttctcaaaatacccatcaaaatgcttatgggggatcatgaagggatgagtccaagtctcccatatctcactagtcacttctttggtgtatatgatggccacggaggcgctcaggtatgctgtagttcgtaaatccttatactgattttagcagtagaaagttaattcaactatgaacccggaagatacatgagtttatgttttgttgacgtaggttgtatgtatatatgataaagggtttgctggaaacgggattctttgcaggttgttatgtaatatatgacggctttggtggaaatcggattcttgcaggttgctgactattgccatgatagaatccactctgctttggctgaagaaatcgaacggattaaagaggaattgtgtaggaggaacactggcgagggtaggcaggtccagtgggagaaagtctttgtagattgttacctaaaagtcgatgatgaggttaaagggaaaatcaacagacctgttgttggttcttctgataggatggttcttgaagctgtttcccctgaaaccgttggatcgactgctgtggttgctttggtttgttcatcgcatataatagtctcaaactgtggtgactcaagagcagttttactccgaggcaaagactccatgcctttatcagttgatcacaaagtaaaaaatcttctctttccctctaaaataatttaacacaatctgagaaagtttcttatttctaattcatgaaatttcttaccctttctctgcagccagatagagaggatgagtatgcacgaatagagaaagctggaggaaaagttatacaatggcaaggcgctcgtgtttctggcgttcttgccatgtccaggtccatcggtaggtcaaacttgcacttatgtcttccatcttgcctagtgacagaaatatgaagagagttttataggtcaaaattatcgataaattaaacattcagtaaccttatttagagatgaggatcattactacctgttacagtctctgcaaaatcatgagatctcctgaaagtgggtttcaatctgcatcgttttcaggtgatcaatatctggagccatttgtaataccagatcccgaagtgacgtttatgccacgagctagagaagacgagtgtctaatattggccagtgatggactttgggacgtaatgagtaaccaagaagcttgcgattttgcgaggaggcggatcttggcttggcacaagaagaatggagcattgcctttagctgagagaggtgtaggagaagaccaagcgtgtcaagctgcggctgaatatctctccaaactcgctattcaaatgggaagcaaagacaatatctcaatcatagtgatcgacttgaaagctcaaagaaagttcaagaccagatcttgaaacagtgtatgctcgagctcttacactattataattttattatttcttatttattgaaaaaatttccacaagtttacataaaaataagaagtgaaatgttggggggaagaagaattaagaccttgatgcatagctgaagtccattcctttttctcatggacttgaatgtgtatgtttgttatgtataagaagaatagagaagaaatgtttttactttggagtcttgtaggtggatatgttgttgtaatattggagatgtggcttaaggaattgtaactgaaatttatgtcacattcaccttaatacttttctgtaatctattatatataaatacttgttgtgaaagagttattattgtcttttctattgttattgttatacaacaggtaatattgattccaaagtgtttaatgagggatgctgtatcaaacatgaaaactaagtgaagggtttggagaaggatggttgtttaaagctatttcccctgctttttttactaagagagtagagtttaacaattaaaagaaacctaaataagagatcataattggtacgttaaggtttcataattcattagaattaacaaaaataatgagttggatagttgaagaatcaacagaaacccaagtgatgaatggatcaaagagagtcacataaaggagatcataactgatgttttagtgtggtgtattgtctcaaacaatgtgctgagccaaagaaaggatcttgagctgtttcctgaggcgcatctcgtgcgggacaggaccaaacactcgggtaccagtcggttggttgtactccattttcctcttggaaccatgtgaattattctgccctttcttttccttaatgccaacaactacaatggcattgtcatcaaacttgacttggcttccatcagcacgtcctttaggcatcgcagcacgcacaaccacaccgtacacgaccatccctttcttcactttaccttttgggatagcgtctttctttacttttttttgaacaattgggttagcttctttcactgaaccaacaatgatatcgccaagtcttgctcctttcttacctctcagggattgaatgcacatcacctctttagcacacgagttatccacgcatttgagaatcgtccccatttgaatgaatgtcctatgttgttgctgtgaattggaaatcatcaggacacacaattcacaggttataccccacgaatgcatatgaagaaagtttcatcaaggacgtatatttgcgaaaagaggcttgacctgagagaggatgcttccattcatcattccattggaggaggaattcatcaaaccagagaaagcattgcaaagacctccaagcaatgaacgtcctactcatattgtcgatgaatcatataacgacatcaccaacaattagtgacattcacaacaagaacaaaaaagttttaatcttgagtctgcatttcatgaaccaaagcaaagtccatgacatatcacaaacccaaaaactcaaagctcatttcgaaacttatactaaatcaatgttgcaaaaaatctaatttttaaagaaccaaactttatcgaatataataatattaagagatgaaaatgtacctttggagagcttggaagctaaagctgtcgccatttctgcaattcaaaagtttcgatctttagtgtcgcagagagtgaatgaatcttgcgattgcacaaagacaccagatttagggtttaacgtcacacactcgctgtcgcagcgatcatttgggcttgtaatgattttactcatggattaaattatatagtaaaaaagtggtgacgttgtcaaaagtaggcgtgccggagtggttatcgggcatgactagaaatcatgtgggctttgcccgcgcaggttcgaatcctgccgcctacgtttttccttttttttcgtatttaccttattttcctacattttaaaaccaggggccataacattttttccacatgtactataacatttgtttatcacaaaatctgaaattcttaattaacaaaaataaacaatggtgatgccctaataacaaacatttctttcttctttttttttgctacgaactttttacttttgttgattgttcatgcatttacaaagacaaaatccaaagtttcttaatgttatgaaaaattcctaaatcaagaagttaaacggctgagaagaggttgatcaagtggaacaattcaccgatgccgtccattttgaagctagcactgggacccactagtaatctgtatcagacaagagacaaaataaaaccccccaaatggcttctccaagcggagctccaacgaaacgcctttttttttgaaactctccaccgcgataagagagagagattaccaaattctcaccggagaagaaaaaagggctttcctttcctgagatttccggtgaaaagtcattgactttatcactctcaagtctctccacaagttgattgattctgctctaatctcctcatctggggtctttcccctcttgctattcaaatggtaaattcaaatatatctctataccattttatgtttctaagagatatctcggtctctttgctcaactgtttatttgaaaactgaaaaccttgcttgtttgtttcgttaatgttgttgttgcgtttgcttgctttacccctttttgtttcctgtatggagacgctaattcttgatctatggttgtttttacttctgaaaggttttggtttgactatgtctagctcagttctagaagcttgctctttgcctgaattaaaatctcgtttatataattttgcctaaagctgtaaaatagatgttatgtgccccttgaacctgtaaactcttttagaggcaatgtatgtttttgatgttgttaaatgaaatgcaatggttgcaggctgctccagtcataattgtgggttcacatgtgtgggttgaagatccacatttggcatggatagatggagaagttactcgaatagatggtataaacgttcatgtcaaaaccaagaaggggaaaaccgtaagtttctataaggttacatctttattattttacttcaatcaatgagcttgtacgtggcctcgacctttgggtttaggctaaaaaagagtaggaataagtccgttgataaatttagatgtcgattaatgttacgttttatcttggaatgggatactgtcatagtcccgttatatccctagatcggcaggtttttaccttctgcattcaaggtagatgtaggttattgtgcttttagtgttttgatcaaaccaagtaacataataaatagagaaaaataccttcaaagaacgtttttggtatttactgaatgtcttaaggcaagtttatactcagaaatatggagtgcataaaatgaagctttcaggctttctagtcggcagttatcttgatatgttgtgagagctaattttattgaaaccgttacacgtgatagggaaacagcttaatgtgataagatgcagcatgagacgtaaaaacatgatttacgttgtcattttatatgttgttgcacatgatatattttcatgataagttctttgctgtcaagtatagatgttcacacttccttgttggccatggttctcctcacatatccccatgttgtatggatttcaggttgtgacaaacgtatattttcccaaggatactgaagctccatctggaggtgtagatgacatgacaaaactttcatacttgcatgagcctggagtcttacgaaaccttgagacaagatatgaacttaatgaaatatacgtaagatattttatcctttttttctaacatctcttactttttgttgctgcaaaggaaatcatttggtataagctatgatactaataagttttgtgttacttctgtagacatatacagggaatatcctaattgcagttaatccattccaaaggctgcctcatatttatgaaactgatatgatggaacaatataagggaattgcacttggagaactaagtcctcatgtttttgcaattggggatgctgcatacaggtttgtgcatgttcacgtccatcaatttatcgtacttctatctatttcgtgagataatttactgatttggtcacggtgtaagttattagggcaatgattaatgaagggaaaaacaattcgattttggtaagtggagaaagtggtgctggtaaaaccgagacgacaaagatgctcatgaggtaccttgcctttttgggagggaggtctggtgtagaaggaaggacagttgaacagcaagtcttagaggtttgtttatttttttcatgaaaaatgaggatgattccatatatggctgtatacagcttaatgtgtatatccccaatggcacattgcagtctaatccagttctcgaagcatttggcaatgcaaaaactttacggaacaacaattcaaggtacgttcttcatctttccaaatctggggcttatcagctaagttcattaattagaaacagttcatactaggatttattcttaaatgcttggttcctaagtttttttttttaatgttgttaattgttcttccgattatgccttaagaaaatcgtattcattgttacttgacctttttcattcttcttgatgttacccacctcgcagtcgttttggtaaatttgttgaaatccaatttgacaagaatggaaggatatctggggcagctattaggacttatctgctggagaggtcccgtgtttgccaaatctcagatcccgaaaggaattaccattgcttttatcttctttgtgctgctccgccggaggtatcttataatttgttttcttctaattgacacattaagtgcatgtcatccgatgctgatatcatactcatttttttttcttctattttcgggtttattttgcaggatataaagaagtacaagctggaaaacccacataaatttcattatctaaatcagtcaagttgctataagttggatggtgttgatgatgctagtgaataccttgaaaccagacgagctatggatgtagttggaatcagtaacgaagaacaggtcctgaaactaatgtgttaaagaggtcaggtttccgttctgctactttcatgttagagtctgacatccaaagtaatttatttacaggaggcaatcttcagggtggttgctgcaattcttcatcttggtaacattgattttggaaagggggaagagatagattcatctgtcatcaaggataaagattcccgaagtcatcttaatatggcggcagagttacttatgtatggtcctttttcttactatatttgaatctgtttatccattttcgttttagtggattatatattcgtagtaaatgctgttttttatattgtgcacttgttttgacaggtgtaacgcccagagcctagaagatgctcttattaggcgtgtgatggttacacctgaagagattatcacgagaactcttgatcccgataatgcaattgcgagtagggataccctggccaagacaatatactctcacttgtttgactggtgaagctatttaagcgaacttcctcttccatttcctcatctcgcatttttatatatatttgcataatacattttattctatcatttacaggattgtgaacaaaattaatacctccatcgggcaggacccacggtcaaagtcgattattggagttctggatatctatgggtttgaaagtttcaaatgcaataggtactgttatacgtaaaacattctttgttatcacctttaccccatttcattccaggggtgcatggaagaccaatctagacatgcttggatagctttaaaagaataattccttgtcatcttctgctatttcaactgaaagttaccaatgtctctatatcttctgcagcgtctcagagtattaagtgggtgttaaatatagtttcatataatgtgtcaagatgttgaaggaaattgctaaccgtggaaagttagtagatttatctgttatcgaagagttgtagttgatcttttgtttggcttatgatacagttttgagcaattctgcatcaatttcacgaatgaaaaactgcaacagcattttaatcaggttagtcgtttactcatgtttatattgatcagcgcttttgcttttggataagtagattggacttatttctggtatcactcttttgcagcatgtcttcaaaatggagcaggaagagtacaccaaagaagagattgcttggagttacatagagtttattgataaccaagatgttcttgagttaattgaaaaagtatgtttctccttataatttaagagacttacattccagtttgtgatatttattgcttgatgataaccatatttaggtttaggagcagagatcttgtttactgcacaattgtcttatgctttcccttttcttatgttaaaattgcgtgtcttcaatcagaaaccaggagggattatttcacttctagatgaagcctggtatgctttatctttctcagattaacttgcatgcctttctcatagtactatccgttcatgtattttggttgattcaactcagtatgtttcccaagtctacacatgaaaccttctcccaaaagttgttccagacgtttaaagaacacgagagatttgccaaaccgaagctctcgcgcactgattttaccatatcgcattatgcaggagaggtacagtattgcttcttcatatttgtctatttctaaatgaattgaagttgaagctttctgttcttgatgtgtatcctacatttgcaaggttacttatcaatcaaaccatttcatcgacaagaacaaagattatatagttgctgaacatcaagcactatttactgcatctaattgcaagtttgtggcgggtttgttccatgcgcttcatgaagactcatccaggtcatcaaaattttcttccattgggtcacggttcaaggtattgcatgtaaaattgctagttatgcactgcaagttttgaaaggaagtttattgatatcacttatctatgttgcagcaacaacttcactcgctgatggaatcactgaatggtacagaacctcattacatcagatgtataaagccgaacaatgttcttaaacctggtatctttgagaatttcaacgtcattcatcaattacgttgtggggtaaggatgtcctgtctaaatctaacgggtgtatctacatctcttattagacctagaatacactttcccgtttgtattaatattaaacgattagtgcgataaccaacgcagtttttgaataacatactaaaatacgacgtttctttatatgcttactattcagtaaatgtcgtatcttcccagaaaataacaattagtttcatttgcagggtgttcttgaggccattcggatcagttgcgctggctatcctaccaggcttgccttctatgactttctcgatcgttttggtctccttgctccagaagttttggaaggaaagtaagtctctctctgaggtttctgcatctctatgaaaacacttttgtcgaaacaaacatcagtttaataagcaattctatcacaccttcttttacagttatgatgataaagtagcttgccaaatgattcttgataagaaaagtctgacggactaccaggtgtgatatgcattttcattctggtttgttgctttctttcaaagttgttttcttaccaaattcatggataattttagcgtcatggtcatgatccccgatgggatcatccacaagaaaaaaaaatctcccttccttgttccatcattctcactatcggcattttcagtatttgttcatgtatcatatacgtacctttaccatgttgttcccagataggaaagacaaagattttccttcgagctggtcagatggctgaactagatgcgaggagagcagaggtgcttgggaatgctgccagagtcattcagaggcaattccgcacatgtatggctagaaagaattaccgttctattcgcaatgctgcaattgttttgcaatccttcctacgaggtattttctgcactcagtaaggtttctccatggcgtatgctgttcagtcagaattatagtgcatacccatccttttctcatcgcatcctattgttttcatcatttggagcttaaccatttcttctttaccagatggttgttttctggtttgatcatctgttctccttttctatgcttggttaattgcaggcgaaattgcccgggcagtgcacaagaaactgagaatagaagctgcagctctaagagtccagaagaatttccgccggtacgttgacaggaaatcttttgtcaccacaagatcatctacaatcgtgttgcagactggcttaagggccatgattgcacgtagtgaattcaggctaagaaggcaaagaaaagccgccattgtacttcaggtagatcacagtttccttgttactgggagggaactagacaaccttcttaggacagaaataggaaaactttgttaactgttctctttgatggataaaaaattcccctttttcaggctcattggcgtggtcgccaagcattctcatattacacaagacttcagaaggcggcaatagtcacacaatgtgcctggagatgcagacttgctagaagagagcttagaatgctgaaaatggttggattccttgctttatgacttttcattgcgttctaacacagtgtgcatgaattttcttattcagctgtttacttccatatgtacattgatgtaggctgcaagagacaccggtgctcttaaagatgctaagaataaattggagcagcgggtagaagagctttccttgcgtttgcatttggagaagcggttaagggtaacttagatgtcaattttctttggaaatatctttaggttaaaccaatttggagattgtggtcttcaaagtcagttgcaaattttggattatattgttatctttttactgataaacagactgatcttgaggaggcaaaggtgcaagaagttgcaaagctgcaagaggcattgcataccatgcggttacaattgaaagaaactactgcaatggtcgtaaaggaacaggaggcggctcgagtagcaattgaagaagcaagttcagttaataaggaacctgttgttgttgaagatacagagaagatcgattctttgagcaacgaaattgacaggctaaaggtaaaaactgacatattttaatccaaataaaataggttcaagatgacaagatgtaattgtttctacaccatagatgtgtaaatttaataatgagatttttttctgtttctggatttaaaaaagataatgctttatgtgaaagtctccattatttgattgttcatgccactgatctacaatctcgacatggtcctaatgcagggactgttgtcatcagaaacacataaggcagatgaagcacagcatgcttatcagagtgccttggtccaaaatgaggaattatgtaagaaacttgaagaagctggaagaaaaatagatcagctccaagattctgttcagaggtttgtattcatttgcaaatttgagatcatgatgcatttgtttttccatgtgagacttttatctttctttatacaaatattttccccttgaaaataaatttttacgttctcaggtcatgcatttagaggtttaattagtatcagatattgcatttagggcccagttttttctctgaaataagacgactaacaatatccacttcctatatattagattccaagaaaaagtctttagcttggagtcagagaataaagtactccggcaacaaactcttaccatctcaccgactactagagctttggccctaagaccaaaaactaccataatccaggtactggtggacaccggctatgtctttacattgaatttcttaaccgtgaacatgacctttttgatatttccgtggaatttcagagaactccggagaaggatactttctccaatggagaaacaacacaacttcaggtatgttgataaacaaaatcagccccttgtgtaattaccatttacattgatggagatctaatatttaatgatatgctccaggaacctgaaactgaggataggccccagaaatcgcttaatcagaaacagcaggtagctatcactttgaagccttgtcacatatttcacttgcgggcataatatgttctgtttttttgtcagtatgcattttgcatactcattatgttcggtttttcatcttgcaggaaaatcaagagctgttactaaaatctatttcggaagatataggattttctgaaggcaagcctgttgctgcctgtctgatatacaagtgtctgatacactggagatcttttgaagtagaaagaaccagtatatttaatcgtataatcgagacaatagcatctgccattgaggtagttttgatgttctttcataccaacacaaatgttctttcctgctccatgggtagtctcatgctaaatttacatctttgcagatgcaggaaaacagcgatgtactatgctattggttatccaattccgccacattattaatgtttcttcaacgcactctgaaagccggtgctacaggaagcataactactcccagacgtcggggaatgccttcatctttgtttggacgggtatctcaggtagttagaagtgtttacgtgtctctcaagaatgctttgattccattaatctcacttttctcatgaaattacttgtataatagagtttccgaggttctccacaaagtgctggattcccatttatgactggaagggcaattggcggtgggctagacgaactacgtcaagttgaagctaaatatcctgctttgctttttaagcagcaactcacagctttcctagaaaagatatatggaatgatccgtgacaagatgaagaaagagatttcccctctgcttgcttcttgcattcaggtagacattcttttgaattgccttttgttccacagaaaataatcgttgatatattattgtggtattaaagcccctgagtctggttctggttttgtggtttgatgaaaacaggttccaaggacaccgcggtctggtttagtaaaaggacgttcacaaaatacacaaaataatgttgttgctccaaaaccgatgattgctcattggcaaaacattgttacttgtctaaacggccacttgaggactatgagggccaattatgtgagtgaaataaactataaattccgccaaagctgaaataaagtttattttcaacttcttttttctttcttcttacaaattttgaacctatccaaaactgcaggtgccttccttgctaatttctaaagtgttcgggcagatattttcatttatcaatgttcagctgtttaacaggtaattctgatatggttgcaactgtcaagtcgctatataatacagatccgcttatgtttttcccgtttaatcaaccgtgtagccttcttttaagacgtgaatgctgctcgtttagcaatggagagtatgtaaaaacagggcttgctgagctggaaaagtggtgccatgatgcaacggaggaggtaatagatgtttcaaatcctctctggagttttcggacagttagcttattagaagatgctttttttgttgtgttctagtttgttggttcggcttgggatgaactaaagcacattagacaagctgttggcttcttggttatacatcagaagcctaagaagagcttaaaagagataactactgaactttgtccggttagttcaacgttttgaatttgtctcttcatttgttcgtctcatgtaaatctaacgaaattttgtatttctctgcaggtgcttagcattcagcaactgtataggatcagtacaatgtattgggacgacaaatacggtacacatagcgtatctacagaggcaagtgaatatttctactcttgctttcacattcgtgtgattgatggacccactcgaccaaaccgttaacattagtcttatcctgagctatgttttaagaaaatccaacattacctagaattgaaataaaaatgttcctcgcttgacacaagaatggtgatgcaggtgatagcaaccatgcgggcagaggtgtcagatgtatcaaagagcgcgatcagcaattcatttttactagacgacgattcgaggtaaacccttgaaagaaacattaacaaaacaaatcactttttagaagattgatattttgataaaaaaaattatgtgtcttggtttgattgctttttgcagcatcccattctcgcttgacgatatctccaaatcgatgcaaaacgtagaggttgcagaggttgatcctcctccgttgatccgccaaaactccaacttcatgttcttgttggaaaggtcagattgaagtagtcaaagttccctatacccgatcgatcgctaggacattttcagattaggagatcagtattgtgctttcaaaaacaaagcctgtacattagtacatatgcctatctttgccagtggctttctggtactgttctactattaataggggtatattgggtaggaaaaaatatatatatgtgaactaaatatttgttgtgtccatgcgttgataggccatttgcttaatgaattttactttgtttatcatttttcaaattattagtttttttttttgtcactattgttctttattgactgatccaaacaagtttacaaggccaaagttgaagcccaaaattgaagcccaaagtattacatcaaggaaaagatcaaaagaaggataactcttgcgttagttaatgtgtcaacaacatcgacacgtggtgaaaacgtgttgcaaaagaaacattgcaatttcccgtcatcctttacagtctagtctttagttatgtttgtatgtttttggaaacatatctgtgttaagagatattccctttgtgtataaatacactgctagtgattgtaactcgggggtactcagacagaaaagcgtttagggaacatttgttcaaggtgttactgccgccattgctggtagtgtctccgctttgattacagtgacataattaaagactagactgcaggttctaaatgtggaagatagtaatagtagtagtagtaacgataggaactgcagtctgactatctacagacggttagaaacttggtcggggaaggtggttggacggcttgttacagaggattgggaccaagctgcgcttctagtcaatgtgttctatgactatgatatatgatataaacaacaccggaatggagtgtatgaatctggtttagctttactaactatgaataagcaaagagcagagacttatcggttatcagatttacatttacattcatcactccaatccaatcactgacttaacacacgatgatccatggtacaaacgacagacgaaaagtaaagagttgaagcttgaaggtttttggtcattcaaatgatatctggacaaagcgtgtgaaataagaactagctaataagcgaagtagcagccaaggatgacttccctttttttgtaggaacgtacacattaccagattccaccggctcagatatggacagagaaatggtgtgtgttcctacctccatgcatgtcatttgattgaccatgaacatacattgttgggtttgtctgagatgggcaatctgatatcagaaattcagagtgtccaaagagattaacgctgtcagaagcagatgtgatgtcagagcgagaagtggttgaacaatcacagtcattgctgttctgcaactgataaagcacaaatcttgacatgtttcccgttgcgtgttgctgttggattggcatgtcttgttttggatctgtagattcttgaagctttttggtgtttaggaatcttccaccagatcctctaggtcgtttaagagcgtgaacatgtcgagattcatgaagatacggctgtatgatatttgataatgagttatgtttagtcattaaaccaaagtaagataccgaaacgctgaccaaaatactataccttacgggctttgattagtttgttttgcgcctctagcttagcacgctgttgcctcctcctcataattgcatggaattgctttgcattgacaaagacaggctcattctctatgagatcgaatggtagcggaactcgagtcatttggggattccatatctgcagaaagtttttaagcaaactgaaatctcaaatggagaaataaattgcaagactaattcaccatttaaggatggcatttctttctatagctgtatatgtaactacttcagagcataatgttacataacaagtccaccttaagtaaaaatgaggtttagcataaatattctcctcaccatatgtaatcaaggaggatatacttactgttgcctgtggtaggtaagccgcaggcattaaaccaccaaaatgtggatcggcatagtgaaatgagaagttagcctgaaaccagagtataacacaagatgtcagtaaacaatcacaagtactgcttatcgtcactcgtagtagatatacgggtaccttggaaggagaagagtgaatatcagcgattcctgccgtggaggagcctgatttaattgcaaatcgcttcctttgagtttcttcaaatcctttacaaacatctgaaagaaagagagcgaaagataacattttcaggacaaagggatggattctttcgtaaatgggaccaaagatcaagctaaaacaccatgcgtcttcaacataatagatcatagtgagttgtctagaacccaaagttgtttaaaacggacctgaatgtgctaaaaatgagatttgtcttgaggggttatcatctccactacttgtaacatcgttagaagattgagcagaggacagagttgaagatgaatcctggtcctggaaactgatattctttgtgtttataagacgttctggtcttgcatctaccaccttcaaactcagtgattcagtcacaccattggatttggttggaagtccccatgagatggaagtactaaggtatggtggagttgaatgtgccacagagctagtaaatgaaactttcttatccatgtgactcagaggcaacaattagctctctctctctctgcttcaacagagaagattgatgatacatgtgtctgtcaaagaagctccaaattcagaacatctttataaatgataaaactttcaaaagatatttattcctggaaacagcaaaacctttgacgatgtagtagacaaagaaggggataatccaaaaagggaaaaaaacccagaaacagagcaacattcagaactatttcgggcaaactattagaagagcgcggcagaaaaaaaagtaaagttccgaccaactaaaatcagcaccattactttcgtcctaaaaggcgttgacttgggaagaaatttccagaagatttccgaatcagcacatcactctaaaaaaaagcgaagaaatgacggattcaaagagaaggagatagagagaccttacggattcaaggaagagatgaagaacaggaactcaagggatgcctatcaaaacaaagtaaatctcttttctcttttgcttattctctcagatagatactcaacagtgtgtatgtgtgtgtgtgtattcttttgatgcttcatttccgtcactcacaattttctctcttataaagtcattacctttccaacaaaatcaccagctccattattagcagtaccgccaccttcattagtatttttaatgcttaattaatatattagttttctaatcttattgacttattattttgttcacttaacaaagtaaacacttatctagttatctgcctatccactttacaaagtaaaactatcgtcaaaagcctaatctagtgagcaactatatggcagctgaagcatctaaagcaaagctaatctgcctactctttgtgtttatggacaaaatcttgaagcgttctttggatatagtggaactcagttccaaaatgcgagtggaaaagagagagagaagcagaagcaagggagacttgaaatgtagtaagtttgttactacctggtaaattacagaagaaagcacacagtttaagtcttgaggaagctgttgctgagtcttgagtttcacttgaaaacacgcaggagtaaaatcacaagagcagccactagcgtgatgcagatagggatgcctacatacataaccgcatgtgtgatcttgggaaggcggatggtttggcgatttcttgtggcttgagttttcagtacataactcgacatctcagtttcttggaagtagtcatttcgtgtatgtgcctataaaagaagggagatgataaagggtaactacatcaatcatagtagagacggatcaagagccaagtattcacctccttgtttggtatgtcctcaaaatgttctgcagaaccagcttcgagagaatcacagccgtgtgcatcgagaaattggagagacaagggaagtttttccaccgatttgagtttcttgcagttattgaggcaaagtgttaccaatgaggtaagatctctgatgcttgatggcaatgtctcaaaatcatggttgctgagatctaaacatgtcaacttggtgaaatgactaagctgatctgacaatgattcaacactcttgcaattttcaaggcaaagctcaagcaaacagtatcttccctcatcttgacttgtgttagatagtttcgccaatgatctaaggttcctacagttggtaagtgtaagtgtctgcacctgagttagctttggcaactcctggagcttaaagcagttttgaagccagagagtttttaaccgggaaaggctactcatagcttctggtaagttctcaaaatcatttccgctgaggtccagcttctctagtaaatccaggtgacaaatcccagatgggattttcctgatgtttaagttcactagttttagctctttcaggtcgggaaaatctggaaagacgtcaaaggagaaagattcaccgttttctttgtggctgaacctcatgatgcggagggaattgaatctgttgcactctgagatgacccaaggtgcttgttgcagactcatcgccgatataatgggtatctgttgctcagaattaaaagagacgtattcagcatatcctctaaattttgaacgaaactcaaaagtaatgtctcccccaatcgatatgtttataagtgcatccattttcacttttgcgtctgggaactccaatccaatatgttgctgccttgtagattttcgtagaaaaaaccgcagggcacttctacgccctccacggtaggatagcttaagcttctttaaggtagacctttttccaatacactctggaatgccctccagtctcgtgcattgttccagaagcaattcctcaagactcgtgatacttgaaagatctggaagttgcttgagatgcttagatcccgtcacatctagtctcttcaaactcttcaacatctgagcaagatacaacaacacatggaaatagttggaattatgtttctcgcaaggattctctgttttcacaccattgctctatcaaaaacacaaacacaagatgcagaatcatagaaaagattaccggtgttccactccagagagtttctaaatcactgtgacgcagattgagttcaacaagaaaacatggatcagaaccggaaggcagggctctcaatggaaatgcatcccaatggaatagccgtaggctacgaggcaggaacggttggtctggaatgagttgcagattcgactctctgtaatctacatgcttgtaaaccttgagaaacttgagattatgcatacggccaacaacactggcctccatggataacacacaggtcatatcacacgtgtgtaggcacatgcattcagtttgttctcctccctgatgataagaagacaaaagaaacacaaagccagaaactcgtcaggtcaggatgcatgaaaatttaaaagaatagatcaaagatgatatagatgcttacgtctctgaaagccagggcaacgcgaatttccataggatccctgaggaactttcgagccaaagacatgtcgtcgcggataatttctcttcccatttgttcgaccaacttgtgcatgataacagatccattagttgatattttgatgagagatttctctgctaaaactcttatccacaggctgctctgaggtatggggccatgaagaagggaagtgattcgctggagagtgtctccattgaagagacagacaacatgaaggaatacattctgatgtggttttggtaagccctcgtagctaattttcaagatttccattatattctcgtcaagactgctttcaagtgcacccagtgcttcttcccactcctcaggactcgctgtccttccacggagaaataatgcataggcttgaatggcagaaggaagcccgtgagcaagcttagaagctcggattgagagttggtcaaaaccctcacaaggaggaagtcctccttcaaaagcaatctgtttaaacatctggagggcatccttatcatccaagcacttaacctcataaacgacttctactccacaggtattgagcaagcccatatctcgagtggttatgataattcggctcccaggaccaaaccagtttttctcttttgccaaagcatgcacctgcgccactttatccacaccatcaagcacaagaaaaaccttttgattcccaagtctcttttttatctcttggcatccagcttccacgctccataacctaatatcatcacagaggatactggagagcaattctttttgcaaatgctttagatcatggccattgtctttactaacactcttaatgttttctatgaaacaatgagctggaaatttaggtgagagctggtcatagagacacttaacaatggaggttttcccaattcctcccattccccagattcctaccaggagaacctcattggattcctgatccaagagatgattaagaccttccatgtgagctttcatcccaacaatatttccagagtctattttatgcatcaatgtcacacgtcttgaaatatctctagcaatttctccaaccattatagcctcatcaacactaataatattgaaattgagcaggaaaattataattcaactttccagtgtgctgctaaacaaagtgataaatgtgtgtaaacaagaaaacgaggcttaccagtggcttgaaaccacgcctgaaagattggcgattaggttaagagcttctctccacctgagaaccttatccaccatttcaagaccttggtactttactaaagagaaacttcctagctgatgcctcaccacggaaggatctactccatagaagatgggaaagacttcaagtcttccctccttcataagctccattatcagttgaagttccaataagcaccatctcgaagtagcgtagttctcggagagaacaacaacagcgaaactcgaactccctagtgctctgtggagttcatcggaaatgtgatcgcctatctcaagcctttggtcatctttgaaagtaacaatgcctctgctatcaagtgctgcatataaatgactgacgatggttttgcgggtgtcttctccacggaagctgaggaagacgtcgtacttcgatacacgaggtgcagaggaggacaccattgttgaaaaatcaatcaaggtcgtctaaaaggtttgttctctggagttttatgcattaaggacgacttgttgaacaacatcatcttcttttcttttcggggaaattgcacaagtaggaaaatgtggaacttttgtgctcatttaaatctagtggttgacggactttacagctttacagtgacaagtcaacgctaaatggcctggtaccttatcttcatttccttcaaatggtatagaatgcacacacacactgacacaaaaaaaaaaagaaatatactttgtaatctttgtttatttagttgctgctaaaacaaaaaagtgaatgtctacttcttattcttttttgttggctggaagagagttggatgtgttcttgagtttcagcggtaagatagctcttgacgttgattttggttatgatttgtcacgaaatggtatcaaagcttttaaatccgaaagctggaaggagagtagcttcaaaccaattgatctacgaacgcttgaggctttgacagagtccaaagttgcagttgtcatgacgtctgatgaagaagtttcttcagttgggttccttgaagagctcattgtaataattgagtttcaagagaaacgttcactcactgtcataccagtcttcctcacaaaacaccctttggatgtggaaaaagtctctcaaatatttcctgagagagccaaaatttggaggactgcaattgccaaactggacaacatagctgcacagtactcgttttctcggaatcttgcggtgatgcacggaacacaccggatcaagcagattgctgatgacattaggcttatgtttctgtcctctgcatcaagcgatttcaaaggccttgcaggaatggaccgtcacatgaaagcattgtatgcgttgttggctttagaatctgacgaaaaggttcgtaccattggtatttggggtagttcaggtgtgggaaagacaacacttgcaaggtacacttatgcagagatctctgttaaatttcaggcgcatgttttcctagaaaacgtcgaaaacatgaaagaaatgcttctaccgtcagaaaactttgaaggggaagatcttagaagtgtgaatcatgagatgaatgaaatggcggaagcaaagcaaaaacaccggaaagttcttttgatagctgatggtgtgaacaacattgaacaaggaaagtggatcgcggagaacgccaactggtttgctccaggaagtagagtcattctaatcactcaagaaaaaagtttgcttgtgcaatcaggagtgaatcatgtgtatgaagttggttctctaagatatgatgaagctctccaactcttctcacgttttgctttcaagcagccatatccttctcctgattttgaacgcctctcagttcgtgctgttcagcttgcagggtttcttcctgtgaccattagactgtttggttcgtttttaactggtagagataaagaggagtgggaagctacactgcttaaactcaatgcaaagcaaggtaaagacataaaggaagtttggaagattatggaagcattagaagataaagatatcgtggaagcatcccaaagataaaacacctgtattatattcccttacatcttgtttggtttcctcaatgataatgcatgtgcgtcaacgcttataaacgtaggtatcaacaaagcccatcttttatatttctttcgcacagttttggtcatggagtacacaatggtattgtgtgttatctcttatctacttataggtttatctctgtaagtctgtataatcatctcttctaaatatccaagatttatggaaaagggaaaattagtctagttataaacgaatagccatttaatcttactggccaacgaaaatagaagtagcagaaacaggggacacatacctgcttgaaaccgctgcagatacagagaaatggacaaatattaatgcattcacactgaaggtatattattatgtgttgaaaatgctatattttacattggctatgttttaaatttatcattttatttttctgactatcatttgttgaaacaatagtagactataaaagtactaaaaaaacaaaagtatatgatatatgagaatggattaaagaatacagactagatggaaaacaagctgatagagacgtggaagctgacgtggtaagctgtagatggtgatgcgacatgttaaagacacgggagccgagttggcaaaacgtttgaagatttgggtttttcacttcagcaacatgtggaatcactacaagtctacataagctaaatccgttatgacctcatgatgaaacattcaatccttggctaaagtcacttcgaattttttttaggtcctccacgttaccaatgacaactcataataaagaataaatagtaattaatatatttacgtagcactgaccacagtttttccgtttgctcagcatcaaaactattcaaccatcaccgaccgtttattccgtgcagtatactcttaggattgcacgttcccttatatcttagaaaaagtctcaatggtgaaatatatattaagattttctagaaatagaattggagttacatcatctgatgactgatcatcaaagcattaacacgtagatcgccaattcgaatattgatcgaataagcgatacgtaggttttattctttggaccctttcagtttcatgacttttaataaccttttcttggtaaattctcaacactttcttggaaattttaattattatgctatctgaatctatatgtactattgagctttgctctctttcgctaacttctcaaatcaagccatctatcatcttccaaagtttgaaagtaaaaaaaccgatgtttattttgattcagtccaatgtattcatcatcgtcttcttcttcagctactccacaaaagttcgacgtctttctgagtttcagaggcaaggacactcgcaggaccttcattagctttctttacaaagaactcattgaaatgggtattcgaactttcaaagacgacgttgaactccagagtggtcgtcggattgcttcagatctcctcgccgcgatcgaaaactccaaaatcgccgttgtgattatctcaaagaattactctgcgtctccctggtgtctccaagagctagtgatgatcatggatgtcgaaaagaagggttccatcatcgttatgccaatcttttacaacgtcgagcctgctcatgtgagaagacaaatcgaacaggtcgctaaacagtttaggaaacatgaaggaagggaaaattatgagactgtggtgtcatggagacaagctctgaccaatttggccagtatctccggccattgttctcgtgattggtacttttctatctttgttttattatcacaatttgaatcctaagtggttttgttgaatcaagttcgttctttcctctgttatagcgaagatgactcgaagctactcgatgagataaccaagagaatttctgacatgttattctcggtaacaccaccaagtgagagcatcaataaccaacttggatttgatgcacgcatgaaagagttgtatccattgttggatttggattctaatgaaggtgtgagagtggttggaatttgggcaagaggaggtaatggaagatcagctctagctagatacgtttatcaaaagatctttaagaaattccaaagtcattgttttctcgaaaacgtcaaagggatccctcacgattgtcaaatgtcgaatctaagagacgagtttcttatcaggattcaaggagggtactcgaggatgaagacctcagggttgataaaaaaaaggctcatgagtcagaaagttctacttgtggctaacaatgtcgacaaactcgaacagttagatgctcttgcagaatattttaactgttttggtccagggagcatagtgctcataactacacaagacaaacaacttcttgttgcgtttgggataaaggttgtgtatgaagttgagtgcttgagatgctttgaagttcgtcaactgtttcgtcaaatcggctttagggaaagagatcttaatgtcggttccgagttgtcttcacctatatccgggactgaatcttcttgaatggtaactctgtttctggtccttctggaataacccttagaagcacttcctagggtaaaccgttaggcttattatacctaagacttacgaagatttagcttaagattagggattgtttgctagttactggtataaggaattaaattaatctccattgatccaataacaatgcatgtacaaagttacaaaatgcatgtaaatgtatcccttattttatatctgtttgtctcagtgtctctgtgatcacctcttcagacaatcaagctatgttagttctttgaaagaggactagagaatactaacttgttgtccaagaatcctgggcttgtatatttcattctgtagttgctgcgttacagacactttttcctctgttttaggaatttcttgatttacaagtaattaattcaaaacagaaagttatgttctgtgcttttcttacttatgtttgtctaagtttaaacgcgagtgtatagacatcgacagagaatccagatcaaaggcggataaatttgggagattttaaacaattcctctgcgtaaccaatcgtgtaaactctgtattaggcaatctctctgattgcttgcaggagaagttagaaacggatgaacctgggcccttctattacattggaagtcttattgtcatgcatgtgaattattatgtaatgaaaaagcccaattccgacaattaaatatgtgcgggtgttacccatctccacgtttcactacaggcttcacgcggcttgtcgtttatacggtattaaagttttcttacatttcataatcgtaatactaaaggaagagatcaatcacatgcatatgcaatgttgttattctatttgctccattctaaacagtaaacatacgtgagaaatgctttttctttggtggcggatacgatcccgtaaatatatatatatatatatatatatatatatatatatatatttttaatctttgtctaatttaaaggaacttttttcttatcacgtatttgctgcatttatcttaactaatccaaaatttataacattgcttgatcctataaattagctattttagatcaaaattatatatagaaaggactaagcatcagctatttttttattcgaaaaagattatcatctatctttgcttcaatacaaagtaaaatgtttggtgttcgaattcacgtttcagctcacaaattatgttttctatctttttctatacaaagctttcattttagccaactggaatgtgtaagtaatcatattatagcaataaattggtatataagaattaagataaatgattaaaacatatttatcacattttctcccaaaatgcttagcaaataacaactggactctcgtgacttctccttgcaccctataatactctacacgcgtgacatctacgcgctggtgtgaacgcgtgtaagctctagtcccgcgttgagctgtcactctctgtgtcggtcctcttcgcttcccctctctccttctccactaatcttacactaattattaaactaatcacccattaactctaaatctcaacaaatcataatctcttataaagaagacacacatctcctaaatcttacccttattattattcattctctctaatcaaatcctcttctctctcaaatctcaatctccgattatgacagacgacagagtttaccctgcatcaaaacctcccgccatcgtcggtggcggtgccccaaccaccaatccaactttcccggcgaacaaagctcagctctacaacgcaaatcgtcccgcttaccgtccaccagctggtcgtcgtcgtactagccatacccgtggatgttgctgccgttgctgttgctggacgatattcgtaatcatcctcttactcctcatcgtcgccgccgcatcagccgtcgtatacctaatctaccgtcctcaacgacctagcttcaccgtctctgaactcaaaatctccactctcaacttcacatccgccgttcgcctcaccaccgccatttccctctccgtcatcgccagaaaccctaacaaaaacgttggattcatctacgacgtcaccgacatcacactctacaaagcatccaccggaggagatgatgacgtagtcattggtaaaggaacgatcgcggcgttttctcacgggaagaagaacacgactacgcttagaagtacgatcggaagtcctccggatgaactcgatgagatctcggcgggtaagctgaaaggagatctgaaggcgaagaaagcagtggcgattaagattgttttgaactcgaaggtgaaagtgaagatgggagctctaaaaactcctaaatcaggaattagggttacttgtgaagggattaaagtggtggctccgacgggaaagaaggcgacgacggctacgacttccgccgctaagtgtaaggttgatccaagatttaagatctggaaaattactttctaaatatagtaaacaaaataatggaatcacattcttagttttttcttcattttctttttattactccattgtttcaattttcatttctttttaaatttgatttcatatacagttctttgattcctgtaagactttatttttttggtttatgtaaatgaagatataaatatttgtgttctgtctgaaattttatttttctagcttagttaacaaaacccaactgttagtatttaagtactgtaattaggtaataatgcgagggaggtgaccactagtaattacaagtgctttggtcaattaagctttaaataagacaattacggtggctacttttatttgttctttgcatcaaataattaagctaaccatgtggtccatgtgtgtatgagaatatatacacataacataccctaataaacttatgaattattgttgtagaaccatgaatttgattacatataagtctccgggtgtgttggcaagtgacaaaaaaatctgttggtcttgtgattaattaattaattaagtgtgggtgcgaagttacgtcctcttaaggtctagaaggtgtcggtgaaatgaattcaactttaacaagaaaaagcaaagctctacaaatgattaaaaatcaggtgttatgttgtaatcaacaacaaaaaaaaaaaaaaaagcgattagttgttgttgtggaattttggtgtcaagacgacggctaacatgtggtggaatttgtttgttttcgacgaaataataaaactcaagtaggagagatttggttagtttaatcagttaagaatatactagtctgattataataaaaccaaatcgagtagactaatacaaacatataatgtaatgtccaaccacatatattattaaaaaaatagttataggtttattgaagaagatgcttaaaatttgtattcataaaaactagttataggattgtgagagatgaaatggagaacgtgaaatggttgcggctaagacttatatgaatgcagctgtgatctagtctggaggtagaagcaacttcttgggccatttcgtgccttgacaacctaccctacatagggctatgaagaaatcagttttgagagtgattcaaggagcttgatccaaaggcaatgccgtgagattggctgagactttggggctccacgagtgaacaatggtatatatactaccacttctagttagttgttttctaatacatgtcctgataatatcattgacaatggtaaatttgagtactagatacatgtcctcatggtaatttaatttttactcatggtaaatacacaataaacctatttaaatgtcgattaacagcgtttaacctatttttaatgtttttaaaatactagcttcaaagtaaacagcatttgaagtttctgtttacattttccctcttctacttgatatggttcacgcttctctttggcaatttcgccttcaaattatcccttggcgtcttcgtaatttttgcttcctcacttctcaatgtccatacacatcgatttcttctcccgacaccgtttcagtttcctcgtactactcccttacgtctaacaatgatcaatccctcttccattacttcgatcatcttcttggattatgcctgacagctcagcaatgcaggcaagttcatgcccaagtacttctatccgatttcatcttccgttctgggtcattagctgcgaatctcatatcggtttacgctcggttaggactccttctcgatgcccgtaacgttttcgagactgtttctcttgttttgttgtcggatttgcgtttgtggaactcgattctaaaagctaatgtgtcacatgggttatacgagaatgctcttgagctttacaggggaatgcgtcaacgaggtctcacaggggacggatatattttgcccttgatccttcgtgcttgtaggtacttaggtcgttttggtttgtgtcgggcttttcatactcaagttattcagattggtttgaaagagaatcttcatgtggttaatgagttgcttacgttgtatccaaaggcgggaaggatgggagatgcttacaatctgtttgttgaaatgcctgtgagaaaccgtatgtcatggaatgtcatgattaaagggttttctcaagagtatgattgtgaaagtgctgttaagatttttgaatggatgcaacgtgaagagtttaaaccagatgaagtgacttggacttcggttttgtcttgtcattcgcagtgtgggaagtttgaagatgttttaaagtattttcatcttatgaggatgagtggaaatgcagttagtggtgaagctcttgctgttttcttttctgtatgtgctgaattagaagcattaagtattgctgagaaagttcatgggtatgttataaaaggtggatttgaagagtatttgccctcgaggaacgcattgatacacgtatacgggaagcaagggaaagttaaagatgcagaacacttgttccggcaaataagaaacaaaggtatagagagctggaattctttgataacatcgtttgtggatgctggtaaactcgacgaggctctttcattgttttctgagttggaggaaatgaatcatgtttgtaacgtaaaggctaatgtagttacatggacctctgttattaagggttgtaatgtccaaggaagaggagacgattcacttgaatatttccggcaaatgcagttttccaaagtattggctaattcagtgacaatttgttgtatactatcaatttgtgcggagcttccagctttgaatctcggaagagagatccatgggcatgtgatacggacctcgatgagcgagaacattctggttcagaatgcattggtgaatatgtacgcaaaatgtgggttactcagtgaggggagtctagtatttgaagcaattagggataaggatttgatctcatggaactcgataatcaaaggttatggtatgcatgggtttgctgagaaagctctaagtatgttcgatcgaatgataagttctgggtttcatcctgatgggatcgctttggtagctgttctttcagcctgtagtcatgcagggctggttgaaaagggacgcgaaattttctattccatgagcaagagatttggattagagccccaacaagagcactatgcatgtattgttgatctccttggtcgtgtaggctttctgaaagaagcgagtgagattgtgaagaacatgcctatggagcccaaggtctgtgtgttgggagctctgttgaattcttgccggatgcataaaaacgtggacattgcagagggtatagcatcacaacttagtgttcttgaaccggagaggacaggaagctatatgttgctttccaacatctactctgctggtggaagatgggaagaatctgcaaatgtaagggctttagccaagaaaaaggatttgaagaaagtttctggaagcagttggattgaagtgaagaagaaaaagtacaaattctcgtcaggatcaatagtacagagcgagtttgagaccatctacccggttcttgaagatttggttagtcatatgttgaaaaaaggccctacacatgatgggaacaattatgaggatgatctagacctatggacagcataagagatgaatatatcccacatagactgagatgatacacaactaacaaaaacagacttatggaacctatcaggtaagcttgcttctgaccattcaaactagcattgaccaattactaaatcaatcttcaaattagaagagtgtttgtcatgaacaatccataaccagactctggtgcatatctggatgttacaggttctaataatcacggcgtcatctttgatgttcgaattgatggtagttggcaaaggaaagctcttgcctctcctgagctagagaccaaccaatgacgagttgctggagaaccaagagttttagcattagaactctcaatctggcactgatgatcacacacaatcctttaaccccttttgtcacattgtggataacgatatcttgttgagattatctactagaattgttttcaataataatcacacatacaaactttatgaaagaatttcaataaaaaataataatgttttgccctaaacagcacctttgtcgaaacaaacttttttcaactaggtataatctcataagtcacaacagttgaatgtgaagaattggtgaagtatcccaaactatttcttaacttgactattccttcaaactataaagaaaaaaaaagaacatctttttacaaaaagaagagtctttgcaacagccggaagttctacttttgataaggatggtatcgatctggcccagaaccattagtcccatttcctttgccactacttgagccgttatttccgtttccatgagattttccacctccataagcagcagccgcagcaacaccatagccactacccatatggctataaccgccagctccatagcccatgttgaacatttgacctccatagccataaccatagccatacccaccaccataaccataaaaaccagcagggttaaccatggagttccctgcgtaggctccataaccgccataaccaccataacccgaatacatactgtaatcttcattagctttcccactataactatcttcctgatcatacttgccactagcaccataggatcgaaagctgttatctctcccggttctctttggttcggccctttttatttccacctattgatccatattaagtgcttgagatcaatttctagagttctttagcttaaattctaaaacaacagtaaaacaaggtttacctgtttgtcaccgagctcgtgaacttttccatcggagaaaagtctatcaacagaatcttcggtctggaaggttacaaaaccaaatccccttgaccttcccgtgtggtggtcatacatgatctgatgctcaattatgtcaccatatacacagaaataattcttcagttcatctacaaatatgaacacacattatcagcaacagttataaccacagacaataacagaaaacataggagaaacttttaccttcttccaaaagtggtggaagtccaccaacaaagattttcctggtctttgataccgctttgatatcagtatccttgtcccctctaggaagtgtccttttcagatcaacctaacatttaaaaggaattaaccaaagcatccaaacagctaaacaaaatcagagcagacgatttacgacatacaaactaatcaatcatatctacctttcggtcatctattacatgatcttcctccaaaactttctcagcaacagctgaatcagcaaaagtgacaaacccaaacccccttgggttcccagttattctatctgtcatgattacagagtcgacaacttctccaaactttccaaagtaattcgcaaaagtttctgaaaacaataaagtggaagcaatggaatcaacacacataagaacaaatataaccaataacagaatcacagtgacttgactcctctattgtcaattacagtaagacaagggaattacaaaactagatgcaagataactgatgcagcaacaacgagctcaattcaagacataaatggcatacatgactaagacgatgaaaatgaaccatacctgcagttgtttcccaagaaactccacctacgaacagtttcctaacataaacaaagacaaaaggcaccacaagaaacctccccatcaatatcttaataaccagctccgctgagaagagattaatatcaaaagtaaatccatacaaaaagataaagcctaagaaaccacgaacccaggagaagacatggacgaagaagaatggcgatggtcaacggaatgcttcatctgaatcccaccagtatcaacggctgcaccaccgttcctccggtcatcaaaggtctccacttcaaaatccgattgtggtaattgttcgtcgtgtacgtgatgatggtaagagtcatcataaccacgatctgagttataatccatcgatcactgcagctgagtcaaaacaaaaccttttaatttctccgtctgtctatgatgaaaacccaaacttaaaaaatgaattttttttctccaatttcgattacttgattcaaagttatgacatcaaacattcaaaatttcttatcttggaagagaaagaaccctaaccaatatggttgaagtggaaacggcaacgagctcaggcgagaattttaacacttcaggcactgaagaattttttgaaacaaatgattcggtgttatcaacttatcatcggaatatccgaaacggcgccgtatttattgtagtcaacgttggtcaaacacttttctttgttgcttttgtcaacatcaggagatcaaaggttgacttgtgtttgacacttttaacttgctctcatataaaattaacaattatcaattgacatgttgtaaagatgaaatttttcatacaacagcaaaaaaaaacacattttcacattgaacaaatctttagctaagcttctcgggattttgcagcttttagtgcttcaattactgcagagaaatcttcatcgctcaacccataagattttgcaaccttgtaaagctcgttcgcagcggctgcaatcggagtagattgcgatacggattccgctagtccaagtgcgagtctcatatcctatagacggataaaagtcaattacagtctcatcaaactccagagtctttgtgagaatctaaaaaaagaaagtaacacaattacacaaaccttctgctgatgctttaatggaaaagccgtcgggtacactgacttgatcattgaaggaccctttagtgagtacattggcgcattgatagctccctgtgagacaacctgcagaaaaaaatttcccggggtttatagcacatttggtaagaaactttctgctggacaatggtgttttagttacctcgacaagtacatttggatcgagtccaactttctggcttagaagtattccctccgcgaatgatgccatcatactgcataggtaaagagaaaaagagatcagaagaagaatctggaatttgccaagaaatgaagcgatagatggtcaaatgataccttcccatgatcatgttgacgacaagtttcattgctgctccattaccaacttcacccaaatagaattttgactggatcatataatgcaaactagtaacgaaaatggttcatttgcagaagaaaaaagaactaaaagcaaaacacaggcaaaagagatacctttcccatgatgtctaagaaaggagcagctttttcgtatagcggcttgtcacctaaaatgtcaagtgccagatagtcataaatctccatttcattcatgattcaaccatgttagaaaatacaggcaagtcacccgcgaagacaaaataatctgatatgcaaaagtgatgatcgattattaatacaagctcaatgaggagtaagctgttacgaacctgcagtgagaaatattaactgcccatcttcggcaggctttttggaacctgaaactggtgcctatgaatatcaaaaatagaaatgacttaagccaccagatctgttacaaggttttttagtgattctagatatagattaactaagagcctttacctccaagaacaaggctccggtatcctttatttgcttgctgattagtattgatgaggccacatcaacggttgagacatcaacatacctgcagtagcaaggcaagtcccatttttaccagaaagtatcgaccacattactatatagattcgaagaagaaattaaaaaagaacgactgtgaactcttctgtagttacataagaaatacagatatcttgaaacatttcagcaatagaacgttatatccagcataagtctcatgaaggagtaagtacccttttcctgaactaatcccaaatatggctccattctttccacatgcaacatcaatctgacagaaagcaaaatacagtttttgttttaatatggagtgaaagtagaagaaaaagagacgcaaacaaaagtgagacatacgcactgcactttcaggatcagcaagcattgcaaatgtgagatcacaagttgcagtcacttcttcaggagaagacttgtacctgcaacaaagggagatactttcttaatcgttaaatttttcttctacgttagctctaaaacctcactcggagtaaataatatcattctttataagaagcattggaactcttactttgctcctaatccaacgagaggatcacatttgctcttagttcgattccatacagtcacatcacacctaacaaccaagccccagaaagatcaacgtaagtatcatcaatacatcaaaaagaggtaaagtagcaaaattgatgtgaattagattgtctacacataaaaatcaaaacttttttacccagctttgatgaggttctgtgccattggagaacccatgattcccatacccagaaacccaatgctaacagttccaagttcatctgccatacgaaccacaattcctcagataagactaccccaaaaaggttaaagttaaggagattatagtattcgatcatctttctcgaaacttgtgggttttgtcctaaaaagagagcgacacttcataatttaatccatttaaacgtaattcatagttctggaaaaccagtgtatgcataatacaaagcaagaaattacctctggtagagggagtagtagattgcagggaagagtaaaccctgtaagcgagacaaatttgaggttttgagagaaaaggggaaatgggttttggcctgaatcgaagagggatgcgaggacagatagagcacaaagccatggcttttgaagaagatgaagcaaaagataatgaaaccaaaggcatagccactggccagtgcgtttgtttagtagactgtggccgaaattctcacatttcgaggcggaaactgacagatttttactgaggaacaaaatccactggccgcgttgcatatgcttcggtttaaagctaattcacaagcagatataattgtaccggtcggttcaagtgcatttatcccccatgagtcatgatgcttgtgtttgtatatttttatcaacagtgttttttctcgaaaaaagcctcactatgtacgatactcatgcacgtttggactttgctcaattcagataaaccgaatcagtttgattcaaaccgaactgaaaaaatcgatttgaaaaccgggtaatgtgttatatagaaaacgcatccctatggaggaaactctctatacacagcaccaaaaataggagaacatcaaaaaaggattcagttttcctgctgagctcacggcagtttcaatcaccaaatcatgttctgcaagttcgcaatcttccatttttatgcctgaaaaccaacacaagagtggagagtaagatggttatagaggataagcaatatgaagaaagattgcggaaatactcaaaaaggcctatacatggagcaagattcatatgagcaagtaatttagatttactaataagcttgaggagagatggagagaaatgctgaccaaaacgagtctttcttttcctgttccaatagctcttcgaaggaaatgtctgaaaattcatcatctggattgtctaactctgtgctcgatttgtctttgagttccatggaagcgcttatttcaagaacctatagtagtatcataaagagtattaacggctttaactagagataaccaaaaatctcaagggaagtcccaattatgctaacagagtccaatacaggagataagactctactggtttatcagacagcaacaacaatcagtaagattaatctagaatcagaaacatcattgaacagatttttgaggttttggacacataggacacaatctttggaaacaagtgattgagtttggtttttaacctttttgtatgcaggtgagagtttaagctgttgctggagccaattatatacaagtgcatcttcttctactcttttttgttccatctccagcttatagatctgatgacacacaaacaattaacttcaaaagcaacaaacggataaaaatcagacaatcaattgatgaagctaaattcacctgttgacgaagtcggtcaaaggaagatctatcagccttaaagagaagggcttttgttattgaaaacttgcgcttgattacttctgacctacagtagacacaatcaggcttaaatcagtgtcaccggagaagaaaaggctaactcagtaaagcaacatgtcacaccatcaacataacaaagcatagaacaggaagcaactatttgtaattcctgtgtcctcaaaatgtaggaagaactaagaaaatggatgagagtatatgatattatgttatggtagtgttaacttacttgtgttgtagttcatttttggcttctatcaaacaattagcaaactccccaacctacagaagtgaagaacccagaaaacatcagaatctaaaactcaactgggcagaattttatagtaatccaaagtttagattgaagtaaatcattctgatatatcaaaaggaagcaagcttagctgatgattaagtattgaaacctcccaactcaaaaatcatttagtttatcaactgagtttagtataggctattgaacaaacaccacaaaggtatataaaccacatagaggttttaggatgctaattaaggaaatcacaggcttaatagacttggatttatgtttcaaattcacgttttccaattttgatttccataaatagttaataaccgaaggtaaagaaggtgacctgagctagtgtcaatcctttggcattattgcatttaacaagctgatcgtattgctgcttaatcttcctctgcgtagcactgctcgtcgatgtaaaaggatataaacaaacaaactccggtttgttttccgatatcgaaatcgagtctgtcctcggattcaaaacaagcccatcttctccctcaccgagctgcttttcgccgccggattcatctcctcttatgtctgatttcttcttcttacctcgattcttcttcttcttcttcttctttttcacatgatctccttcccaatccgaatcatcctccttcttatcggagagcagtaactcatagagtcgcgaattc

SEQ ID NO: 1128 - DNA, 98950 bp, Arabidopsis thaliana
gaattcctataaaggggtttggtttcgaggatattaggctaatggatgggaattggttgagagagccacatacagatgacattttgctgttctttcgcatattagctatatgtcacacagctattcccgagcttaacgaggagactggcaagtacacttatgaagcagagtcaccagatgaagcttcttttcttactgctgctagtgagtttggttttgtgttcttcaagagaacccaatcaagcgtttatgttcatgaaaggctatctcattcagggcaaactattgaaaggtgagacttcttagagatctattcttgattctttgattattggttttaagtacacatcctgaatgtgtaccagaaacaatacagggagtataaagttctgaatttgttggacttcactagcaaacgaaagcgaatgtcagtagttgtacgtgacgaggaagggcagattcttctgctatgcaaaggagctgacaggttagaagaaaagctaggaagatataatccatttgattttcaaccttcatgtaagtttgaagcagttcttgttaatttttttttttttgcagtatcatttttgagcgactggctaaaaatgggaaagtatacttgggacctaccactaagcatttaaatgaatatggagaagcaggactccgtactcttgcactttcatacagaaagcttgacgaggaagaatattcagcttggaacgctgagtttcacaaggccaaaacttctataggttcggatagagatgagttgcttgagaggatatcggatatgatcgaaaaagaccttattcttgtaggtgcaactgctgtggaggacaaactccagaaaggggtatatatatcagacaagtcaccttagtttccatctcctccatcttggttttgtgaaattgagatttcttttttatttgacttaggtgccccaatgcattgataaacttgcccaagctggcctcaaattatgggttttaactggggataagatggaaacagcaatcaacatcgggttagaacgactacaataccttgaagcagatttatcttgaaagttctttgaccaacttagcttttttttttgaactgcagatactcgtgtagtttacttcggcaaggcatgaaacagatatgcataactgtggtgaactcagaaggagcatctcaagatgcaaaagtaatataaagctaaaatcatttccctttcttaatcacaaggacctacattgtgaagtttcaaattgatatatctgttgatgtaatcaggctgtgaaggacaatattttgaatcaaatcacaaaagctgtgcaaatggtgaagctggagaaagatccacacgcggcatttgctttgatcattgacgggaaaaccctaacgtatgcattggaggatgagatgaagtatcagtttcttgctttggcggtcgattgtgcctcagtcatttgctgtcgtgtgtctccaaagcagaaagctttggtatttcccctcttcccttatgcccatgtatatgaacacgttggcatcatgagcatccttttatttattttgtttcaaaaatgttcccaaaccaggtaacgaggttagttaaagagggaaccgggaaaatcacattggcaataggtgatggtgcgaatgatgttggaatgattcaagaagctgacattggtgttggaattagtggggttgaaggaatgcaggttagtatggtctctctagaatctatttttagtgttcccaacttgtagcaaatgtacaatgattaatcctatcctggcatttcttttgctgattattatgcttttgcaggctgtaatggcaagtgatttttctatcgcccagttccggtttcttgaaagattgctcgtcgttcatggacactggtgctacaaaagaatagctcaaatggtatatgtgtttacaagatgccttctaattctaatgcatcctattttacacttttcacgtttctggtttctaagatatattgttttgcatccagatctgctatttcttttacaagaacatagcatttggtctcactctcttctattttgaggctttcaccgggttttctgggcaatcagtatataatgactactacctattactcttcaacgtcgtccttacttcattgccagtgattgcccttggagtctttgaacaagatgtttcctctgagatctgtttacaggtaaggtttactaagctgctgtgagtttctcacacgcaacaaactaactcgttctttgttctgcagtttccagcgttgtaccaacaagggaagaaaaatctcttctttgactggtatagaatacttgggtggatgggaaatggtgtgtactcctcccttgtaatattcttcctcaacattggaatcatttatgagcaagctttcagagtcagtggccaaactgctgacatggatgctgttggtactaccatgtttacctgcattatttgggctgtgaatgtgcaaatcgcattgacggtgagtcacttcacttggatccaacacgtcttgatctggggaagcattggtttatggtatctgtttgttgcgctctacgggatgatgcctccaagtctttcaggcaacatctatagaattctagtagagatacttgctcctgcacccatttattggatagccacatttttggtcacagtgactacagttctcccttactttgcccacatatcattccaaaggttcttacatccgttggatcatcacatcattcaagagataaaatactacaagagagatgtggaggatagaagaatgtggacacgagagcgtacaaaagcacgggagaagactaagattggattcacagctagagttgacgcgaaaatcagacacctacgatcaaagctcaataagaaacagtcaaatatgtcacaattttcaactcaagatacaatgtccccaagatcagtatagcttcctcaggatatctctcttaaaggttaattatataacctgtagaaacagtgtcaggttcatggatggaggtaggctgtggattttgatttcagattgtggagacagctcttgatgctgttgtgtgtgtatgagaacatacatggaagaaagtaaaaaatagtgtgagcttgtgaaagtagctgactgacgtttggggttgtctttgttgtatcagaaacagaactatacatagatttttttgtgtgtatacttaggacagattgcaacaccaaaaataatgtatcctccgtttttacctctgttgaaaacatatattctcattgttcttgattgctactagagtgatgcagaaaatgtttgatacaaagaaaacatatgaaaagattgatctttttggattttatatattgtgattcatacaacaacttgtagaagaaatccaacaagaaagaaacttgcaaactagaaatgcaaaagcttgatgatggaaacagaggaatcactttttggatcgaccggagtttggttttttagaagatactagtccagtgttgcgaccctcgagtaacttcatggtctcaccgatccctaccctgtcttcaccagacaacattttctttagcttctcctctgtgtaatcacccttcttcgtcaatcgaccctagagaaaacaacaagttacccatcattaaattcatcgctcttaaaaagagacatttcatcgaacaggtggtgaactgtttcaaaattatttactccggttacggatcttagaaatcagaagatagattatatgttacctgggcaattctgatgtacttggagactaataaatcggattccgagcgaataatcttgggaatacccagaaatgctcctacaccggaagatggagacaccggtggtggctctggaaacgccgaagatgaggctgagaactgtttctgttggaacttcctcgcagcagcagtcgccgttctcaacacctttcccgctttgatcgccatcgacaagcacgactatgcactctctttctctccttcgttatttctactttgcagatctccgttatgagcaaattcttaagtgaaaccaccctaccactattttattcggttatccatttaaccccgtaactttaatctgtatcaattcttacccaaactataaattctgaatttcataaataataacgcagagaatagaaaagatgatttttggtttgtctattaagatatataatgattatgtaatgaaaattctaactgatttatatgaatttcttggtaatggcaaaactcaaggatcagcaaatactaaagtataattatcgaaagacaagtcaaaatgtaagggccttaagggattaagatgattttaatttgcgtgacgctcaagagctacaaacggcgtcgttcttctaattttagattttccacaacttcaaaatctgatttataaaaaagcatattacaatacaaaaaaggtattaatacgatcctttccatccacaccagaaattttatgttttggctaaattactcagctacacctatttttatgataaatgaaagaaagttagtgtcattttttgtccaaacagttcctgagttcgtaacgtatcactaaaaacataggaagaagagaatgcaagctaatagcctattactattagtaatatataccaaaaacaaagagcgtctctgatgatgaaactccaaagattctgtgctgcttcttttgttccatcaacctcaattcaagtacataatctttccctgactacctgcaatacaacaaatctgaaacaaatcagacacaccaaaaaatcccaaagatttagagacggagaaatagtgtcaaggttagtttttataaatttatttacattcttcgtgcatctctctcgctatcactagcatctcatcagcctcttctgccagtttcatcagtctctctatctcttctgcagctcctttcgacacatctaatttgttctctacttctacgagcttataagctgctgttattgaagcttcaacaatctgctgtgaaatagagggtccctgactgtttgtctgctgccgggatttcgtgttgctctcttttggtctcgctacatgtggtgttctttgtaccaagctattatcattcatcttatagaagttctgtgtctgttgtgtatattgttgcattgttgaaggaacaaaacattaaaaaaaaaaaaagcaggaatgaggaaacaacacagaccacaagaaaggttgcacacttgttcaagcaaggctttcaagacttactgattttaagtggctaaccttttcaagctttccctgagctgcaagcctcctcaatcttgaactaagcatcctcctgaaatttggtggcacttcttgtcgttgctgctatacacataccagactattatcatgaacttgatcatgacaggttagctgctaagacaataagaacggatactgaacctaatagagctatgttatctcttaaagataatcatagtggacttctatgcaataactacgatcaatctataacagcaaagaatagttgaatagtataaaactttacattgggagctctaactgatatgaatagagattactcaagtataaaaatagagattactcaagcaatttcaatcttttgataagcaaaagtatctaaaaccaaaggttcattctcatctttaaatggtacaatgattaggtagtttgttcagaatcaaaggtgtttatcaggctcatttagttcgactatgcgttcaacattactgaataagcagcttgcggagtggataagtatttcagtgatgaccaatgtcaggataaagagcactgaaaaatatgtctaacctcaatgaagttgaaaattgcgctgacatcagatccattagcatccgtcaagtttgaaagagcttcaaatatcattccatcataccttaataaaataatggcacatcagaagcgtaacagttgcaagcagactaggaagaaatttacaacaattatgaaccgacacaggattaagtagtggctcggaggagaagaagataaaaaaaaaaaaaaacctgggagcattctttggatcaactacaatgttaaaactatcatcaatgctcaaatcagaagatccacttcggggaagagtagcaactggagaagagtgaccactatgagtaggagttacaatagcggcagcagcagcggcagccagatgaaaagcagcagctttgatttttggtgtccgtatcttatccttagagccttgaataccaggagcaacacttaaattacgccatttatcctagacaatatgatacatcggatgattaagaatcttgttttgtaggtaaccaataatggagacagtgctaattttcaaacccaaaaggtgaaataaacgacgatactaatatttcttcagggaactaatacctatcaatacagccactaaagttaaagtctatgagaaagatcatagaacacagaagtagtcaattttcgaaaagtagaagtaacacatcatatacttcaactccaaacccagctaattaaaatcaccattggggggaaaaaacgaacaaaacgacttactcaattcgtatccgtagcatactcttaaaaatgttctcaaaccaaagcatggaaagaagattatcccaatcataaaaatttcaaatgtctgcaactcaaatacaaaaaatcgaacccaaagattcttgaactaaatccgacgtactcaattaacaaattttccattcccgttgtgccttgaacttgataattagggtttccaatgtttcaacaacagcaataaaaagaggtaattaaaaagaagataaataaaaaccttgaggtcgatgttagagcgactagagagctgctcagctaattcaggatcgcggagaatattcttccactttccagggccatgcttcctaactccggcgagtaacgcctcctcttcctccgccgtccatttgagcttctgatttcccatctctacgcttctattatcgactcttctctccgttcctttacctagcttcgtcgtttttgaatatgtcaatcggtgacaaagaacgtctcgccgccgattcgtcggccgggcttgtcccccaaaaactattgcttctattttttaattcaaagcttcttcccaaatccaaacaaaatctttttctttttcttttatatgtaatgagattaatctacaaagaggttgttatggtaggatttacaatttaagtaccatattatgtaaaacgtcaaacattatagggtctaaaatgaaaaaacgtaaagtcgggaaagaacttgggttaaattattcaaaataaaacataaggggtcaaattcgaattagtcacaaaatcttacataccctaaaacatttcgcctttcttattctgtaccacatcataagctggaggttctctgactccgtcgtctctttctccgtcgccaccgttcctaaaacgtctcccgtcttcttctaatggcgatcaatcgtagctccgatcatgaatccgacgaaaacacccgtctttaccatccttaccagaactaccaggtcccgatcaaatctcagtatctatacaagcttccgacttctccggaatttctattcacggaagagtctctcaagcagcgtcgatcatggggagaaaatctcactttctacacagggacgggttatctagccggctctgtagccggtgcttcagctgggatcttctctggtatcaagagtttcgaaaatggagacacgacgaagctgaaaatcaacaggattttgaattcgtctggtcaggcaggtcgtacttggggtaatagggttgggattgttgggttgatctacgcagggattgagagtggtgtggtggcggtaactgataaggacgatgtttggaccagtgttgtcgctggtctgggaactggagcggtctttagggcagcacgaggagtgagatctgcggctgtggctggtgcttttggcggaattgcggctggtgcagttgtggcggggaagcaggttttcaagcggtatgctcacatatgaagaaccggagtgatctttagagcccacctatatgggaaaatcataaaaatcaaagctttttcgggtttctagggtagaattctggtttacattttagcgtatgttaacctgcgaacctttctttatagatataataataacaataataaaggttttaccttttgatattcgaatctccatgagttattgcttatgatcatgctagcttttgttatatgttgtgcttatttttcacttgtccagaaagcgtgtatgttggtgttgatatcaaaatgactcagaggtgaaatggctttcaatctatcttttatcattttgtaaagagaaatagtttagactgtatgattatgtgattatgtaaagagaaatgactatgtgtctgctatgtatgttgagggctcatttgttaatagttggccatctaatctctactttcttttctaagatttttttaatgcttcttggcttttctagctgttttcttttcttgtttgtgattattcagtgatccggaacgtggtagtatcacacttgatccctagttgtaatcagttttttacctctctggagtttctcttgaagctttttgtctctcatcgtcatctctggaatttctccaggtaacgacttaaacaaaaaattccatgatgtaatgtggatctgttgtgaacttctgcttttgtctcttaagtctcgagtctaagtgttcagcctaagcgcgtatagtcccaaattgacaaagtgccctgtcagctaacattgctggtgcagctccgacaggtattcccttaattctggttttaagaagaactttttttttgtgtgcgactgtttgcatcttctttgcagctaatgctgtcaaaccattttttattcaaagaagactatactctcaaatttcggtttgtagtttcgtagaaaagttttttatgtgctacagatggcattctctatagcaaaagtgactagatgagttgattttgcaagaaggatacaaatcttctataataaatgtgtttcttttcatgagaccaaaaataaagtgtttgataaacaagataggaactccgatacaatggaagttcaacattcaactttggggtggagtacaattcatgagagactgacaacaacttcctttgcattggcttgtttgtgatcatgtaaatcaccttcttgtggtgggtatgggatggcatcggatgcttaaactgaacaagtttatcgcggatctcagagatagccaatgtcgcttcactttgatttacgtcgaagttccaatctttctgtcaataggattttcccaagcatcatcctctgtctacatgattgaaagagaggactcaggaatcaatgaactttattaattttattccttttccaggtgaagattagaaatgtgttattgcagtatctaagaaaccaacctgacaggaagatattggggaaagaggaaccaaattgtgagcacgtgacacatgaaatgttctatcagagttatgtacttcatgatcctctgttgcaaactctcttagcttgctcagtgcaggcaacagaacggaagcaagatcaggtctgtcctttttccgcagctcgcagcactgcaaagccaattgagctagcaccattgtctcttcttcaggccagtctgatatttttggatccaaaacttctcggagtttcttcttctcaattgctttctctactctatggcttaaacccattgctggcatcgctgtgatgatttgcagaagcaccacaccaaatgagtacaagtcagacttcaccccaagcattcccgtttgctggtactcggggtcgatgtaacaaaatgtacctgtctcagcaattggatccatgataggacgttaaaaggagatggaaagttagatttgttgtttaaggtaaaatgaaagtatcattaccggctgcagcagtcatgtgatagttggagaagctatcagcaacagctgcaggtaccaaccgagctaaaccaacgtcactgattttgctagtgaaatgtctgtctatcagaatgtttgctggcttcagatctcgatgtactagcggctcgggtttggcctgatgaaggaaaagaagtcctgtagcaatctcagcagcgattctgaaccgtgctctccaagatagtggtggagtattatctttgcaaaagagacgatcttctaatgttccattttccatgtactcatacaccaggcagccatattcgggacaagcaccgaggaggatcaccatgttagggtgcctcatgcaacttagaacctcgatctagtgaggagacacatatgttaattagtatggagaggacatgcaatacattaggataatgtcggattatattattacctcttggttaaactgcttcaggccttgtgagacatctgacttcaagagtttgatggcaacagaagtgttttcaagaacggctttatacacaggtccataccctccttccccaatctttagagcatctgaaaaaccgtcggtagcaccttcaacatctctgatgctatatcgtctgtaggaaatactatcggccatattctgttccttgaacctggcttgcatctccacaagtcgtctcttctgggtctctatttccgctagacgttgtgccacttcagttgcttggatcgcagtctgtgttttttgcttgtccatctcagacaatgccctaagcatctctcttgctgcctttgcttcctccagcctttcagtttcggcggtagctctaggtcctagaagatgaggggcctacaagcattcattcaatgtctgatattagtcactcatctttgggacctgttcaaggaaacattctcggttgtgctcatggaagtaagtatcttacactttctctggacatggaagcattaaactgctgcaattcgaatctcaatcttctcacttctgcttcaagattttgattctgatcatagtcatgcacaaagaacacaaacatctcagaatcatgcatctgacactcagcataaccgaaacactatatctacttttctgaaacattaattttacctggtgttcagtgatattgcccccagataagctttcctctccatcagttatctcagactacagattcgaaaaaaaaatgtcaacgccaggcaaataggtggtaagaatatcgatttgaaacgtgatgggaatactaaccatggaagagtgtgagcttcctccatatgtggatcgtcctaggatgctgtagaagctagcatttgattcagcactgtgatcgctgggaaattcattactaagctctgacatagaactcctatacaaagatggcttgtaatgaggtgtaggtggagataattctccgttcaatgcaggagatgacctgcaagattggcaaacccaatgactactatgaagcaaaaaaggcattcattcacaagacaaccggataaaatttgagttcattaattaccttccggattcactggaagtggaacttgttgggccaggatcagacatcattgagggatgttttgaaggatgaggagggtgttgaggagcttgaggtgtctgaggaccttgaggcgtgtgaggaccttgaggtgtctgaggccgactcgctgatctgcttgttaagagcttccctttagacacaatgaagacagcacatgtatctggtgttgttttaagcagagtcgttggcacatctacgctcttaaacttcctgattaagaccataaatcacagagagttataggatttagcattcagattaagattacagtttaggttatatgagagaaagaaagagacttgaggaaagaatttcgagcagaggctccaatgactatatttgaaatggaattgttggtgatgtagtcaacaattgcactcgagatgtcaatatcgtgaagaagaacctccgttgctataatctgagagaaaatatataattaatgaggtcggtgagagctatgtgtatatatatatatatatgtgattgttgtaaggagaaagagaggttgatatctgacccctttccgagcacagaatcctctaaagggaaggaagaactgatgcgcctcttcttggttgtcatgtggtgcttctgtgttttctcctgccccaaatcctgtttcaagagttttcattagattgatggattgataacaatgatgatgatgatgatgatgccattacgtactcagtttggtttgaacatggagaaggatacagtttggagaatcgatgatgatattctcaacagcccatttcaaagcgtgttggctgttcttatctttatcaatggctatggcggtaactgctttgctgtcttttcctttgagtcttcttgcagccattgtttctcagccctcgagatgattgctggaaacttttgcttctggagaaactagaaagacattgtggtacggtctttcaattaccctcagaaggaggaaataaggagaccgaatgataatgaaaatgataacaaggaattaagaagagaagaggagaggagagctgttttgtttgttgagaaaatttaaacttataatggttttggcactttgctaaaattagaaggtttttcttttctccaacaatctaaacagtcataacgaacagagaggcagacaaaaagaggatttttttaattttagttgacgacttatctttaaaggatattccatatcatatcttgtagacaaaaagaggattttttatttttagatttgtgtaatggcatcttatattgatatatatgtaaactagataaatttggaattataggcagtcttgatcttttagaagaaagaagaagaccatgaggaaatccaaaggttgaaattagttttataattgtttcgacgaacgtgttaaatatcttggggtaacctgtttggttttgaaagggcaaaagggtttgagtttgaaggactttgtcttttgtgtgtgattcatgtcgctgatgaggaggacctttgatatttcaaagaaaccatatggagtatataatatatagctaataatgattttcgtataacaaacagccgtgtacaagcgagtgtggaatttaataatagttgtggacgctacaatggaagtggaatagaggatcatgggcgagttcttgctacgtccattatcctgaatgatgatgcggttcccacaacacaagtccttattactacaagtcatcatgataatgtagcaaagaggaaggaggtggagtgtctatgagctagagtgtatacctctttggggcactgtgtcaatctgcggtgaaatggaggatgctgttagagctttatctcatttttcaaactacctatcagaatgcttatgtgtgatcatgaagggataataagtccaacgctcacatgtctcactagtcacttcttcggaatttatgatggccacagaagaagcagacctgtttctggttctgtttcttctgatgataggatggttcttcaggctgtttcccctgagaccgtcggatcaactgctgttgttgctttggtttgctcatcacatatcatagtttccaactgtggtggttcaagagtggttttactccgcggcaaagaatccatgcctttatcagttgatcagaaagtataaaagctgagacagagctaatgaagtttcttaccttaatgtaaacaagtggacgctagagcccatataagtgacgctgactgggccttaatgtaggcccatttcaaactttggtctccgagaaaagtctttcgttgtctattttttaaccacgttatgataacactacatgtgtcatgagatgcatgaacatatgtcatgaacatactttcaatcttggatcaaaaaactaaattagaagaataaacagaagacttgacctttaagagggaaggacacgcgtcatctatgttgccattattgaatagattaataaattagttttataattgattggagcaacgtgttaataatgaaggtcgttgtcacataaagaaacttgggattccgtggagtgcttataatttttctaattttattttttgggtaaaaacctcattagatccaggagaacccatgtttcgtttcgttttggaaagataagagagataaaggtttcgacttttttaggtttttctgtgtgttttgtgattcatttcgctgattgatatcaattctctctgtttgttgtcccttctcttcaatttcacctgacttttgtttttgttttggataaagttttcacctttgtgtcttctctctgctctcttgtgtgatctatctgaaaaaggctgattttttttttgtgggtttctaaattagggtttgtgtgagtttattgtctttctgattcgatgaagatcaagagttatagaggatcgttagagtgatcaaaatcccacgaattcacaaaggatccgtcttcatagatccgtcagatctgttcagcggaggtacatacttcttcgtcattcactgctttctggattagttggtgagaataaacggctggtgggtctcggtgggaagctgaattggatgtagagttcatcagactatagcttagagaagaaaatgaagttttttgaatcgttttgctccagttgaggtttggaagctgcataccagctcatggaagagatttcacctgcagttgcacttactttgggtttagctaatacgatgtgtgactctggaatctcatctactttcgatatctccgagctggagaatgttactgatgcagctgacatgttgtgtaatcagaaaagacaaagatatagtaatggagtggtggattgtattatgggaagtgtttcagaagagaagactttatctgaagtgagaagtttgtcttctgattttagtgtaactgtccaggaatcagaagaagatgagccattagtatctgatgcgactattattagcgaaggtttaatagttgtggacgctaggtctgagataagtttgccagatacagttgaaactgataacgggcgagttcttgctacggccattatcctaaacgagacaaccatagaacaggttcccactgcagaagtccttattgcgagtctgaatcacgatgtgaatatggaggtggcaacttctgaggtagtcattaggttacctgaagaaaatcctaatgtagcaagaggaagcaggagtgtttatgaactagagtgtatacctctttggggcacgatttcaatttgcggtggaagatctgaaatggaggatgctgttagagctttacctcattttctcaaaatacccatcaaaatgcttatgggggatcatgaagggatgagtccaagtctcccatatctcactagtcacttctttggtgtatatgatggccacggaggcgctcaggtatgctgtagttcgtaaatccttatactgattttagcagtagaaagttaattcaactatgaacccggaagatacatgagtttatgttttgttgacgtaggttgtatgtatatatgataaagggtttgctggaaacgggattctttgcaggttgttatgtaatatatgacggctttggtggaaatcggattcttgcaggttgctgactattgccatgatagaatccactctgctttggctgaagaaatcgaacggattaaagaggaattgtgtaggaggaacactggcgagggtaggcaggtccagtgggagaaagtctttgtagattgttacctaaaagtcgatgatgaggttaaagggaaaatcaacagacctgttgttggttcttctgataggatggttcttgaagctgtttcccctgaaaccgttggatcgactgctgtggttgctttggtttgttcatcgcatataatagtctcaaactgtggtgactcaagagcagttttactccgaggcaaagactccatgcctttatcagttgatcacaaagtaaaaaatcttctctttccctctaaaataatttaacacaatctgagaaagtttcttatttctaattcatgaaatttcttaccctttctctgcagccagatagagaggatgagtatgcacgaatagagaaagctggaggaaaagttatacaatggcaaggcgctcgtgtttctggcgttcttgccatgtccaggtccatcggtaggtcaaacttgcacttatgtcttccatcttgcctagtgacagaaatatgaagagagttttataggtcaaaattatcgataaattaaacattcagtaaccttatttagagatgaggatcattactacctgttacagtctctgcaaaatcatgagatctcctgaaagtgggtttcaatctgcatcgttttcaggtgatcaatatctggagccatttgtaataccagatcccgaagtgacgtttatgccacgagctagagaagacgagtgtctaatattggccagtgatggactttgggacgtaatgagtaaccaagaagcttgcgattttgcgaggaggcggatcttggcttggcacaagaagaatggagcattgcctttagctgagagaggtgtaggagaagaccaagcgtgtcaagctgcggctgaatatctctccaaactcgctattcaaatgggaagcaaagacaatatctcaatcatagtgatcgacttgaaagctcaaagaaagttcaagaccagatcttgaaacagtgtatgctcgagctcttacactattataattttattatttcttatttattgaaaaaatttccacaagtttacataaaaataagaagtgaaatgttggggggaagaagaattaagaccttgatgcatagctgaagtccattcctttttctcatggacttgaatgtgtatgtttgttatgtataagaagaatagagaagaaatgtttttactttggagtcttgtaggtggatatgttgttgtaatattggagatgtggcttaaggaattgtaactgaaatttatgtcacattcaccttaatacttttctgtaatctattatatataaatacttgttgtgaaagagttattattgtcttttctattgttattgttatacaacaggtaatattgattccaaagtgtttaatgagggatgctgtatcaaacatgaaaactaagtgaagggtttggagaaggatggttgtttaaagctatttcccctgctttttttactaagagagtagagtttaacaattaaaagaaacctaaataagagatcataattggtacgttaaggtttcataattcattagaattaacaaaaataatgagttggatagttgaagaatcaacagaaacccaagtgatgaatggatcaaagagagtcacataaaggagatcataactgatgttttagtgtggtgtattgtctcaaacaatgtgctgagccaaagaaaggatcttgagctgtttcctgaggcgcatctcgtgcgggacaggaccaaacactcgggtaccagtcggttggttgtactccattttcctcttggaaccatgtgaattattctgccctttcttttccttaatgccaacaactacaatggcattgtcatcaaacttgacttggcttccatcagcacgtcctttaggcatcgcagcacgcacaaccacaccgtacacgaccatccctttcttcactttaccttttgggatagcgtctttctttacttttttttgaacaattgggttagcttctttcactgaaccaacaatgatatcgccaagtcttgctcctttcttacctctcagggattgaatgcacatcacctctttagcacacgagttatccacgcatttgagaatcgtccccatttgaatgaatgtcctatgttgttgctgtgaattggaaatcatcaggacacacaattcacaggttataccccacgaatgcatatgaagaaagtttcatcaaggacgtatatttgcgaaaagaggcttgacctgagagaggatgcttccattcatcattccattggaggaggaattcatcaaaccagagaaagcattgcaaagacctccaagcaatgaacgtcctactcatattgtcgatgaatcatataacgacatcaccaacaattagtgacattcacaacaagaacaaaaaagttttaatcttgagtctgcatttcatgaaccaaagcaaagtccatgacatatcacaaacccaaaaactcaaagctcatttcgaaacttatactaaatcaatgttgcaaaaaatctaatttttaaagaaccaaactttatcgaatataataatattaagagatgaaaatgtacctttggagagcttggaagctaaagctgtcgccatttctgcaattcaaaagtttcgatctttagtgtcgcagagagtgaatgaatcttgcgattgcacaaagacaccagatttagggtttaacgtcacacactcgctgtcgcagcgatcatttgggcttgtaatgattttactcatggattaaattatatagtaaaaaagtggtgacgttgtcaaaagtaggcgtgccggagtggttatcgggcatgactagaaatcatgtgggctttgcccgcgcaggttcgaatcctgccgcctacgtttttccttttttttcgtatttaccttattttcctacattttaaaaccaggggccataacattttttccacatgtactataacatttgtttatcacaaaatctgaaattcttaattaacaaaaataaacaatggtgatgccctaataacaaacatttctttcttctttttttttgctacgaactttttacttttgttgattgttcatgcatttacaaagacaaaatccaaagtttcttaatgttatgaaaaattcctaaatcaagaagttaaacggctgagaagaggttgatcaagtggaacaattcaccgatgccgtccattttgaagctagcactgggacccactagtaatctgtatcagacaagagacaaaataaaaccccccaaatggcttctccaagcggagctccaacgaaacgcctttttttttgaaactctccaccgcgataagagagagagattaccaaattctcaccggagaagaaaaaagggctttcctttcctgagatttccggtgaaaagtcattgactttatcactctcaagtctctccacaagttgattgattctgctctaatctcctcatctggggtctttcccctcttgctattcaaatggtaaattcaaatatatctctataccattttatgtttctaagagatatctcggtctctttgctcaactgtttatttgaaaactgaaaaccttgcttgtttgtttcgttaatgttgttgttgcgtttgcttgctttacccctttttgtttcctgtatggagacgctaattcttgatctatggttgtttttacttctgaaaggttttggtttgactatgtctagctcagttctagaagcttgctctttgcctgaattaaaatctcgtttatataattttgcctaaagctgtaaaatagatgttatgtgccccttgaacctgtaaactcttttagaggcaatgtatgtttttgatgttgttaaatgaaatgcaatggttgcaggctgctccagtcataattgtgggttcacatgtgtgggttgaagatccacatttggcatggatagatggagaagttactcgaatagatggtataaacgttcatgtcaaaaccaagaaggggaaaaccgtaagtttctataaggttacatctttattattttacttcaatcaatgagcttgtacgtggcctcgacctttgggtttaggctaaaaaagagtaggaataagtccgttgataaatttagatgtcgattaatgttacgttttatcttggaatgggatactgtcatagtcccgttatatccctagatcggcaggtttttaccttctgcattcaaggtagatgtaggttattgtgcttttagtgttttgatcaaaccaagtaacataataaatagagaaaaataccttcaaagaacgtttttggtatttactgaatgtcttaaggcaagtttatactcagaaatatggagtgcataaaatgaagctttcaggctttctagtcggcagttatcttgatatgttgtgagagctaattttattgaaaccgttacacgtgatagggaaacagcttaatgtgataagatgcagcatgagacgtaaaaacatgatttacgttgtcattttatatgttgttgcacatgatatattttcatgataagttctttgctgtcaagtatagatgttcacacttccttgttggccatggttctcctcacatatccccatgttgtatggatttcaggttgtgacaaacgtatattttcccaaggatactgaagctccatctggaggtgtagatgacatgacaaaactttcatacttgcatgagcctggagtcttacgaaaccttgagacaagatatgaacttaatgaaatatacgtaagatattttatcctttttttctaacatctcttactttttgttgctgcaaaggaaatcatttggtataagctatgatactaataagttttgtgttacttctgtagacatatacagggaatatcctaattgcagttaatccattccaaaggctgcctcatatttatgaaactgatatgatggaacaatataagggaattgcacttggagaactaagtcctcatgtttttgcaattggggatgctgcatacaggtttgtgcatgttcacgtccatcaatttatcgtacttctatctatttcgtgagataatttactgatttggtcacggtgtaagttattagggcaatgattaatgaagggaaaaacaattcgattttggtaagtggagaaagtggtgctggtaaaaccgagacgacaaagatgctcatgaggtaccttgcctttttgggagggaggtctggtgtagaaggaaggacagttgaacagcaagtcttagaggtttgtttatttttttcatgaaaaatgaggatgattccatatatggctgtatacagcttaatgtgtatatccccaatggcacattgcagtctaatccagttctcgaagcatttggcaatgcaaaaactttacggaacaacaattcaaggtacgttcttcatctttccaaatctggggcttatcagctaagttcattaattagaaacagttcatactaggatttattcttaaatgcttggttcctaagtttttttttttaatgttgttaattgttcttccgattatgccttaagaaaatcgtattcattgttacttgacctttttcattcttcttgatgttacccacctcgcagtcgttttggtaaatttgttgaaatccaatttgacaagaatggaaggatatctggggcagctattaggacttatctgctggagaggtcccgtgtttgccaaatctcagatcccgaaaggaattaccattgcttttatcttctttgtgctgctccgccggaggtatcttataatttgttttcttctaattgacacattaagtgcatgtcatccgatgctgatatcatactcatttttttttcttctattttcgggtttattttgcaggatataaagaagtacaagctggaaaacccacataaatttcattatctaaatcagtcaagttgctataagttggatggtgttgatgatgctagtgaataccttgaaaccagacgagctatggatgtagttggaatcagtaacgaagaacaggtcctgaaactaatgtgttaaagaggtcaggtttccgttctgctactttcatgttagagtctgacatccaaagtaatttatttacaggaggcaatcttcagggtggttgctgcaattcttcatcttggtaacattgattttggaaagggggaagagatagattcatctgtcatcaaggataaagattcccgaagtcatcttaatatggcggcagagttacttatgtatggtcctttttcttactatatttgaatctgtttatccattttcgttttagtggattatatattcgtagtaaatgctgttttttatattgtgcacttgttttgacaggtgtaacgcccagagcctagaagatgctcttattaggcgtgtgatggttacacctgaagagattatcacgagaactcttgatcccgataatgcaattgcgagtagggataccctggccaagacaatatactctcacttgtttgactggtgaagctatttaagcgaacttcctcttccatttcctcatctcgcatttttatatatatttgcataatacattttattctatcatttacaggattgtgaacaaaattaatacctccatcgggcaggacccacggtcaaagtcgattattggagttctggatatctatgggtttgaaagtttcaaatgcaataggtactgttatacgtaaaacattctttgttatcacctttaccccatttcattccaggggtgcatggaagaccaatctagacatgcttggatagctttaaaagaataattccttgtcatcttctgctatttcaactgaaagttaccaatgtctctatatcttctgcagcgtctcagagtattaagtgggtgttaaatatagtttcatataatgtgtcaagatgttgaaggaaattgctaaccgtggaaagttagtagatttatctgttatcgaagagttgtagttgatcttttgtttggcttatgatacagttttgagcaattctgcatcaatttcacgaatgaaaaactgcaacagcattttaatcaggttagtcgtttactcatgtttatattgatcagcgcttttgcttttggataagtagattggacttatttctggtatcactcttttgcagcatgtcttcaaaatggagcaggaagagtacaccaaagaagagattgcttggagttacatagagtttattgataaccaagatgttcttgagttaattgaaaaagtatgtttctccttataatttaagagacttacattccagtttgtgatatttattgcttgatgataaccatatttaggtttaggagcagagatcttgtttactgcacaattgtcttatgctttcccttttcttatgttaaaattgcgtgtcttcaatcagaaaccaggagggattatttcacttctagatgaagcctggtatgctttatctttctcagattaacttgcatgcctttctcatagtactatccgttcatgtattttggttgattcaactcagtatgtttcccaagtctacacatgaaaccttctcccaaaagttgttccagacgtttaaagaacacgagagatttgccaaaccgaagctctcgcgcactgattttaccatatcgcattatgcaggagaggtacagtattgcttcttcatatttgtctatttctaaatgaattgaagttgaagctttctgttcttgatgtgtatcctacatttgcaaggttacttatcaatcaaaccatttcatcgacaagaacaaagattatatagttgctgaacatcaagcactatttactgcatctaattgcaagtttgtggcgggtttgttccatgcgcttcatgaagactcatccaggtcatcaaaattttcttccattgggtcacggttcaaggtattgcatgtaaaattgctagttatgcactgcaagttttgaaaggaagtttattgatatcacttatctatgttgcagcaacaacttcactcgctgatggaatcactgaatggtacagaacctcattacatcagatgtataaagccgaacaatgttcttaaacctggtatctttgagaatttcaacgtcattcatcaattacgttgtggggtaaggatgtcctgtctaaatctaacgggtgtatctacatctcttattagacctagaatacactttcccgtttgtattaatattaaacgattagtgcgataaccaacgcagtttttgaataacatactaaaatacgacgtttctttatatgcttactattcagtaaatgtcgtatcttcccagaaaataacaattagtttcatttgcagggtgttcttgaggccattcggatcagttgcgctggctatcctaccaggcttgccttctatgactttctcgatcgttttggtctccttgctccagaagttttggaaggaaagtaagtctctctctgaggtttctgcatctctatgaaaacacttttgtcgaaacaaacatcagtttaataagcaattctatcacaccttcttttacagttatgatgataaagtagcttgccaaatgattcttgataagaaaagtctgacggactaccaggtgtgatatgcattttcattctggtttgttgctttctttcaaagttgttttcttaccaaattcatggataattttagcgtcatggtcatgatccccgatgggatcatccacaagaaaaaaaaatctcccttccttgttccatcattctcactatcggcattttcagtatttgttcatgtatcatatacgtacctttaccatgttgttcccagataggaaagacaaagattttccttcgagctggtcagatggctgaactagatgcgaggagagcagaggtgcttgggaatgctgccagagtcattcagaggcaattccgcacatgtatggctagaaagaattaccgttctattcgcaatgctgcaattgttttgcaatccttcctacgaggtattttctgcactcagtaaggtttctccatggcgtatgctgttcagtcagaattatagtgcatacccatccttttctcatcgcatcctattgttttcatcatttggagcttaaccatttcttctttaccagatggttgttttctggtttgatcatctgttctccttttctatgcttggttaattgcaggcgaaattgcccgggcagtgcacaagaaactgagaatagaagctgcagctctaagagtccagaagaatttccgccggtacgttgacaggaaatcttttgtcaccacaagatcatctacaatcgtgttgcagactggcttaagggccatgattgcacgtagtgaattcaggctaagaaggcaaagaaaagccgccattgtacttcaggtagatcacagtttccttgttactgggagggaactagacaaccttcttaggacagaaataggaaaactttgttaactgttctctttgatggataaaaaattcccctttttcaggctcattggcgtggtcgccaagcattctcatattacacaagacttcagaaggcggcaatagtcacacaatgtgcctggagatgcagacttgctagaagagagcttagaatgctgaaaatggttggattccttgctttatgacttttcattgcgttctaacacagtgtgcatgaattttcttattcagctgtttacttccatatgtacattgatgtaggctgcaagagacaccggtgctcttaaagatgctaagaataaattggagcagcgggtagaagagctttccttgcgtttgcatttggagaagcggttaagggtaacttagatgtcaattttctttggaaatatctttaggttaaaccaatttggagattgtggtcttcaaagtcagttgcaaattttggattatattgttatctttttactgataaacagactgatcttgaggaggcaaaggtgcaagaagttgcaaagctgcaagaggcattgcataccatgcggttacaattgaaagaaactactgcaatggtcgtaaaggaacaggaggcggctcgagtagcaattgaagaagcaagttcagttaataaggaacctgttgttgttgaagatacagagaagatcgattctttgagcaacgaaattgacaggctaaaggtaaaaactgacatattttaatccaaataaaataggttcaagatgacaagatgtaattgtttctacaccatagatgtgtaaatttaataatgagatttttttctgtttctggatttaaaaaagataatgctttatgtgaaagtctccattatttgattgttcatgccactgatctacaatctcgacatggtcctaatgcagggactgttgtcatcagaaacacataaggcagatgaagcacagcatgcttatcagagtgccttggtccaaaatgaggaattatgtaagaaacttgaagaagctggaagaaaaatagatcagctccaagattctgttcagaggtttgtattcatttgcaaatttgagatcatgatgcatttgtttttccatgtgagacttttatctttctttatacaaatattttccccttgaaaataaatttttacgttctcaggtcatgcatttagaggtttaattagtatcagatattgcatttagggcccagttttttctctgaaataagacgactaacaatatccacttcctatatattagattccaagaaaaagtctttagcttggagtcagagaataaagtactccggcaacaaactcttaccatctcaccgactactagagctttggccctaagaccaaaaactaccataatccaggtactggtggacaccggctatgtctttacattgaatttcttaaccgtgaacatgacctttttgatatttccgtggaatttcagagaactccggagaaggatactttctccaatggagaaacaacacaacttcaggtatgttgataaacaaaatcagccccttgtgtaattaccatttacattgatggagatctaatatttaatgatatgctccaggaacctgaaactgaggataggccccagaaatcgcttaatcagaaacagcaggtagctatcactttgaagccttgtcacatatttcacttgcgggcataatatgttctgtttttttgtcagtatgcattttgcatactcattatgttcggtttttcatcttgcaggaaaatcaagagctgttactaaaatctatttcggaagatataggattttctgaaggcaagcctgttgctgcctgtctgatatacaagtgtctgatacactggagatcttttgaagtagaaagaaccagtatatttaatcgtataatcgagacaatagcatctgccattgaggtagttttgatgttctttcataccaacacaaatgttctttcctgctccatgggtagtctcatgctaaatttacatctttgcagatgcaggaaaacagcgatgtactatgctattggttatccaattccgccacattattaatgtttcttcaacgcactctgaaagccggtgctacaggaagcataactactcccagacgtcggggaatgccttcatctttgtttggacgggtatctcaggtagttagaagtgtttacgtgtctctcaagaatgctttgattccattaatctcacttttctcatgaaattacttgtataatagagtttccgaggttctccacaaagtgctggattcccatttatgactggaagggcaattggcggtgggctagacgaactacgtcaagttgaagctaaatatcctgctttgctttttaagcagcaactcacagctttcctagaaaagatatatggaatgatccgtgacaagatgaagaaagagatttcccctctgcttgcttcttgcattcaggtagacattcttttgaattgccttttgttccacagaaaataatcgttgatatattattgtggtattaaagcccctgagtctggttctggttttgtggtttgatgaaaacaggttccaaggacaccgcggtctggtttagtaaaaggacgttcacaaaatacacaaaataatgttgttgctccaaaaccgatgattgctcattggcaaaacattgttacttgtctaaacggccacttgaggactatgagggccaattatgtgagtgaaataaactataaattccgccaaagctgaaataaagtttattttcaacttcttttttctttcttcttacaaattttgaacctatccaaaactgcaggtgccttccttgctaatttctaaagtgttcgggcagatattttcatttatcaatgttcagctgtttaacaggtaattctgatatggttgcaactgtcaagtcgctatataatacagatccgcttatgtttttcccgtttaatcaaccgtgtagccttcttttaagacgtgaatgctgctcgtttagcaatggagagtatgtaaaaacagggcttgctgagctggaaaagtggtgccatgatgcaacggaggaggtaatagatgtttcaaatcctctctggagttttcggacagttagcttattagaagatgctttttttgttgtgttctagtttgttggttcggcttgggatgaactaaagcacattagacaagctgttggcttcttggttatacatcagaagcctaagaagagcttaaaagagataactactgaactttgtccggttagttcaacgttttgaatttgtctcttcatttgttcgtctcatgtaaatctaacgaaattttgtatttctctgcaggtgcttagcattcagcaactgtataggatcagtacaatgtattgggacgacaaatacggtacacatagcgtatctacagaggcaagtgaatatttctactcttgctttcacattcgtgtgattgatggacccactcgaccaaaccgttaacattagtcttatcctgagctatgttttaagaaaatccaacattacctagaattgaaataaaaatgttcctcgcttgacacaagaatggtgatgcaggtgatagcaaccatgcgggcagaggtgtcagatgtatcaaagagcgcgatcagcaattcatttttactagacgacgattcgaggtaaacccttgaaagaaacattaacaaaacaaatcactttttagaagattgatattttgataaaaaaaattatgtgtcttggtttgattgctttttgcagcatcccattctcgcttgacgatatctccaaatcgatgcaaaacgtagaggttgcagaggttgatcctcctccgttgatccgccaaaactccaacttcatgttcttgttggaaaggtcagattgaagtagtcaaagttccctatacccgatcgatcgctaggacattttcagattaggagatcagtattgtgctttcaaaaacaaagcctgtacattagtacatatgcctatctttgccagtggctttctggtactgttctactattaataggggtatattgggtaggaaaaaatatatatatgtgaactaaatatttgttgtgtccatgcgttgataggccatttgcttaatgaattttactttgtttatcatttttcaaattattagtttttttttttgtcactattgttctttattgactgatccaaacaagtttacaaggccaaagttgaagcccaaaattgaagcccaaagtattacatcaaggaaaagatcaaaagaaggataactcttgcgttagttaatgtgtcaacaacatcgacacgtggtgaaaacgtgttgcaaaagaaacattgcaatttcccgtcatcctttacagtctagtctttagttatgtttgtatgtttttggaaacatatctgtgttaagagatattccctttgtgtataaatacactgctagtgattgtaactcgggggtactcagacagaaaagcgtttagggaacatttgttcaaggtgttactgccgccattgctggtagtgtctccgctttgattacagtgacataattaaagactagactgcaggttctaaatgtggaagatagtaatagtagtagtagtaacgataggaactgcagtctgactatctacagacggttagaaacttggtcggggaaggtggttggacggcttgttacagaggattgggaccaagctgcgcttctagtcaatgtgttctatgactatgatatatgatataaacaacaccggaatggagtgtatgaatctggtttagctttactaactatgaataagcaaagagcagagacttatcggttatcagatttacatttacattcatcactccaatccaatcactgacttaacacacgatgatccatggtacaaacgacagacgaaaagtaaagagttgaagcttgaaggtttttggtcattcaaatgatatctggacaaagcgtgtgaaataagaactagctaataagcgaagtagcagccaaggatgacttccctttttttgtaggaacgtacacattaccagattccaccggctcagatatggacagagaaatggtgtgtgttcctacctccatgcatgtcatttgattgaccatgaacatacattgttgggtttgtctgagatgggcaatctgatatcagaaattcagagtgtccaaagagattaacgctgtcagaagcagatgtgatgtcagagcgagaagtggttgaacaatcacagtcattgctgttctgcaactgataaagcacaaatcttgacatgtttcccgttgcgtgttgctgttggattggcatgtcttgttttggatctgtagattcttgaagctttttggtgtttaggaatcttccaccagatcctctaggtcgtttaagagcgtgaacatgtcgagattcatgaagatacggctgtatgatatttgataatgagttatgtttagtcattaaaccaaagtaagataccgaaacgctgaccaaaatactataccttacgggctttgattagtttgttttgcgcctctagcttagcacgctgttgcctcctcctcataattgcatggaattgctttgcattgacaaagacaggctcattctctatgagatcgaatggtagcggaactcgagtcatttggggattccatatctgcagaaagtttttaagcaaactgaaatctcaaatggagaaataaattgcaagactaattcaccatttaaggatggcatttctttctatagctgtatatgtaactacttcagagcataatgttacataacaagtccaccttaagtaaaaatgaggtttagcataaatattctcctcaccatatgtaatcaaggaggatatacttactgttgcctgtggtaggtaagccgcaggcattaaaccaccaaaatgtggatcggcatagtgaaatgagaagttagcctgaaaccagagtataacacaagatgtcagtaaacaatcacaagtactgcttatcgtcactcgtagtagatatacgggtaccttggaaggagaagagtgaatatcagcgattcctgccgtggaggagcctgatttaattgcaaatcgcttcctttgagtttcttcaaatcctttacaaacatctgaaagaaagagagcgaaagataacattttcaggacaaagggatggattctttcgtaaatgggaccaaagatcaagctaaaacaccatgcgtcttcaacataatagatcatagtgagttgtctagaacccaaagttgtttaaaacggacctgaatgtgctaaaaatgagatttgtcttgaggggttatcatctccactacttgtaacatcgttagaagattgagcagaggacagagttgaagatgaatcctggtcctggaaactgatattctttgtgtttataagacgttctggtcttgcatctaccaccttcaaactcagtgattcagtcacaccattggatttggttggaagtccccatgagatggaagtactaaggtatggtggagttgaatgtgccacagagctagtaaatgaaactttcttatccatgtgactcagaggcaacaattagctctctctctctctgcttcaacagagaagattgatgatacatgtgtctgtcaaagaagctccaaattcagaacatctttataaatgataaaactttcaaaagatatttattcctggaaacagcaaaacctttgacgatgtagtagacaaagaaggggataatccaaaaagggaaaaaaacccagaaacagagcaacattcagaactatttcgggcaaactattagaagagcgcggcagaaaaaaaagtaaagttccgaccaactaaaatcagcaccattactttcgtcctaaaaggcgttgacttgggaagaaatttccagaagatttccgaatcagcacatcactctaaaaaaaagcgaagaaatgacggattcaaagagaaggagatagagagaccttacggattcaaggaagagatgaagaacaggaactcaagggatgcctatcaaaacaaagtaaatctcttttctcttttgcttattctctcagatagatactcaacagtgtgtatgtgtgtgtgtgtattcttttgatgcttcatttccgtcactcacaattttctctcttataaagtcattacctttccaacaaaatcaccagctccattattagcagtaccgccaccttcattagtatttttaatgcttaattaatatattagttttctaatcttattgacttattattttgttcacttaacaaagtaaacacttatctagttatctgcctatccactttacaaagtaaaactatcgtcaaaagcctaatctagtgagcaactatatggcagctgaagcatctaaagcaaagctaatctgcctactctttgtgtttatggacaaaatcttgaagcgttctttggatatagtggaactcagttccaaaatgcgagtggaaaagagagagagaagcagaagcaagggagacttgaaatgtagtaagtttgttactacctggtaaattacagaagaaagcacacagtttaagtcttgaggaagctgttgctgagtcttgagtttcacttgaaaacacgcaggagtaaaatcacaagagcagccactagcgtgatgcagatagggatgcctacatacataaccgcatgtgtgatcttgggaaggcggatggtttggcgatttcttgtggcttgagttttcagtacataactcgacatctcagtttcttggaagtagtcatttcgtgtatgtgcctataaaagaagggagatgataaagggtaactacatcaatcatagtagagacggatcaagagccaagtattcacctccttgtttggtatgtcctcaaaatgttctgcagaaccagcttcgagagaatcacagccgtgtgcatcgagaaattggagagacaagggaagtttttccaccgatttgagtttcttgcagttattgaggcaaagtgttaccaatgaggtaagatctctgatgcttgatggcaatgtctcaaaatcatggttgctgagatctaaacatgtcaacttggtgaaatgactaagctgatctgacaatgattcaacactcttgcaattttcaaggcaaagctcaagcaaacagtatcttccctcatcttgacttgtgttagatagtttcgccaatgatctaaggttcctacagttggtaagtgtaagtgtctgcacctgagttagctttggcaactcctggagcttaaagcagttttgaagccagagagtttttaaccgggaaaggctactcatagcttctggtaagttctcaaaatcatttccgctgaggtccagcttctctagtaaatccaggtgacaaatcccagatgggattttcctgatgtttaagttcactagttttagctctttcaggtcgggaaaatctggaaagacgtcaaaggagaaagattcaccgttttctttgtggctgaacctcatgatgcggagggaattgaatctgttgcactctgagatgacccaaggtgcttgttgcagactcatcgccgatataatgggtatctgttgctcagaattaaaagagacgtattcagcatatcctctaaattttgaacgaaactcaaaagtaatgtctcccccaatcgatatgtttataagtgcatccattttcacttttgcgtctgggaactccaatccaatatgttgctgccttgtagattttcgtagaaaaaaccgcagggcacttctacgccctccacggtaggatagcttaagcttctttaaggtagacctttttccaatacactctggaatgccctccagtctcgtgcattgttccagaagcaattcctcaagactcgtgatacttgaaagatctggaagttgcttgagatgcttagatcccgtcacatctagtctcttcaaactcttcaacatctgagcaagatacaacaacacatggaaatagttggaattatgtttctcgcaaggattctctgttttcacaccattgctctatcaaaaacacaaacacaagatgcagaatcatagaaaagattaccggtgttccactccagagagtttctaaatcactgtgacgcagattgagttcaacaagaaaacatggatcagaaccggaaggcagggctctcaatggaaatgcatcccaatggaatagccgtaggctacgaggcaggaacggttggtctggaatgagttgcagattcgactctctgtaatctacatgcttgtaaaccttgagaaacttgagattatgcatacggccaacaacactggcctccatggataacacacaggtcatatcacacgtgtgtaggcacatgcattcagtttgttctcctccctgatgataagaagacaaaagaaacacaaagccagaaactcgtcaggtcaggatgcatgaaaatttaaaagaatagatcaaagatgatatagatgcttacgtctctgaaagccagggcaacgcgaatttccataggatccctgaggaactttcgagccaaagacatgtcgtcgcggataatttctcttcccatttgttcgaccaacttgtgcatgataacagatccattagttgatattttgatgagagatttctctgctaaaactcttatccacaggctgctctgaggtatggggccatgaagaagggaagtgattcgctggagagtgtctccattgaagagacagacaacatgaaggaatacattctgatgtggttttggtaagccctcgtagctaattttcaagatttccattatattctcgtcaagactgctttcaagtgcacccagtgcttcttcccactcctcaggactcgctgtccttccacggagaaataatgcataggcttgaatggcagaaggaagcccgtgagcaagcttagaagctcggattgagagttggtcaaaaccctcacaaggaggaagtcctccttcaaaagcaatctgtttaaacatctggagggcatccttatcatccaagcacttaacctcataaacgacttctactccacaggtattgagcaagcccatatctcgagtggttatgataattcggctcccaggaccaaaccagtttttctcttttgccaaagcatgcacctgcgccactttatccacaccatcaagcacaagaaaaaccttttgattcccaagtctcttttttatctcttggcatccagcttccacgctccataacctaatatcatcacagaggatactggagagcaattctttttgcaaatgctttagatcatggccattgtctttactaacactcttaatgttttctatgaaacaatgagctggaaatttaggtgagagctggtcatagagacacttaacaatggaggttttcccaattcctcccattccccagattcctaccaggagaacctcattggattcctgatccaagagatgattaagaccttccatgtgagctttcatcccaacaatatttccagagtctattttatgcatcaatgtcacacgtcttgaaatatctctagcaatttctccaaccattatagcctcatcaacactaataatattgaaattgagcaggaaaattataattcaactttccagtgtgctgctaaacaaagtgataaatgtgtgtaaacaagaaaacgaggcttaccagtggcttgaaaccacgcctgaaagattggcgattaggttaagagcttctctccacctgagaaccttatccaccatttcaagaccttggtactttactaaagagaaacttcctagctgatgcctcaccacggaaggatctactccatagaagatgggaaagacttcaagtcttccctccttcataagctccattatcagttgaagttccaataagcaccatctcgaagtagcgtagttctcggagagaacaacaacagcgaaactcgaactccctagtgctctgtggagttcatcggaaatgtgatcgcctatctcaagcctttggtcatctttgaaagtaacaatgcctctgctatcaagtgctgcatataaatgactgacgatggttttgcgggtgtcttctccacggaagctgaggaagacgtcgtacttcgatacacgaggtgcagaggaggacaccattgttgaaaaatcaatcaaggtcgtctaaaaggtttgttctctggagttttatgcattaaggacgacttgttgaacaacatcatcttcttttcttttcggggaaattgcacaagtaggaaaatgtggaacttttgtgctcatttaaatctagtggttgacggactttacagctttacagtgacaagtcaacgctaaatggcctggtaccttatcttcatttccttcaaatggtatagaatgcacacacacactgacacaaaaaaaaaaagaaatatactttgtaatctttgtttatttagttgctgctaaaacaaaaaagtgaatgtctacttcttattcttttttgttggctggaagagagttggatgtgttcttgagtttcagcggtaagatagctcttgacgttgattttggttatgatttgtcacgaaatggtatcaaagcttttaaatccgaaagctggaaggagagtagcttcaaaccaattgatctacgaacgcttgaggctttgacagagtccaaagttgcagttgtcatgacgtctgatgaagaagtttcttcagttgggttccttgaagagctcattgtaataattgagtttcaagagaaacgttcactcactgtcataccagtcttcctcacaaaacaccctttggatgtggaaaaagtctctcaaatatttcctgagagagccaaaatttggaggactgcaattgccaaactggacaacatagctgcacagtactcgttttctcggaatcttgcggtgatgcacggaacacaccggatcaagcagattgctgatgacattaggcttatgtttctgtcctctgcatcaagcgatttcaaaggccttgcaggaatggaccgtcacatgaaagcattgtatgcgttgttggctttagaatctgacgaaaaggttcgtaccattggtatttggggtagttcaggtgtgggaaagacaacacttgcaaggtacacttatgcagagatctctgttaaatttcaggcgcatgttttcctagaaaacgtcgaaaacatgaaagaaatgcttctaccgtcagaaaactttgaaggggaagatcttagaagtgtgaatcatgagatgaatgaaatggcggaagcaaagcaaaaacaccggaaagttcttttgatagctgatggtgtgaacaacattgaacaaggaaagtggatcgcggagaacgccaactggtttgctccaggaagtagagtcattctaatcactcaagaaaaaagtttgcttgtgcaatcaggagtgaatcatgtgtatgaagttggttctctaagatatgatgaagctctccaactcttctcacgttttgctttcaagcagccatatccttctcctgattttgaacgcctctcagttcgtgctgttcagcttgcagggtttcttcctgtgaccattagactgtttggttcgtttttaactggtagagataaagaggagtgggaagctacactgcttaaactcaatgcaaagcaaggtaaagacataaaggaagtttggaagattatggaagcattagaagataaagatatcgtggaagcatcccaaagataaaacacctgtattatattcccttacatcttgtttggtttcctcaatgataatgcatgtgcgtcaacgcttataaacgtaggtatcaacaaagcccatcttttatatttctttcgcacagttttggtcatggagtacacaatggtattgtgtgttatctcttatctacttataggtttatctctgtaagtctgtataatcatctcttctaaatatccaagatttatggaaaagggaaaattagtctagttataaacgaatagccatttaatcttactggccaacgaaaatagaagtagcagaaacaggggacacatacctgcttgaaaccgctgcagatacagagaaatggacaaatattaatgcattcacactgaaggtatattattatgtgttgaaaatgctatattttacattggctatgttttaaatttatcattttatttttctgactatcatttgttgaaacaatagtagactataaaagtactaaaaaaacaaaagtatatgatatatgagaatggattaaagaatacagactagatggaaaacaagctgatagagacgtggaagctgacgtggtaagctgtagatggtgatgcgacatgttaaagacacgggagccgagttggcaaaacgtttgaagatttgggtttttcacttcagcaacatgtggaatcactacaagtctacataagctaaatccgttatgacctcatgatgaaacattcaatccttggctaaagtcacttcgaattttttttaggtcctccacgttaccaatgacaactcataataaagaataaatagtaattaatatatttacgtagcactgaccacagtttttccgtttgctcagcatcaaaactattcaaccatcaccgaccgtttattccgtgcagtatactcttaggattgcacgttcccttatatcttagaaaaagtctcaatggtgaaatatatattaagattttctagaaatagaattggagttacatcatctgatgactgatcatcaaagcattaacacgtagatcgccaattcgaatattgatcgaataagcgatacgtaggttttattctttggaccctttcagtttcatgacttttaataaccttttcttggtaaattctcaacactttcttggaaattttaattattatgctatctgaatctatatgtactattgagctttgctctctttcgctaacttctcaaatcaagccatctatcatcttccaaagtttgaaagtaaaaaaaccgatgtttattttgattcagtccaatgtattcatcatcgtcttcttcttcagctactccacaaaagttcgacgtctttctgagtttcagaggcaaggacactcgcaggaccttcattagctttctttacaaagaactcattgaaatgggtattcgaactttcaaagacgacgttgaactccagagtggtcgtcggattgcttcagatctcctcgccgcgatcgaaaactccaaaatcgccgttgtgattatctcaaagaattactctgcgtctccctggtgtctccaagagctagtgatgatcatggatgtcgaaaagaagggttccatcatcgttatgccaatcttttacaacgtcgagcctgctcatgtgagaagacaaatcgaacaggtcgctaaacagtttaggaaacatgaaggaagggaaaattatgagactgtggtgtcatggagacaagctctgaccaatttggccagtatctccggccattgttctcgtgattggtacttttctatctttgttttattatcacaatttgaatcctaagtggttttgttgaatcaagttcgttctttcctctgttatagcgaagatgactcgaagctactcgatgagataaccaagagaatttctgacatgttattctcggtaacaccaccaagtgagagcatcaataaccaacttggatttgatgcacgcatgaaagagttgtatccattgttggatttggattctaatgaaggtgtgagagtggttggaatttgggcaagaggaggtaatggaagatcagctctagctagatacgtttatcaaaagatctttaagaaattccaaagtcattgttttctcgaaaacgtcaaagggatccctcacgattgtcaaatgtcgaatctaagagacgagtttcttatcaggattcaaggagggtactcgaggatgaagacctcagggttgataaaaaaaaggctcatgagtcagaaagttctacttgtggctaacaatgtcgacaaactcgaacagttagatgctcttgcagaatattttaactgttttggtccagggagcatagtgctcataactacacaagacaaacaacttcttgttgcgtttgggataaaggttgtgtatgaagttgagtgcttgagatgctttgaagttcgtcaactgtttcgtcaaatcggctttagggaaagagatcttaatgtcggttccgagttgtcttcacctatatccgggactgaatcttcttgaatggtaactctgtttctggtccttctggaataacccttagaagcacttcctagggtaaaccgttaggcttattatacctaagacttacgaagatttagcttaagattagggattgtttgctagttactggtataaggaattaaattaatctccattgatccaataacaatgcatgtacaaagttacaaaatgcatgtaaatgtatcccttattttatatctgtttgtctcagtgtctctgtgatcacctcttcagacaatcaagctatgttagttctttgaaagaggactagagaatactaacttgttgtccaagaatcctgggcttgtatatttcattctgtagttgctgcgttacagacactttttcctctgttttaggaatttcttgatttacaagtaattaattcaaaacagaaagttatgttctgtgcttttcttacttatgtttgtctaagtttaaacgcgagtgtatagacatcgacagagaatccagatcaaaggcggataaatttgggagattttaaacaattcctctgcgtaaccaatcgtgtaaactctgtattaggcaatctctctgattgcttgcaggagaagttagaaacggatgaacctgggcccttctattacattggaagtcttattgtcatgcatgtgaattattatgtaatgaaaaagcccaattccgacaattaaatatgtgcgggtgttacccatctccacgtttcactacaggcttcacgcggcttgtcgtttatacggtattaaagttttcttacatttcataatcgtaatactaaaggaagagatcaatcacatgcatatgcaatgttgttattctatttgctccattctaaacagtaaacatacgtgagaaatgctttttctttggtggcggatacgatcccgtaaatatatatatatatatatatatatatatatatttttaatctttgtctaatttaaaggaacttttttcttatcacgtatttgctgcatttatcttaactaatccaaaatttataacattgcttgatcctataaattagctattttagatcaaaattatatatagaaaggactaagcatcagctatttttttattcgaaaaagattatcatctatctttgcttcaatacaaagtaaaatgtttggtgttcgaattcacgtttcagctcacaaattatgttttctatctttttctatacaaagctttcattttagccaactggaatgtgtaagtaatcatattatagcaataaattggtatataagaattaagataaatgattaaaacatatttatcacattttctcccaaaatgcttagcaaataacaactggactctcgtgacttctccttgcaccctataatactctacacgcgtgacatctacgcgctggtgtgaacgcgtgtaagctctagtcccgcgttgagctgtcactctctgtgtcggtcctcttcgcttcccctctctccttctccactaatcttacactaattattaaactaatcacccattaactctaaatctcaacaaatcataatctcttataaagaagacacacatctcctaaatcttacccttattattattcattctctctaatcaaatcctcttctctctcaaatctcaatctccgattatgacagacgacagagtttaccctgcatcaaaacctcccgccatcgtcggtggcggtgccccaaccaccaatccaactttcccggcgaacaaagctcagctctacaacgcaaatcgtcccgcttaccgtccaccagctggtcgtcgtcgtactagccatacccgtggatgttgctgccgttgctgttgctggacgatattcgtaatcatcctcttactcctcatcgtcgccgccgcatcagccgtcgtatacctaatctaccgtcctcaacgacctagcttcaccgtctctgaactcaaaatctccactctcaacttcacatccgccgttcgcctcaccaccgccatttccctctccgtcatcgccagaaaccctaacaaaaacgttggattcatctacgacgtcaccgacatcacactctacaaagcatccaccggaggagatgatgacgtagtcattggtaaaggaacgatcgcggcgttttctcacgggaagaagaacacgactacgcttagaagtacgatcggaagtcctccggatgaactcgatgagatctcggcgggtaagctgaaaggagatctgaaggcgaagaaagcagtggcgattaagattgttttgaactcgaaggtgaaagtgaagatgggagctctaaaaactcctaaatcaggaattagggttacttgtgaagggattaaagtggtggctccgacgggaaagaaggcgacgacggctacgacttccgccgctaagtgtaaggttgatccaagatttaagatctggaaaattactttctaaatatagtaaacaaaataatggaatcacattcttagttttttcttcattttctttttattactccattgtttcaattttcatttctttttaaatttgatttcatatacagttctttgattcctgtaagactttatttttttggtttatgtaaatgaagatataaatatttgtgttctgtctgaaattttatttttctagcttagttaacaaaacccaactgttagtatttaagtactgtaattaggtaataatgcgagggaggtgaccactagtaattacaagtgctttggtcaattaagctttaaataagacaattacggtggctacttttatttgttctttgcatcaaataattaagctaaccatgtggtccatgtgtgtatgagaatatatacacataacataccctaataaacttatgaattattgttgtagaaccatgaatttgattacatataagtctccgggtgtgttggcaagtgacaaaaaaatctgttggtcttgtgattaattaattaattaagtgtgggtgcgaagttacgtcctcttaaggtctagaaggtgtcggtgaaatgaattcaactttaacaagaaaaagcaaagctctacaaatgattaaaaatcaggtgttatgttgtaatcaacaacaaaaaaaaaaaaaaaagcgattagttgttgttgtggaattttggtgtcaagacgacggctaacatgtggtggaatttgtttgttttcgacgaaataataaaactcaagtaggagagatttggttagtttaatcagttaagaatatactagtctgattataataaaaccaaatcgagtagactaatacaaacatataatgtaatgtccaaccacatatattattaaaaaaatagttataggtttattgaagaagatgcttaaaatttgtattcataaaaactagttataggattgtgagagatgaaatggagaacgtgaaatggttgcggctaagacttatatgaatgcagctgtgatctagtctggaggtagaagcaacttcttgggccatttcgtgccttgacaacctaccctacatagggctatgaagaaatcagttttgagagtgattcaaggagcttgatccaaaggcaatgccgtgagattggctgagactttggggctccacgagtgaacaatggtatatatactaccacttctagttagttgttttctaatacatgtcctgataatatcattgacaatggtaaatttgagtactagatacatgtcctcatggtaatttaatttttactcatggtaaatacacaataaacctatttaaatgtcgattaacagcgtttaacctatttttaatgtttttaaaatactagcttcaaagtaaacagcatttgaagtttctgtttacattttccctcttctacttgatatggttcacgcttctctttggcaatttcgccttcaaattatcccttggcgtcttcgtaatttttgcttcctcacttctcaatgtccatacacatcgatttcttctcccgacaccgtttcagtttcctcgtactactcccttacgtctaacaatgatcaatccctcttccattacttcgatcatcttcttggattatgcctgacagctcagcaatgcaggcaagttcatgcccaagtacttctatccgatttcatcttccgttctgggtcattagctgcgaatctcatatcggtttacgctcggttaggactccttctcgatgcccgtaacgttttcgagactgtttctcttgttttgttgtcggatttgcgtttgtggaactcgattctaaaagctaatgtgtcacatgggttatacgagaatgctcttgagctttacaggggaatgcgtcaacgaggtctcacaggggacggatatattttgcccttgatccttcgtgcttgtaggtacttaggtcgttttggtttgtgtcgggcttttcatactcaagttattcagattggtttgaaagagaatcttcatgtggttaatgagttgcttacgttgtatccaaaggcgggaaggatgggagatgcttacaatctgtttgttgaaatgcctgtgagaaaccgtatgtcatggaatgtcatgattaaagggttttctcaagagtatgattgtgaaagtgctgttaagatttttgaatggatgcaacgtgaagagtttaaaccagatgaagtgacttggacttcggttttgtcttgtcattcgcagtgtgggaagtttgaagatgttttaaagtattttcatcttatgaggatgagtggaaatgcagttagtggtgaagctcttgctgttttcttttctgtatgtgctgaattagaagcattaagtattgctgagaaagttcatgggtatgttataaaaggtggatttgaagagtatttgccctcgaggaacgcattgatacacgtatacgggaagcaagggaaagttaaagatgcagaacacttgttccggcaaataagaaacaaaggtatagagagctggaattctttgataacatcgtttgtggatgctggtaaactcgacgaggctctttcattgttttctgagttggaggaaatgaatcatgtttgtaacgtaaaggctaatgtagttacatggacctctgttattaagggttgtaatgtccaaggaagaggagacgattcacttgaatatttccggcaaatgcagttttccaaagtattggctaattcagtgacaatttgttgtatactatcaatttgtgcggagcttccagctttgaatctcggaagagagatccatgggcatgtgatacggacctcgatgagcgagaacattctggttcagaatgcattggtgaatatgtacgcaaaatgtgggttactcagtgaggggagtctagtatttgaagcaattagggataaggatttgatctcatggaactcgataatcaaaggttatggtatgcatgggtttgctgagaaagctctaagtatgttcgatcgaatgataagttctgggtttcatcctgatgggatcgctttggtagctgttctttcagcctgtagtcatgcagggctggttgaaaagggacgcgaaattttctattccatgagcaagagatttggattagagccccaacaagagcactatgcatgtattgttgatctccttggtcgtgtaggctttctgaaagaagcgagtgagattgtgaagaacatgcctatggagcccaaggtctgtgtgttgggagctctgttgaattcttgccggatgcataaaaacgtggacattgcagagggtatagcatcacaacttagtgttcttgaaccggagaggacaggaagctatatgttgctttccaacatctactctgctggtggaagatgggaagaatctgcaaatgtaagggctttagccaagaaaaaggatttgaagaaagtttctggaagcagttggattgaagtgaagaagaaaaagtacaaattctcgtcaggatcaatagtacagagcgagtttgagaccatctacccggttcttgaagatttggttagtcatatgttgaaaaaaggccctacacatgatgggaacaattatgaggatgatctagacctatggacagcataagagatgaatatatcccacatagactgagatgatacacaactaacaaaaacagacttatggaacctatcaggtaagcttgcttctgaccattcaaactagcattgaccaattactaaatcaatcttcaaattagaagagtgtttgtcatgaacaatccataaccagactctggtgcatatctggatgttacaggttctaataatcacggcgtcatctttgatgttcgaattgatggtagttggcaaaggaaagctcttgcctctcctgagctagagaccaaccaatgacgagttgctggagaaccaagagttttagcattagaactctcaatctggcactgatgatcacacacaatcctttaaccccttttgtcacattgtggataacgatatcttgttgagattatctactagaattgttttcaataataatcacacatacaaactttatgaaagaatttcaataaaaaataataatgttttgccctaaacagcacctttgtcgaaacaaacttttttcaactaggtataatctcataagtcacaacagttgaatgtgaagaattggtgaagtatcccaaactatttcttaacttgactattccttcaaactataaagaaaaaaaaagaacatctttttacaaaaagaagagtctttgcaacagccggaagttctacttttgataaggatggtatcgatctggcccagaaccattagtcccatttcctttgccactacttgagccgttatttccgtttccatgagattttccacctccataagcagcagccgcagcaacaccatagccactacccatatggctataaccgccagctccatagcccatgttgaacatttgacctccatagccataaccatagccatacccaccaccataaccataaaaaccagcagggttaaccatggagttccctgcgtaggctccataaccgccataaccaccataacccgaatacatactgtaatcttcattagctttcccactataactatcttcctgatcatacttgccactagcaccataggatcgaaagctgttatctctcccggttctctttggttcggccctttttatttccacctattgatccatattaagtgcttgagatcaatttctagagttctttagcttaaattctaaaacaacagtaaaacaaggtttacctgtttgtcaccgagctcgtgaacttttccatcggagaaaagtctatcaacagaatcttcggtctggaaggttacaaaaccaaatccccttgaccttcccgtgtggtggtcatacatgatctgatgctcaattatgtcaccatatacacagaaataattcttcagttcatctacaaatatgaacacacattatcagcaacagttataaccacagacaataacagaaaacataggagaaacttttaccttcttccaaaagtggtggaagtccaccaacaaagattttcctggtctttgataccgctttgatatcagtatccttgtcccctctaggaagtgtccttttcagatcaacctaacatttaaaaggaattaaccaaagcatccaaacagctaaacaaaatcagagcagacgatttacgacatacaaactaatcaatcatatctacctttcggtcatctattacatgatcttcctccaaaactttctcagcaacagctgaatcagcaaaagtgacaaacccaaacccccttgggttcccagttattctatctgtcatgattacagagtcgacaacttctccaaactttccaaagtaattcgcaaaagtttctgaaaacaataaagtggaagcaatggaatcaacacacataagaacaaatataaccaataacagaatcacagtgacttgactcctctattgtcaattacagtaagacaagggaattacaaaactagatgcaagataactgatgcagcaacaacgagctcaattcaagacataaatggcatacatgactaagacgatgaaaatgaaccatacctgcagttgtttcccaagaaactccacctacgaacagtttcctaacataaacaaagacaaaaggcaccacaagaaacctccccatcaatatcttaataaccagctccgctgagaagagattaatatcaaaagtaaatccatacaaaaagataaagcctaagaaaccacgaacccaggagaagacatggacgaagaagaatggcgatggtcaacggaatgcttcatctgaatcccaccagtatcaacggctgcaccaccgttcctccggtcatcaaaggtctccacttcaaaatccgattgtggtaattgttcgtcgtgtacgtgatgatggtaagagtcatcataaccacgatctgagttataatccatcgatcactgcagctgagtcaaaacaaaaccttttaatttctccgtctgtctatgatgaaaacccaaacttaaaaaatgaattttttttctccaatttcgattacttgattcaaagttatgacatcaaacattcaaaatttcttatcttggaagagaaagaaccctaaccaatatggttgaagtggaaacggcaacgagctcaggcgagaattttaacacttcaggcactgaagaattttttgaaacaaatgattcggtgttatcaacttatcatcggaatatccgaaacggcgccgtatttattgtagtcaacgttggtcaaacacttttctttgttgcttttgtcaacatcaggagatcaaaggttgacttgtgtttgacacttttaacttgctctcatataaaattaacaattatcaattgacatgttgtaaagatgaaatttttcatacaacagcaaaaaaaaacacattttcacattgaacaaatctttagctaagcttctcgggattttgcagcttttagtgcttcaattactgcagagaaatcttcatcgctcaacccataagattttgcaaccttgtaaagctcgttcgcagcggctgcaatcggagtagattgcgatacggattccgctagtccaagtgcgagtctcatatcctatagacggataaaagtcaattacagtctcatcaaactccagagtctttgtgagaatctaaaaaaagaaagtaacacaattacacaaaccttctgctgatgctttaatggaaaagccgtcgggtacactgacttgatcattgaaggaccctttagtgagtacattggcgcattgatagctccctgtgagacaacctgcagaaaaaaatttcccggggtttatagcacatttggtaagaaactttctgctggacaatggtgttttagttacctcgacaagtacatttggatcgagtccaactttctggcttagaagtattccctccgcgaatgatgccatcatactgcataggtaaagagaaaaagagatcagaagaagaatctggaatttgccaagaaatgaagcgatagatggtcaaatgataccttcccatgatcatgttgacgacaagtttcattgctgctccattaccaacttcacccaaatagaattttgactggatcatataatgcaaactagtaacgaaaatggttcatttgcagaagaaaaaagaactaaaagcaaaacacaggcaaaagagatacctttcccatgatgtctaagaaaggagcagctttttcgtatagcggcttgtcacctaaaatgtcaagtgccagatagtcataaatctccatttcattcatgattcaaccatgttagaaaatacaggcaagtcacccgcgaagacaaaataatctgatatgcaaaagtgatgatcgattattaatacaagctcaatgaggagtaagctgttacgaacctgcagtgagaaatattaactgcccatcttcggcaggctttttggaacctgaaactggtgcctatgaatatcaaaaatagaaatgacttaagccaccagatctgttacaaggttttttagtgattctagatatagattaactaagagcctttacctccaagaacaaggctccggtatcctttatttgcttgctgattagtattgatgaggccacatcaacggttgagacatcaacatacctgcagtagcaaggcaagtcccatttttaccagaaagtatcgaccacattactatatagattcgaagaagaaattaaaaaagaacgactgtgaactcttctgtagttacataagaaatacagatatcttgaaacatttcagcaatagaacgttatatccagcataagtctcatgaaggagtaagtacccttttcctgaactaatcccaaatatggctccattctttccacatgcaacatcaatctgacagaaagcaaaatacagtttttgttttaatatggagtgaaagtagaagaaaaagagacgcaaacaaaagtgagacatacgcactgcactttcaggatcagcaagcattgcaaatgtgagatcacaagttgcagtcacttcttcaggagaagacttgtacctgcaacaaagggagatactttcttaatcgttaaatttttcttctacgttagctctaaaacctcactcggagtaaataatatcattctttataagaagcattggaactcttactttgctcctaatccaacgagaggatcacatttgctcttagttcgattccatacagtcacatcacacctaacaaccaagccccagaaagatcaacgtaagtatcatcaatacatcaaaaagaggtaaagtagcaaaattgatgtgaattagattgtctacacataaaaatcaaaacttttttacccagctttgatgaggttctgtgccattggagaacccatgattcccatacccagaaacccaatgctaacagttccaagttcatctgccatacgaaccacaattcctcagataagactaccccaaaaaggataaagataaggagattatagtattcgatcatctttctcgaaacttgtgggttttgtcctaaaaagagagcgacacttcataatttaatccatttaaacgtaattcatagttctggaaaaccagtgtatgcataatacaaagcaagaaattacctctggtagagggagtagtagattgcagggaagagtaaaccctgtaagcgagacaaatttgaggttttgagagaaaaggggaaatgggttttggcctgaatcgaagagggatgcgaggacagatagagcacaaagccatggcttttgaagaagatgaagcaaaagataatgaaaccaaaggcatagccactggccagtgcgtttgtttagtagactgtggccgaaattctcacatttcgaggcggaaactgacagatttttactgaggaacaaaatccactggccgcgttgcatatgcttcggtttaaagctaattcacaagcagatataattgtaccggtcggttcaagtgcatttatcccccatgagtcatgatgcttgtgtttgtatatttttatcaacagtgttttttctcgaaaaaagcctcactatgtacgatactcatgcacgtttggactttgctcaattcagataaaccgaatcagtttgattcaaaccgaactgaaaaaatcgatttgaaaaccgggtaatgtgttatatagaaaacgcatccctatggaggaaactctctatacacagcaccaaaaataggagaacatcaaaaaaggattcagttttcctgctgagctcacggcagtttcaatcaccaaatcatgttctgcaagttcgcaatcttccatttttatgcctgaaaaccaacacaagagtggagagtaagatggttatagaggataagcaatatgaagaaagattgcggaaatactcaaaaaggcctatacatggagcaagattcatatgagcaagtaatttagatttactaataagcttgaggagagatggagagaaatgctgaccaaaacgagtctttcttttcctgttccaatagctcttcgaaggaaatgtctgaaaattcatcatctggattgtctaactctgtgctcgatttgtctttgagttccatggaagcgcttatttcaagaacctatagtagtatcataaagagtattaacggctttaactagagataaccaaaaatctcaagggaagtcccaattatgctaacagagtccaatacaggagataagactctactggtttatcagacagcaacaacaatcagtaagattaatctagaatcagaaacatcattgaacagatttttgaggttttggacacataggacacaatctttggaaacaagtgattgagtttggtttttaacctttttgtatgcaggtgagagtttaagctgttgctggagccaattatatacaagtgcatcttcttctactcttttttgttccatctccagcttatagatctgatgacacacaaacaattaacttcaaaagcaacaaacggataaaaatcagacaatcaattgatgaagctaaattcacctgttgacgaagtcggtcaaaggaagatctatcagccttaaagagaagggcttttgttattgaaaacttgcgcttgattacttctgacctacagtagacacaatcaggcttaaatcagtgtcaccggagaagaaaaggctaactcagtaaagcaacatgtcacaccatcaacataacaaagcatagaacaggaagcaactatttgtaattcctgtgtcctcaaaatgtaggaagaactaagaaaatggatgagagtatatgatattatgttatggtagtgttaacttacttgtgttgtagttcatttttggcttctatcaaacaattagcaaactccccaacctacagaagtgaagaacccagaaaacatcagaatctaaaactcaactgggcagaattttatagtaatccaaagtttagattgaagtaaatcattctgatatatcaaaaggaagcaagcttagctgatgattaagtattgaaacctcccaactcaaaaatcatttagtttatcaactgagtttagtataggctattgaacaaacaccacaaaggtatataaaccacatagaggttttaggatgctaattaaggaaatcacaggcttaatagacttggatttatgtttcaaattcacgttttccaattttgatttccataaatagttaataaccgaaggtaaagaaggtgacctgagctagtgtcaatcctttggcattattgcatttaacaagctgatcgtattgctgcttaatcttcctctgcgtagcactgctcgtcgatgtaaaaggatataaacaaacaaactccggtttgttttccgatatcgaaatcgagtctgtcctcggattcaaaacaagcccatcttctccctcaccgagctgcttttcgccgccggattcatctcctcttatgtctgatttcttcttcttacctcgattcttcttcttcttcttcttctttttcacatgatctccttcccaatccgaatcatcctccttcttatcggagagcagtaactcatagagtcgcgaattcgtcaaatgggtcggttcattttcatgggtttggtactgggcttcgtcggaaatctccgatagagacgattctggttggagtttggtttcggattcggataagagtttctggctgtacaaagcagctctgctgcgggaagctttgaggagaaagaagatggcggagacgaatgagaagagggcgagagttagtagagataagacgagaaagggatacatgagagggtttagtgtaattttgagttgtgtgaaatgcggagccgccattaacgtgcttcgtacatcacagagaagggagagaaagaaccaaaaaaaaaaagataaagagaaagcgacgacgaaaaatgcttttcttaaatatcttacgatatttttatggaaagtttttttaactatttttgtctaatttatttttttcagtgatttaattctgaattagaaatataacttatgagattatagttttacttaaacggtttagtctaaaaaaataaaaaaaatggtttagtctaagaagactttttttaatggtaaattactaagaatatattaatattaaaatgacttttaactataaagtctataattactttcaagtaatatctggtctttatttttaaaccatttttttctgtttttaatattgtatcttcacaaacaaaacaaaattatatatatgaaagttggccaattctctccatataattgacacatcatcactttaacatttgccatgtgtctattaaataattaacgtaagcttttcaacttctaatttataggtaaatgatatatttattattttattttacgtatttaattgtactattactaaatttattttaatattatatgatttttcaataaaaccattttaaaagttttctcatactcgattttttctttttggaatctaaacccaaagtatgaatatatagtagttgtggattacttaataatttgagtaagttattctcttaattctcttaaattgatatttatataataaatcactgagagtgaagaatatgtaaggagttccatcatcaataacttaggtttctagaatccaacacttccctctgttaaattggtgtaagacaaacgttatttatgaattatgtgtatgatacattgttgagaatgttattagaaaaaatatttttaatattaaaaataattacttattgaatgattagataaataaaaattatatttaaattaaacaatacaaaaaaatctgaaaaaactgcggcgtaccgcgggtgatcacctagtattgtataatatgggatacttaactggtatgagttgttgtttttttcactcaagtaatattgataatcaaagttggggaagataacaaatcacaaaaaatcatagtgaaaaacgtaatgaactttctttaagttttccttctttgtttctatagtagtatatctatattaatagaaaatccatttagcaaacaaaaagaaatacaaaatcctcttaaaaaaattactgtctttttgtatagacagacttttagacatatctatctgttgcaaaatttcaactaattggtttattaaagatgtaccttgccctgttagcaactcagtcgttgtagtatagtggtaagtattcccgcctgtcacgcgggtgacccgggttcgatccccggcaacggcgaatttttttgtgaggaattttcgaatattttttacatatatgaaaaaacataatggcttcgcccgggttcgaaccggagaccttcagtgtgttagactgacgtgataaccaactacaccacgaaacccttttagttttttatttgatatagttatatatatctcgtaaacctaaaaggagtctgcataatgatttttgagctcaggtataaatattctccaacaccgtcgcgactactctcgtttccgacgagtttcacggtgaagaactccaattcggggagcacctcgtctttcagctcaggtaacaattccttctggtaatcatgatcgcaaaatcaaactagggatttcgattccctcttttatagttggattgggtaagagccacgatgaaatttacggaggaggcggatttttcttctagatagtgaagtttgaagaaagtaaaggccaaagagagtttttgatttgtgtattcttctctttttgaaaagatggaagataagggaaagggtgtggtggaaggagatgaggggaacttgatttctgagttagaagaaggtccaagcaatatggaatgtgacaagcaagtacttggtggtgatactaattatgatgataaagacttaaacagtgatgaagaaggtctggtagatgatgatgatgatgatagtgatgatgatgatgagggagatgagtcagaagaagaagatgactttgaagctggaagtgtcccaaacacgtttgaacgacctgagtatgaagctctggctgagaggaaacgcaaagcacttgctgattctcaacggttagtttctctctatccttttgtacaatgtttcataatacagtgacaataagaattagccagtttatatttgattatgtgaaaatcaatgattcttaggctgtgcagttcttattatatcccattcaagtaacttttagatggatttgtcggtcaaatacttcccttgcattactctacatccttttgagctggttatttgtttgtaaatgtgacagtaatcctagtaacatctcgaatagcacctcgggcgtggagggattcatggaatttatgtcttctggtcgccgacggaaatccaggaaggtgtgtttttctaggatagctactattttcatgtcacacgtattacattgtctcttgaatccgtctcttactgcaataactattgcatatcctaccacttctttttaagttatacgttctatactgatgcagtataagaaaaagggtagaagacctgggtcaaagaaagaagttgcacctgacattctaaagaggtttagggaggctctttttcttcatgcacatggccgtgacattgaggtaatccaggtcaagtggttattttctgttggtatcatgcttatagagagaaaaccgaggctaagtaacacacttcataatttcctgaaaaaataaacttatccttctctaatctctaccacaatattgtttgagtattacgtatatgacataatgctttttcctaaatagtgtgtatgtatatatcttttgtatatttaaggactgatcccgatttatgtggatttactttcttccaggctttacctattttagtagaagttattaagcaagcaccagctttcgatatagcatactattacctttcacgtgtttctgagcaacttggtaagaccgaatcatcctctacggaagcattaaagattgctgcaaatatcaaaggttcaaaatcacctttttggaagttgctttatgagaggttcaagtaagttttctctgttcaagtcagtctccgtttgcatcatcttgtacagcagaaatgtcaaacacaaataattttctattaccactatatgcttgtcaataatggctatgtagatgtcactataagtttttgacagtagggcctaatcaaagattgtagggcttggaaatgattaagtagagattgttagccttgctaatatacatccgtagggaagatgagtagaaggaagagaaggaatacagaaagaaagtgactggtggttgtgggggaaggggaacctgttttgttttctgtttagaatctttttgattatggcaagctaagtaacaacaatgattgattccagggaacaagagaacatttcggtagcaaggagttatgcgtcgaaagcaattcaagctgatccagatgatatccctttgaaatatgaatatgcagacatctgcctaaatactggaaaatatagagaagctgctgaaacctttgagcaaatatttcgtcggtgtcctgagagaattgaagcactcaagtggggggtacaggtataagctgaatgactagaaatttcttcttattgttaacccctgttatgtggtttctgtagccaggaaaaaaaaaatctggttaataccaattacataaactgatttttatatttggtctttttagtatttccttaaatccggtgagggtgaacgagcagcgagcatcttagaggatcatatcaaatcccattcatctgaagtggggcacgatgtcttggatttactggcttctgttttcatgaaaattaatgcgcatgatagagctcttaagtatattcacgatgtgcgccagatttacaatgttggaaaagaattgtcttccagcttgaaaatcagacaagccatctgtcatgttcaccttgaagaaatggagcaggcagaggtttgtatgtctatattataaaactccgttatctcagtggttgctttaaaactataagccatatcattttccccaaattttgggttgcctggaacccgtatcttctgcttttaatgacccagagttgcaatccttattttgtttgaaacccgaggatcggcaagcataaaaaagagagtgaggactccctaaggcatagtaatttttgcaataggtccttatcatagatcgttattttgtattcttctcaaattccatgtttcacatctttccaccataagaactatttcagttctcttatgctataacttttgatgtgatttacggtcttttagatgtctgtttgtgtgattttgtaacctatataatttactttgttgctgtcagatgttatgtacctattcttgtgaatgatgctgcttccctgatctgcagagcgtgttaagcattctaccacaggaggctgtatctgaacatccagagctcatcaccaatttggctgatgagctaacaaacattgggaatttccactctgctctcaaatactatatagaagcaatcagtgaacctgtgaatggcaatttgtttgtaaaaattgctcgctgttatatgtcattggaagaaagaaaacaggccattgttttctattataaaggtacgttcatattttcattaagtaggttgatttagttgttgtatatatgtgttttctaaaatgaaagagctcgtacatacttatactctatctttagccctctcttttcaagagtagaaagattgaataatttcactatgaacatgtgatattatgaggtctcaaaactcaatcttttattattttatatgtcttgcaaattgataatggtatcgtctatagtctttttggtttctcattagtttgtattcgatttgttgctcattgaaatttccctcagctctgaatgaactcagtgatacggttgatgttcgcataactctggcttcactcctcctggaagatggcaaacgagatgaagctgtattagtgctttctcctccggaaaatccaggtcagtagagaaaattgtactctcttttctgccatattgtctgagcgagtgcatgttttacctaagatttgatcctcatggtacattacttttttttttttttttttttttttagaagcggtacattgctttattaaacagtactttgacagctttgatgcgaaattttgtgataagtaatgtttgtgttactttttcagagtcgaattttccctctgctttttcttctaaatgttagttatgttatttgcatccaattgtgttgctgtgttgggccatatgttataagattgctaactacagttcttttctcttagtgtagatcctgatacggctaaactgaaggcatggtggaaaaacagaaagatcaggatgaatctttgtcagatctatcattcagagggaatgctggaggacttcgccaatacagcactgcagttggtacttaagtgggtttggcggcggacggtaatatccctatatctaactggtttggaatgcgttctcatataataaacatgcaaacaaaattgtgaacactgaacataaataattactgcttcttgaagagaagctacttggatccacctgaacatctagcattttgttagggtttttaccatttgactacaacagaatgtctttcttttttataactattttgtatgctggccttactctgtatttacactcggcctgatgtacaacttaggtcaaggggaaaagaaaacgactggttctttcagagcatcaaagaaacaaaaaacgccgacgtcctagagatgctcaagcttcccagtaagtataacatatatcctccataatcgttaagcattgtcattcttgtctgcatattattattaacttttgttccggaacatgttgaacaaggttgagagggggaccaaaaaagtggcgcaaaatcagggcaacgttaaatgaaacaagaagaattagagaacgagctgctattaaagctcataacgaagatgtctgcagtgaatctgaggtatttatcaatttgaacacagtttcacctatccctggtacctgataaaaacttgtacctgaagacttttgtgtttcaacctacccaaattgggttacatattgtgggtgcagcctggactgttttttgttggtttgtataccattattgccgactctttcctctttggtttaattacttgcttttgccttttatattgactgggttatcctttgacgttgctactcaggaagaagttatcaaggatgaagagtatcaccgtctctttgtggatgtaattgactgttcccgtttactattatgtagtagattgtatattgttacgtttacagacctttttttgtttgcttatgaccgtgtgacatcattaatgccatcttgctttatgtttgtcatgactcctaaagttgcttgtcttgtagttgtgcaaggcattggcatccctacagagatattgggaagctctggagatagttaatttggctcggagattggatgctaaaatgctgcctgttgagacaaaaaaggagcttcagtcacttggagctagtgattacctaacccaaccttgattagtcattgtctttaactactgggtttatacctgtggttaacaacgctttcttctttttacagaaatatcttgcgatactatggatccaaagcagtggtttgactgtgtaagatctgtcattcagcaacatccatatcgtttgaatgcctggaactgctattacagtgtcatttcgaggtagagagcggcatttcacttggaaagtattgtaagcatgttttgtttacgaattgacattatgaatatcatattattatgtacagactagggaaaagagcatcgactgaagctaagttcatgcatcacttaaggagcaagtaccgagattgcgtaccccccattcttattgctggtcatcacttcaccgtgacaagccgacatcaagatgctgcaagagaataccttgaagcatataaattaatgcctgagagtcctttaattaacctgtgtgtgggtacgtatatattctcatattgttaactttcactttctcaagttttcaaaatcagttaaactaaaatgtcacctcttctttctttctattcaggagctgcgttaatcaacttagccctcggttttcgactcaaaaacagacacgagtgtcttgctcaaggctttgcatttctgtacaacaatctcagaatttgcagtaacagtcaggaggcgttatacaacgttgctcgagcgtatcagcatgtaggactagtgactcttgcagcttcatactacgagaaggtgttagcgatttacgagaaagattacacgatgccgaaacttcctaacgaggatccgattgttgcggaagagcggaagcctgtgaactgtgacctacgcaaagaagctgcacacaatctgcatttgatctataagcacagtggagcgtttgatctcgcgaggcaagtattaaaggatcactgcactttctgagtctcgtaatcattgtccttgttttttcaaacgaagataaaacactagggaactgttccagtttatttaaagggaacaaagtttgtttttcatgcattacttagttttctcacaaatcttgatctgtatattgcactccgacgatctatgaaccattagcagatttaatgggggaaatgcctgacacaaccaataataatcttatccataaaatcgatgaaactttgtccacaacccacttcaagatcatcctctaaatgaaaaaattcgtgtaaaggccaacagactacgacaccgctttgagagaaaaccgaactgacattttcggtttttattttcaaatcgggttttcagtaaattaaccgataggccattcttcaaatccttgaaggagaaagatagattattgaaaattttgtcatctgctgctagaccattgatcatatccatccttttgatgtcgacgtctgaagtttaattgaatttcttctcaagtttgacatttggttttggatcctgaagttgatacttataaaatgcaaatgacaactaaacgttatattcgcactcaagaaaatgaaactaaattaatttgttctctaaatttgagtttcattttaatttgaattgaaccggttagtctgaacaaagaaaatagcataatcaaaactgggcgatcaagatcaccaaacaaatagatatcgactattttgtttcttaacagaaagcaaacatgttcttctcagaagtgatcattctctttgcggaagtagagccaacgatcctttccagctgcaaaaaacatcacattggtccacattactaaacttgccattacaacttatatatttatcattactctttgtacctggttcgagtgagctaagttttaaactaatctaattgtctatatatgaggaaccatcaggagactgaaaacgagagatgtgtaagtagtacctggagcatatcaaaacgagaaaaaagtgcagtggacatcatgtcatgtgatccttcttcaagcatgttcattatctgcagttaaagatcgaacgatgagactcgactgtcgttctcctgattagggttgggtcgtatttaattctcgattaaagatgcacttacctcagggtaaaactccttccgctccggaagagaatataagattaagttctttataccacggatctgaaaccgagaaagcaacatcatcatacatcagccaaattggtcagaacagtacagaacctactaaaagatcaaagatgaatttaagaagaagaaaaaaccttgtatctcttataaaagtatgctctctcagtgtaaagcatgatctttcggctccctacaaaaaactgttctcttgctcgggatatatctgcattttttgcataactgaaaaacagaagtcaattaactatatccggtaaaggaaatccagataacacagagaagcagcaacttcaaaacaggaagaaaatgatcttactctccaagaagacagaaagaggtattctgcgtattcaaaaagtttctaagcctgacgaactcgaagtaagaatggataaagatcattactcctccctacaagcatgattggaatacgaacaatcaagctcccaaatttacgtgataacaataaggtctttgttctgcccaactttgttattgtccagtatgttatggcaacttagaagtatggtcaacaaaacagtttagactttgaatgacttcgaatgatgggagtacctgaacagaatctttaatctttgggaaaatctgtaatgaaaagaagaacggaatcagtaactattttatttagcacctaaaaagtgtaatatgtgcaatgacttatgaccctactttcaatggtatacgaacaaagatatgcaacaatgcaatttattcatgaaaatctaattactgcaaaaccatagcatcaaaaaaaaaaaaaaaatgacctttttggtaaaatattcaagacgtgcatcgtccacttgggttatggaggctgcatcaaatctttcataaatctgcaacacagacagagagataagatgtctaaaacttttcttgtgtaaaaaagataagctttcatacctgacggacagggagcaacactttctcaagaacacccttgtattcacacgccatcttcatctgcatagattcaaccaaaagtgttacggtacaaatttaacatcaaactagatatgaaagacaagttaactttaaatttacaatcttggtatggggaacacgcataatagatcaatcatataatcccctcaatacactagtaacaaaaaagacgcccgaaatccatttactataaatggataatgtgctgcattatgaatgctcacctttcccttatagttcaagcagtggcgaccgaatagagaattcatctctgaaacgaaatattatctgggttagtacaagtttggaaactccaccataaataaggattatggaaatataggaaaaacgaagatcaaaaggaattaaaccataggtgataacaaatggacagatcaatacccggagttaaataagaacttagaattattgactggcgataaaaccttgcatgtccatccagatacctaaacataagaacttttcttagaaattctggcatagatgggctgttggacagataaacatattagagaaaagaacttaaaagtcagaactacgtacaacggccgaattcgcatgacattggttccatgttgttttgttggcaatctatttaagtagtcaacgactgtagcaaggaacgaccaattctgaaacattataatagaacatataagaaatggagtcataaatctatctttgaaaattctataagctcatcccacaacctacctgcatagatattatgtctgcatgatcgataaccaaaacctatccacatgtacatgaaaaacaatattagtaactaaaataagaagatgcagaatacaacctcaaatatttgaaaatacatgcagtaataaaccaggtttaagagataaagcaataatagactaaagtaactgaacattattggcatcaaccatcagctatctattaaatatatcttctgcaagcaatgataaaagaagtacctctatggaagaaagataatcaacatcccgttccttgttttcttctgctgcaccaatggcctaacaagagcgaagttgattagagatcaaatcaagaagatttgcataactaaatcatcttatgaaaggatagacaaggctgcctaccatatgtaacttgagaggggaagcaactataatgtctgaggaataaaaatcaccatatagcctaatactcttcctgaaattgacaagaggattcaagtctcagcacaacgaccaaattagataccaaccgaaagcatgcacttcaaatctaaagagtatgtaggcttatatataccttgtatgtttaatgcctaacataaactcatcatcgttgttattcgcaccaaaaagggcttgccagtcagaaggttttgaagacttttgtttgattgagtttccatttttcgatgtagtcttttcaccatcacagtcatcagtatcctcttcacatccaaactcatcattaaaccggtcaaggtgttctacattaacctgaaaccaatgaaggatattgaagatggcataggcaactcaaggcattagcaacatagacaatatcaatgcagaaaattctttcaacatcactaacaatcaaactagagaattttctcatccacgagatgtagagtagaggcaacacagtcacaaagcattttccaattgaaaaattgatgaacgaatttcataaatttatataccctttgagattccggagttagttgtatgagcctcttaacaacgcgaaaggcaatgctcctcaatggtaatagaatcaggacctggaattacaatacacgtaagaccgactgtcaaactcaaatgcgagcaacaacatatttaaacacataaaatatttgcagaagaaaagcagaaggggtcacctttggacgagtaaatccttggtccagaaatccatcatcagaaagaatttcttcttcggaggtctctcgatgcttggcgattttactttcattcttcttcactagatctctagttttaaagatgtgattcaactgcataagacaaacggacttcaataaatcctgaagatatgcggagtctaatgaaaaactcataaattgtcttagaaaaaggaatacaagtgtgtacacacagaatgcataaggtacgcatccatggcacttgagtcttcgtcagagccacaatggtaaaagggtttcttgttagaatgcaatatatccagatagctgttgcctgcagtatcaaaatacaatgatcaacacagagccatgaaagaaacatgaatgatataaagtagaaagaatccagagataggaaaatcccggaatctaatacgtacaaatagagaagaattttctcctcttagatgagtccaaatctttgcctccacattttttgtacaattgcagccagtgattatataacttcggcttgaggccgtaaggtgcatcactctgaataccctgcaaaatataaacaaatggtgctactggtaaactactaggtttggaggcagacttcgcgaccatattttctgaggaaaggttacagaacacatacatcaagaaaattttcactcgttcctttccatttgcaatttggcatgtcaaaggcaggtgattcccatttaaacttccacttgccttttggtaaagtttccacttcttcactggataatttgtggctaaggtgctcactaaatgcactgaacaataaatgtgtgaataaaagagttgtattggataaacgagcacatcaaactgtaaataaatgtttgcagacaccaccatctgaatcaaatttacctaatagatgaagaagcatctacaaaggattggccattggtactcaactcatgcacctcctcatccgtttcatagtcgtcaggatcttcttcctcactctgattatcattgtcttcctgcgtgtcgtccgtaagacctccgagagtttcctgatcatccccttaaatatacaaacagaagcataggtgaaatcaaaaggctgaacaacgatgcaactattgcaagaatacttaagagccaataatgaagtttacaggagtatgctaagtctaagcacaatagaaactagtaataacttgcaaaactagataaggaaaaactaaccttgactcttatcatcctccccatcagtagagcttaaatcgtcagacccactgttttcctcctcatcctcatcttcatcgtcctcatcttcttctgtgtcacttttaccttcttcctctctctgcctgtaaaaaagatttgaagattcactacctccctcacaaccaatatatgccaagaaacttgttacatataatcaacacaatcttaaaagaataaaatttgaagatttaaaggacatagtagttagttccacatcggaacaagtatatcgaatctaaatgattgacataattccgagtcatacaaagagtcaaagacttccaaataaaccaaaaactgaagacttgaacttgttaaaacaaacgacattgtaaagataccttcttttgttcatatcagcaacaaccttgttagatgaaccaagagacaccagcaaattttggtactgtgtcggttctctgtaaaccattgcttccgattcagcctctatagaggattcttcaggtgaatctaacgataaaataacacaaaaagagtttaatattgagcaccacttaatttgttggacacacaatctgtaatctcttgcacaattaacaaagaagagctaacaaacctgttgaaggattggaaacaatcgtcttttcaacatgtttgtgcttcttcgtatctcgtttcttatcgaatttctcatgggacctgtgcctcttcaagactccagtagcgtttggagccatcttagggaagttaactggtgcagagaaagagattataggagatgttgagccttgtcgcttgcttgacggcgttgacaacggagtttagattttagctgtcagaaaaaactgcctcaaaacgaagttcgtaggtttggtctgaaaaataaagcggcggccgagcagattaaaacccaaagtcataacggagaagatgatgatacgatgttactagtacacgtcggtttattagttattgaatgggccttgcaataggcccaatatatttaacgctttccttttctggtttcctattatttttttgtcatctctacccaaaacttagcttacgctatacaagagtactaaaatggtaaaattcaagagcgatacgcaggtgctaatgtagaatgactacatgtaaaataattgaactaaatatgataaatctcctgaccttacggccagttttcatacactcacatctgaaaccaaacatcataatccatacaattacttatcaagagcctatacctttctacaaagatttgtatgtatcatacactgaatgagatttatcatttttagtacatatatgactcatatatgtattatttattggttaataataaaaagattcagaattcaaggtttccaagttggagtggtgggcttaaaggagagccatgttcattttttcaataattgcaagaaaaaataacttgggcaggcaagtctcatctctttctggtctggcctttcatgagttttgcagttttctcctcgttctcttcttattacagttcccatctggcaccttctcattggtgtcacctcttttcagttttaaatttagacaacgccaacgtggcctgttcttcctcccgttggcccctttcacctcgtcgttttgtaactctagacacacttattcttatatactgtatattgtggttttttctcacgtcgtttttatgactctgttaattccctcacgttttatcttatagataagaacatcaatatcgattagcaagccaatccaatacattttacaaatgataaacaaaaatggcaataacatgtgcgacgtgaataacacaatcagtttgaaaattaaaaaacgagtgcgaagaagtgaaacattagtttggaaatgaaatctaaattaaagtcagtcatgactcatgactcatgtggatgtgttctgattctgaacaattggattcaaaagtgtgtcccgtaattttaggtattttcaatgttatcccatatttcacatttttatatactatacaagatgttcaaatttttttttttgttatagcaaatacaaaactctataaaacctctcagtcatgtaatgcttttctcttcacataccacaaacacatcacacttatagcaaaaataattaatctctctcccatatcacgaaggagaaaaacaatatgacaacatatggcaccaatcagaagtcgtctaacgacttagcccccaagctggagtacatcacccgtggcatcaaccaacacaaaagatccggcctcgccacgcgccgcccttggaagcaaatgctagacctcggttccttcaacttcccccgcaaactagccaccgtgatcactagaatcagagccaacacggtctatttccagaccaattacaccattgtcgtcctcttctccgtatttctcagcctgatttggaatcccttctccctcttagttctactcgccctactcggtgcatggctcttcctctacttcctccgtgatgaaccgctcactgtttttgaccgcgagattgaccaccgtatcgtacttataatcatgtctgttatcactctttccatcctttttttaactgatgcgaagctcaatatcgcggtggccatcgtggcaggtgccttggctgtgttgtctcatgcagctgttaggaaaactgaagatcttttccaaaccgacgaagaaaccagtcttttaaatccgtaaaaagtttaatatcaactgttagactatttcaaattatggctacgattgtttattttgcgtttagatttgattttcaatgttacggtaactaaatattcataaccatgattgtttactagcgttttcacgttttgtttgtgtttcaccattttatagtgactaaagatatataacatggaaacacatgggaagaagcatttaaaatttagccactaaaacgtgattaacaagttaccgaatttacgtcccacttaaacctgaatttatttataaatgtgtgtgcgaaattgatcaacatgcaaacaggttaatccaatgcggaatgggtttacatgcttaacttataccatcctttacattctctttataattggatggatcactagagtaatattatgctattattcattatcgaagaacaagagacttaattaaagaagtgatacgaaaaatgagcccattaagcttccgtggtagctagacgctcctccgaaggagatcccttaattacgtatacaaaaaaaagaaatcacttaacgtgcatgaaccattcatctttagacatcttacataattgcatgaagaatatctcgaatacaaaacaaaaatcttcaatttcttgttttcatcaatcacttgaccaaatttaaaggaacttgaataggttcatgaacaatcccaacagatatcttgcagttttcagagctcaacatcttgtcattctcctctccttcctctgatgacataatttcgttgattatttccattagtatcctctccatatcttctccatcggtccaatctctaacggtagccttaaccaacatgggattttgactaatcaaatcccaaaccgggaaattcttccttggcatcatgtaatcttcagctttgagtccaagactgggacagtaatcaccagcaccatctccaagatagatcatcttgctcgtcttcccttctttcgttagagaagcttgaatcctatcgattattaaaccctgtataaacaaaatttagtattaatttagcacacagataggtccatattgactcataacagaatcaaagataatatattttacaccaaaaagtttcccaaaatccctgaaaatagtaatgacaaatcttatcttttgaactaatcaatcaatatgagattagtgtaactgcagtaccttgcacatgttaggagggcaacgagagcaaccatgagaagatttggtgaagtcatggtaaggagagactattaatcttccttgttcatctacaagtcctggatttgtgttaatctcggagaaaaactcaccaatcccgagatgttcaatgattgtttcgatgaacaacgtgtttgcgtcgctcactattctcagctcgcacctaaatattatgtcgtatgattcagtaccgtgttatcaaacgaagaatgaggaatttaacatggatttttaccctaaagcatgagcagatttgatggctgggatgacacgtggatgaattgggattctcctaaggacttgtttgatttcttcaatggttttaccatgatcatgaagctccttcatcatccgattctgttttgaaataaaaccaaataaggatttagtgttatgactgatgaacatatatagaccaacgtaacaaagccctagagaaaccgaaacagagaagagttagagatggatgaacaaaacaaaccatgagagagttccaaggcattgttgggagaagctggttgaacaaatcagtgaaaccaagttcatccacgacccaattatcgctgtctacatcgatgattgtcttgtcaaaatcgaagacgatcacgatgttgttattcttagccattctatcagatacaatgttttataggtactgttttatcgatttctgtatgattatggaatttggagaagaagaatgtgatatatatacgagtgagagaaggtgaaaaggctagagacgaatagggatctttcgaggaagatgccattggaatattacttaccgtcaaacgcaaggtaagatagataattaagaatcctaatctgatatgattcgtatcttttgaaccgttagatctgatgacgtttatgtgtcaaacattgactaggtatactgatccaacggtgttgatgactctttggtttattttgtgggtattatttagtttggcttgttaaaagttttatttagtgggatttaggcagttgagatttgagaagacaccggaatggaataagataaaaaaaaagaatattccacctatttatgcgttttcgtcattattttcatttttattaaaggaaaataaaatccgttacccaaaaaggtttatttttcttttaatacgcaacccaaaaaaagtaaaaaatgcaaaatgaatatattggtgtttatcgtatgaataagttttgatttatcatgggatgaaaaataaataaatgtgcatgggatagttgctttatgtcacacatttgatcgataaagttaattgtaaaaaccacaacattcatactcgattggatttaaacttaaaaacatgaaatttatcgaaatatatgggaattgcatcagaaggcactaggaaggaataaggttgcaacttggaaggaatattgagtgacaaatcacaattgtaagcagaaagaatattctaggggttaaggatcacatcatcttttcatttggtagccacatctttcaatattcatctgtatttgatttcttcaataacaattaaaagtattctaaccaaacaagtcttagcatgacaacaaaacaaatgtgtgtgtgtgtgtgtaatcctctatctataaaataatatacttctatcagacattatcagaagagacgcatcaaaacaagcttcttttatttctcttcctcgtgtctttagattgtgatatagaacaaggaacataatattttatatctagttgtaaatcttgtggcaccacgaaaaaactacatttcactgcatccactacctcaattggcaaacatttcatttttcttagcagaaatcaaattaagttacgtaatattaatgttgccctcgacactcttcttgaggtaaggatacatatattcaattcatcgcatcctttaaagtattacaatcagtagtcaaagataattttatttgcttacaatagaatctacgaggaatggaggagaaagctactttttattgtgggtaaaagtaaaaaacacaaaagaggtgtctgaaaatacaattgaaaaatagacaaatagcaaaaaaacagaatggatgtggtgttcaagaagaagaagaagatatgacaaaagaatcaataaacaaattttgaagcacatccctcccaatcgtctcatactaaaaaatcccacacaccataatttgtttcttaattgaaaaaaaaaaggtaatagaatcgatactaaaaaaataaaataaaatttatccttagtgcagcaacccaaaaaaaagacaacctaagtaggaggggtggttcggatatttaagacattacccttcttcaggtaaacaaaaggcctcttcttgttttctttcccaacccaacactttttaccttactaactcctgaaagattactgttgctgcttcttccgttgactcgtcgcggtgactggtcaggctttggtcttggtcacagcattactctgttactactacaccttttctggttacatcatgactttggttgttaaaagaaagagagaaagagagtgagagagagacccgggaaaagaagaaagggaaagttaaattggagcaagctgattccatgtttatgtcttctctctctcttcccaactcatgcatagtacatgtacaagctgtttgctgctgcacaagcaattgagttctctgttgggtgccaagccatatgcagcaactttgttgtgaaatcgtaggcgttcccatttgcctctgttccgggactctctgatcctgcgtccaaaacaaaagttttttactccagaagagagtagtaaaagcttgaataagttttacaggtactatgaccactaacctcgtctaaccacgcgtgtcatactgcctatagatctggatggtcttgcaggtgtctggatttgcctcctaatatataccattgatgcgaaagttttgcaacaattgatcaatacaaacttcaatgacttaataaggttaactatcaatgttctctgttttctgatttacctcatcgggtttttgctagcttccaaagtcgcagcttcagtacttccttgagacgctccaaatacgcggaatagattgctggttcaccggagattaagtataataaattggtcattagtttattccttatacaagacagaaaagtacagcaatgaccagaagacaagcaagtcaacctgtaagaacctgttgctaccctcaatccatcgccactcagacaacactcaaatttatcaaagatggagtcattttcatatagatcgcatagctgcaaccgggtaaaacataacgtggttagctttcaacacagaatcaacaaataaaagatgccacagaaagaagctctcaccctgggtctcagatgttcatgaacctggtaagatgcgaccggaccagaatccatgtttatgtcccacagctgaaacgtcaaaaagggtaaaagatatcagaaagaactaaagaatagacctctattggcccacaatcagaaaaatatacacaaagggaaccgaatgatttccaaccttgagcgtcatgtaatcgcgactaagtatgtatctcccatcctttgagaatttaatatctgaaattgaggcaattatctctgtgaaaaatgatcttgaaccaggtgcttccggttcttcaaatctgtgatatgaagcaacaatggtcagtggtcagaaactttagcctattaatcttcatttccaagtcatttctgacaagaaaagagaaaaattggaaatgaacccacgtattcatatccccttcttaagtatatattgaaacatgcaactaccatttccgataaaggatgatgagaacagaacttacaatttcgtatgagaatcacacagagctgattgacgcatatcaatcaaacgaatggagccttttgaactactatatgcgagcatattacaatggataggatgaaactcagctgatgtaataacctctgcacagaccatgtagcatttagaagcatgctcgacaagcagtaaacgtgaaaaaaatagataataaaagtaaggaggttgttgacatatgaatcaatggtaagaccatacaaagtaacatctaacaaaataggagaagtagcataccagttaagtcctccatgtttgtgggcttaacatcaacaatattgaaactctggttgctaatttccaaattccagagatttactcgcagatcatcagccgaaataaaggtttctccgtcactgtaacaattaagggaacgattcattaccacaaggaacaaaacaatgcaatacaagttgtgaaatttaggatcaacaagattttcgacaaagagaataatagcacgaccagacatggaaagacatgcaaaataaaattctaaggattttttagatattagcattgtttcctgagatggaaaaattaaggagaaagacagcaaaaacgtgttaaagagatatcaagagtaaaacatataacctgagggaaaacttaggaaaacgattacctgctattggagattgaattaatatggtaatcatgagcatgggcatacactcttcggcatctagccacaaggttagtctcctggctggtaacctatatatgcagaaacacccataagttcaagtagaacacaaattgactagtgcattagactaatttggtactgagctttagttacgacaaaaggaaacaaggccaatagtaaattccctacatttcataactcaagtagctggatcatcaacatgaagaaaatatccacaacttccagtaaaaaacaggcttaatatctatacgcatttacttttcagaatcctgaaattaaaactcacttcatttgacacccaaacaaaaagtaaaaaaaagttgcgtcgagtacaactaccacaggcaaacgcagagatggaatgcctcctggcgggaaagaaaagtccttgctcaggtagtcatgccctttatcagcaggtaatccattagtaactaattgaggagggatatttgaactttctgacggatcaatattcatttcactaattttcttgatcttcttctcttgtacctgtttgattccaaataagaggaggagtcaaattataagagtaaagaaacaaactatttctcttattttgaattgagtcttggaagcaaaagaaaccagtttctagacagttttcacacgtgacacctaatatttctacactataaagcatatgaaacaagattatggaaccgagttacacagaaaggaattgctataagtggcctatattttgcagacatgtgatataaaaatccatccagatgtcacaccttccaatatttgatggttttatcgtttgtagaaagcagaaacaatgcaccattagctggctgacaccatctgattttgttgattttctcctctatctccaaactcttgagatagtcaaactgaaacagattgaaaagcaagcttattgagtagctcaaggaacacaattactcgtaagtgaaatctggtgataagttttaatgtacctctggttcatgactctgaaattctgttttatatcgaaactcaggatgcctaactgggtaatccgtctgctcaagatccttcctggaccctccatgctgaaagtaacattttgcaagagtgcgttacagcacataacattttttcgaaacaaatcttgcagaagaaaaaggaactcacatctttagtatctgtcctttcaaaaagaactactcggcccccacggtcaccagttgcgagatggtctccacttttatcaaattcgatggctgaaatgatgtcaactgcggaagaaatgtgtgcaaacagaatcattacatcagaagtcaccactaaattgtaggagctaaacacataataaccttgaggtgcagctagtatattattctccataacatagagtatgtaaaccggtaaagaagattacatccaataacatgagagcagattaaatttatctaatacggaaagtgcctctgaaggcaacctagttacatcaatactccgggaagtcttatcagccagaagagagcagctatagaccaactcaatattacaaattcaattcatgaacccaaaatgcatgaccaatgataacccttcacacttgtccctcgacaacccaatccctcatcgcttcatatgcctttcttgctgttaaacagagtcgagacaccattgtaccagtggaaaaaagtatacatggcttatggcattgaacagacaaaaccttgaagctagattaccctcttaatctcaacttaaaactatcatcagcgtatcaaatgattcaaatttacagcagtacagctgaaacttgtacaaaaatgagagttacaacctcgcaacaatcagctaaatagagatgctctaatatcacataatacacaacaatccaaacttgtcatagaacttagaaactctactaacagtgcaataaaagccacagagattcatcaatgacccactaagtagtagaggaataactcactaatcagatccaaacaacaaatcaaacccttagtcctcaaatacactccggatctaaaagaaaaaagaagagctaaactccgaatatatctcacaatttataacacacgtaggcaataattaccttcctgaacttcttctccggcggttcgctcaccgaagacctgagagaatctccactctaaagacggaggaggaccactagtagcggcatcgtcaccaccgttcattttttttttttggcttttgggttagataatccaacaaaaattagaaatccgagcttgagatctgagcttccaaatcttttaatcaccgaatcgaatcgaagatcgcgtcatcaccataaccaaatcctttgattcacattccattccatagttttattcatggattttttcgcgattgaagcaacttgatcgatgattaatatttcgtccctctctctctctctctctctctctctctctctgtagaaaatggaatttttgatatatctctctgtagaaaatggaggaacgagagaagaaaaacgccttggcctttttctctctctaaaaggacaaaagtggaattataacttttttcttttttttttccttcgagaccaaaacgaaggaacaaatccgtataagttaatatgtctaatactataatgtttttgtcctgattccaaagtatccttagcgttacagtcggtgacattatttatttgaccactacatatcggtggacagtgacatatgttttcgcctatcattggtcagttgtggaggtgctgcgctttccactgttgtgttgtgtgatgggggaaaatgtataattatcattagtaagtactaaataattatttttgccaaattatcctaaatagaattccattgcacatttgttttttctaatctgatattatcatatcttacttgagaaaaattacaagtttctttcaggggtcaaaattaactcatgagaatacccaagcggtagaaaaaaagaaaaacgattgaaaccagtacaaatcaaatgaatttaaaaagtattactatagtttataccaaatgtatttggatggtgaataatcaaaactgaaacgaataagtcaaaggagtgttttttttttataactactaaccactcagactcagtgacggattaaaagattaaaacttaaaccggatataaccgaataatagaaccagtcagtgcaattcgatttaggacataatgttaggaagcctcctcgtttaaaagttaaaacctctctttctgcggaagaaacacgcttgagatatctttccccaaattcgaaagaaccctaattttttccgattccgattgatcaaacaagcgaatcccgattaactgatcgaggagatgggtaatacagataagctgatgaaccagatctttgaattgaaatttacgtcaaagtctctgcagaggcaagctaggaagtgcgaaaaagaggagagatcggagaagctcaaggtaaagaaagccattgagaaaggtaacatggatggtgctcggatctatgccgagaacgccattcgcaaacgcagcgagcagatgaactaccttcgtctctcttctcgattggacgctgttgttgctcgactcgatacccaggctaagatggctaccatcaccaaatcgatgaccaacattgtcaaatccctcgaatcgtctcttaccactggtatttcacattctcacttttcagcaatctaatcaatttggttttgttggtgctcatagcattatagtatagattgaaaaattctgctccttgttgttgtttttgctgattgaaggatatggaatcatgcattagggtttggtttgatgaaatattagaatagctctctctcaccgtcatggatgttctgtgatctgtgatgaatttttgttgcatttctctccttttggtaagtgtagtatagagggagaagaagatagggcttataatactcttatacgttgtgctgtagcaactcgtgttatcattttctggtttgttctttgcaacaggcaacttacagaagatgtctgagacgatggattcgtttgagaaacagtttgtgaacatggaagtccaagctgagttcatggataatgcaatggctggctctacttcattgtcgactccagaaggagaagtcaacagcttgatgcagcaagtagcagatgattacggtcttgaagtttctgttggactacctcagcctgctggtcatgccattcctaccaagactgaagagaaagttgaggaggatgatttaaccaggagacttgccgagcttaaagccagaggttaattagctaacctaacaaaaaaaaaaactgtatttggattcttcttttattgagatgttgatgctattaatccctgaacatgatgggaatgtttgtgtaaattgctcaccctggtacatgcttttgtttatataaaacctagagtgtgtttttacaatgagaaatttcatcatctgcttaatggtttggattagttgtacaaatgttaattctccagatgtgtctctggtagtagttccaccaaattttccaggtccagaaaggaatacactggagtaaaaggtatattctttccaaggagaagaatgtttatagtactcttggtggattgttgcagttgtcaacttgggagagaggatgatatggtgaagtctcctccctctctcccatgtcttgttcattgcaaagtcttgttctttcatgtttcttttcatatacacttgttaatgaataaagttgaaaaaattcgtgaggaaaagtccgaatctatcttctctgcaaaaataaaattaagtaaaagaaacataaagttatggtttaaagatgctttcggaaactccatcattttagtgggagaatcacataaaagattggtcgtcaattatttttcttttattaataaggatgcacatgatgatgaatattaaccgtaatatactaatatagatgacaatgtatttcagtgctaaattatagtaacaattaattgaatgcttaaatgaatcttttattatatactactttatatgtgttttttttgttttaattgagacaatgatgatgcacctagacaagaacgtcctactctctgtgcatgtgcttctcattttatttactcttttaccaaacaaactgttcaacttaatacataatgttggtagcccacaatgtgaaagattaaattaaaactcatccattacctcctgtaagctctatattaaccactttagctcttctgcacacactcacaacaaccaatcatatttattattaaaaaaaagagtcatggcattttcatcttcgtgttcgtccgtcaaagccgtcaactcacggtggacgtctccgtctccgtcaccgtcttctagattcgccgtcctccctgctttccttcaccgccgttacgcaacaagcgtcaaactaacggccataagcgccgccttaaaaaccgtcgagcaaacgacgttaacagaggataacagattctcaaccgtcggatctgactctgatgaatacaatccaactcttccaaagccgaggatcctcgtcaccgagaaactgggagaagccggcgtgaatctcctcagggaattcggcgacgttgactgctcttacgatctttcgccggaagatctgaagaagaaagtggcggagagtgacgctctgatcgtgagaagcggaactaaagtgacgagggaagtgtttgaggcggcgaaggggaggttgaaagtggtcggaagagccggagttgggattgacaatgttgatctgcaggcggcgacggagcacgggtgtttggtggttaatgctccaacggctaatacggtggctgctgccgaacatggaattgctttgcttgcttctatggcacgtaacgttgctcaggccgacgcttctattaaagccggtacgttcccggttagccattttttttttgttttattgaaatgagacatttaaccaattaacctatctagattaacttaaagcttatactatgtttcacaccatggaaaagaaaaaactaatctaacatgttttagtctcgcaaagattacgagatctgatgaagtccaaattatcttgattacaaaaaagaagaattgattatcattgattaatcgatagatattgaatatttcgttttgttcatatattgagaagagttaatggtccatttgaataattccagtatagtggcgttactcgtaagtgtttcttcgtaataattgctcagttgatctttggagttatgcattatagcatagaagtggcaatttgtcattggatagtagaaaagtcatgattagaagcaaaaataaaattggtttacgtaagtagaacaaaaggggaaaatcatatttgatcctctccctgtaagatggaaaaaacaaacgaacctgtcaaatgtaaaataatgggtccatttactgcaaaaagtaaaagtcggggccctgaattttggggccgccagtaacctcattttacttttctccgagtctctcaccaaccacagtacagaaattaaattattggagtctctttgtctattattgcaaacttcttgttttgttttgtatcaatcaactaagatttaatccgctgtttaccgcagacaatcggtttatttgatttttatattaaatatttgaataaatttgatatttacattttataaatataaatttttgaatcaaacattactaaattataattggaggaatatattaaaatgtgtttaaaatgtgtattaattagttatgtatatgtaattttagtaaaagtaaagtatttacaaaaatataagattcacaaaattattcataaaatctgtttttttagccggtttagatatcaatttataactacaatactaattttgattgtaggtttagattgaatcgaatcatataaagtttaggagattgttaagaccatattacctttaatgattttgaacaacaaaaaacaaaatccaaaattaaaatcaaaattgtaactaattagacaaaatttcaatttgtactttccaaaaaaggacaaaaaaagggattgaatcatcttatttggaatttattacaaacccatgcatcggtaactgaagaaataattcgattacctgatatattctctctttaaagtttcaatctcacgcgtcacaacccatcagttccacccattttggaatttgttttttttttttttttccattttggaattttgtcatggcaaatatcattttctcgagtctttgttgtctttttttctttttaaaaactttatattcgttaatagtttattacaatttttaaattaccttaattattgattcggcgtatatagtgcaacttgattagcagaagaatatgggattctttttacaatatacaaatttgtagatattttagtacacaatatacaagtgggtcattaaaaaataatcatgcatcataattgataagactcaattatttgtttctggtactactgttaaggtggaattgtcgtcagtcaaagcatcaatatacgatcgagacagaaactgagaaagtgtagacattacaataccattatctcttctaagtcttaatcactttcacttaaaaatcacttttgtaaaatttgagttattcttcttcttctgtaatctagtaaaaaaaaaaattctaaaaaataaaatcaatttgagttgaactgagatgactcctccatcaagtaataccgaggcggtttctgaaatttggacatttggatatttttacaggaaaatgggagaggagcaagtacgtcggtgtatctctcgtcggaaaaaccttggccgtgatgggtttcgggaaagttgggacggaggtggcgagaagagccaaaggtctaggcatgaccgttatctcccacgacccttacgcgccagctgacagagccagagctctcggtgtcgatcttgtttcattcgatcaagctatctccaccgccgatttcgtctccctgcacatgcctttaactccggccaccaaaaaggtcttcaacgacgaaactttctctaagatgaagaaaggtgtgcgtctcattaatgtcgctagaggtggcgtcatcgacgaggatgcactcgttagagctctcgatgccggaatcgttgctcaggcagcattagatgtgttctgtgaggaaccaccatcgaaagatagcagactaattcagcatgaaaatgttactgtgacacctcatcttggagctagcacaaaagaagctcaggtatcatcactctcttgatcttgtttatgttacttgtttcatctctctacacttcttttcgagtttatataattccaatgtgatattttaggaaggtgtagccattgagatagcagaggctgtagcaggggcattgaaaggagagttatcagctactgccgtcaatgctccaatggtggctcctgaggtcttgtctgagttgactccttatattgtcttagctgagaagcttgggaggttagctgtgcagttagcatctggaggtaaaggagtacagtccattagggtggtctatcggtcagctcgtgaccgagatgatttggatactagactacttcgtgcaatgatcacaaagggaatcattgaaccgatctcagattcatatgtcaacttggtgaatgctgatttcatagctaaacaaaagggtcttcgtattagtgaggaacgaatggttgttgattcatcaccagagtaccctgttgattccatccaagttcagattttgaatgtggagtcaaatttcgctggtgctgtctctgatgctggtgatataagtattgaagggaaggtgaagtacggagttccgcatttaacttgtgtcggatcatttggtgtggatgtgagccttgaagggaatctgatactgtgcaggcaagtggatcaaccagggatgattggacaggttggtaacatacttggagaacaaaacgtgaatgtgaatttcatgagtgttggaagaacagtgttgaggaaacaagcgataatggcgattggagttgatgaagaaccagacaacaaaacacttgagaggattgggggtgtttctgcgattgaagagtttgtgtttcttaaactataaagtttgagatggagttgcattgtggtgtatggagaataaaactgtgacccggattaaggtgttttatccagtggttgttaagctgtagagaatctgtggtgttgcgagcgagtgtgtgtatcttggtattattacattgttcttgttttgctttcttatggtatgtaatgcctttggttaatgtcatgtttctcttgtaaaatgcttttgcttatattttacgatgaaccgttggacttgaaaacaaaattcctccatcactactcaatggattcgcatttgggtctttgggggttttagtcttaggatgtaggtggccttgtgatcttgtgacaaaatgcaatctgcaaacctcattggaatctaatgtgaaaaccctttgaagttaaattcaaatttcaacatcatgtaaaggaaatataccaaagaagtggaacatatataaaacttaaagaaaagtgatagaagacagaacaaggaccaccactctctaaatccttatggtgaaaatcacattttctttgtcaactatgaaaatttatgaactacagtataattatagggtttggtgatggagacatatatagaagttgttattaaattcgtttgggacctgcaaaagtgacgaccaaccaacttaaaatcgaaatggacagtatgatatttccaaaataaacgtgttaaaatgttacaaacgaatattgtatacattaaagaaagtatgattcttcgttgggacttttttgacttctcaataccatgagacgaccaaaccaaattgaattcagttaaggaattagatagattataatatgtaatggtgcacgtcgaatgattgagttatgttggtggaatgaatatagaatatcaatttaaagatgatcattgagtctaattaagttgagaatgcgtgttatcttattttagtaagagtaatagcatcctcccaaaatgatgacattttgtaataatgagagaaataaacataataattccataaaagagagatatacaagtggtttaagacttttaaatagactgatgagtgctccactatcttaatattgttaacagggaagatcaaaattaatctctcaatcagttttgacattatgtttttaataaaccatttttgttttatgtgaatatggttttgttaataaagtactagttaaaattctagtgtagacgacagataccagagatcttgattaaattccaatatataatgtttatgaaagatttaaatctaacaaagtaacagtaggatgaaatgtcaatagaaaattagcgtccaaagaagctttctcttgaataagctaagaaaacaaaacgtggaaaatggaatatttaaaaccacgaaacagtctccgagtagtaatggaaatagcgagaaagaaacacgaaacagcgttgaaggtcgccaattcgtaaagttaggttcacaatctctgacgaagagttaaccaaaaagcgcgctctttttctctctcaccaaactcatcgatcgtttcttaaataatgcaatctgttcctgtcactaaatccagataccctttcaaatccaaaagctctctcttttttttttccgcctctcattctgggttcaagggttgttgagtgaggttactacgtacgagtgtttcatatttcagtctcttgagctctaatctcaaatgaggaatcttgggttactcgaaattactctgctttgctctctctttgtctatttccgtatagattctgtctctagtttaaactcagatggtttggctttactctcgcttctcaagcactttgataaagtcccacttgaagtagcttcgacgtggaaggagaacacatctgaaaccactccatgtaataataactggtttggtgtcatttgtgatctttctggtaatgtcgtcgagacccttaatttgtctgcttctgggctttcaggccaattaggttctgaaattggggagcttaagagcttggtcacattggatctcagtcttaacagtttctctggtttattgccttccactttaggaaactgtacttcacttgagtatttggatttgtctaacaatgatttttctggagaagttcctgatatttttggtagcttgcagaatttgacgtttctgtatcttgatcgcaataatcttagtggtctcattcctgcaagtgttggtgggttgatagagctcgtagatctgaggatgtcatataataacttgtctggtaccattccagagttgcttgggaactgtagtaagctggaatatctggctttgaacaacaacaagttaaatggttctttgccagcaagtctctatctactcgagaatcttggtgagctatttgtcagtaacaacagccttggagggaggcttcattttggttctagcaactgcaagaaattggtttctttagatctctcgttcaatgatttccaaggcggtgttccacctgagataggcaactgcagtagccttcactctttagtcatggtgaaatgcaacttgacaggtacaatcccatcatcaatgggtatgttgagaaaggtttcggttattgacctttccgataatcgtctctcggggaatatccctcaagagcttgggaactgcagcagcttggaaaccttgaagctgaacgacaaccagctccaaggcgagataccacctgcattgagtaagctaaagaagctacaaagcctggagcttttttttaataagctgtccggtgagattcctattggcatatggaagattcagagtctgacacagatgctcgtttataacaacactctcaccggggaactaccagttgaagtaactcagctgaagcaccttaagaagcttacactgtttaacaacggcttttatggagatataccaatgagtttaggcctgaatcgaagcttagaggaggtggaccttcttggtaaccgttttacaggggagataccaccccatctctgccatggacagaagttgagattgttcatcttgggttctaatcagcttcatggtaagataccagcgtctattcgtcagtgtaagacccttgagcgagtcagacttgaagataacaaactttcaggtgttcttccggaattccctgagagtcttagtctttcctatgtgaacctcggaagcaatagctttgaaggatccatcccgcgcagcttgggaagctgtaaaaatctcttgactattgacctttctcaaaacaaactcacgggtctgatacctccagaactgggaaatctgcaaagccttggactgttgaacctttcacataattatctggaaggtcctctgccatcccagctatcaggctgtgcgagacttctgtattttgatgttggatccaactcattgaacggttctattccatcaagcttcagaagctggaaaagcttgtccactttagttctcagtgacaataattttctaggagctattccacagttcttggcagagcttgaccgactctcagatctgcggatagctcgaaatgcttttggaggtaagattccttcctcggttggcttgttgaagagtctacgctatggcttagacctcagtgcgaacgtatttacgggtgagattccaaccacactgggggctcttatcaatcttgaacgtctcaacatatccaacaacaagttgacagggcctttatcggttcttcaaagtcttaagtcattgaatcaagttgacgtctcgtataatcagttcacgggtccaatacccgtaaatctgttatcaaattcttcaaagttttctggaaatccagacctctgcattcaagcttcttactcagtgagtgccataatccgcaaagagtttaaatcttgcaaaggtcaagtcaaacttagcacgtggaagatcgcccttatagcagctgggtcctcactatccgtattggctttgctttttgctctctttttggttttatgccggtgcaaaagaggaaccaagacagaagatgctaatatcctcgcagaggaaggtctgtccttgttgctgaacaaagttctagcagccactgacaatctagatgacaagtacatcattggaagaggagctcatggagttgtttacagagcttctttaggatcaggcgaagaatacgccgtgaagaaactcatctttgcggaacacattcgcgcaaaccaaaatatgaagcgggagatcgaaacaatcgggctagtcaggcacagaaatctcattcggttagaaagattttggatgaggaaagaagatggcttaatgctgtatcagtacatgcccaatggaagcctacacgacgttttgcacagaggtaatcaaggagaagcagttcttgactggtctgcacggttcaacatagcccttgggatttcacatggactggcgtatttacatcatgattgtcatccaccaataattcaccgcgacatcaaaccagagaacatactcatggactcggatatggagcctcacattggagatttcggattggctcggattctagatgactcaacagtttcaacggccactgttactggcacaactgggtacattgcaccaggtatatatacttctcaacataacacgttcgtattttgttcaccgttaccttattcatgctctgatgaccatatttctatcaaacagaaaatgcgtacaagacggtgaggagcaaggaatcagatgtttacagttatggagttgttttgctcgagctggtaacaggaaagagagcactggacagatctttcccggaagatatcaacattgtgagctgggtcagatctgtattaagcagctacgaggatgaagacgatactgctggtccaatcgttgatccaaaacttgtggatgagcttctggatacgaagctcagggaacaagcaatccaagtcacagacttggctcttagatgtacagacaagaggccggagaacagaccatcgatgagagatgtggtgaaagatttgactgatttggaaagttttgtaagaagcacttcgggttcagttcactagtttcataagttgcaggtttatatagtgtactgttctttgaaaccactaatataattgtaactaccattgaataccgtgaagatttgagaaacatatatatccaaagagacttaattttattgcataagttggaattgttgggggaaataaattacaagtattaagagaggcttcacaaatttgccaatctcagtatattttagccagtgctaccagaaagctcgccagagaaggcactaccatacgatgtggaaccggttggtgtctgtgatgatgttgcgatccctcgagctttccgcatctgccttagtctgaaaacatctgtgggcaaaggctggctttgtacagttgctgtatcatcttcttcttgccctgttaacagagagatagaataagataagtaactatcatttaacggttgttctaagggatagtagaagttatatgcatctgcagctaagaagtgccaaacatttgagtgatgacatagtcatgagccataaaatatatatacttgaacataaactataagcatatgtaacttactgtctgaatcttttctctttgtagctcttctgtctcttggtaatctttgagacacaccgcgggttggacccgagggatcgttttgacttggaggattgcctttagcagcaaaactctgctttacagtttgacctgttggaaagtcgctctgcaaacatatcgacagaacaacatccacattgggtgttggacctgcgaattgagaagataatgataaactagttggttagtggacacttattcaggtgctcagttcagatacaacttggagttggtttttaagagatttaccgtccacaataggcaagttagctaaaaatgctaccaatgcaggtggagtagtctttggtatttcgtcaaatgtgctggctgatccatgagttgcagttgcagtcacagtacttgggaaggtgttcgaagcagaagctgccactgggtttgcagaactagcaaactctacagtcaaatcatgagtggttcagaataagttaacaattccattcatcgtgcagccaaatattgcggcaaagtgcaaatcagatacctgatttctttgtcgggtcttgaacaaccatctgagatgtatctggataaacaacttttgacgaagaagctacactacctgtcagcccagaaggcggtttatttacttcagtcatcaccaaagtttaacataatccatcacaccagaaaattaaaaagaacagacctatagccgcaggaacatgaggtagatttgttttccctgctttcttattcagattcttcacaagcaactatagtgaacacattgatcggttagaattagtacttactagatgtatcattagtagctatttgagctaattgcgatatgttgcatggaaaatacctcttgtctggctaaatgatcaaggtcgttagaagtgcatggccaaagatccatgtaactgtaccgagaaacaacatcttgaagtgaactctctggaggagaagacccctcttccccttttccagaaagtgcttctttcattctctgctcaacctacaacaaggttgtcatagtaaagaaaatttatgagcaaaaaactaagaagataagcagactactccatcaaacagccacacttgatactggatgtatcgtggatctgatttcagtaaatttcatcgttgatcaaatgtctcttttatgaggtgcgagtctgacatagtctattctagcaataagttgaacgtgtcagcatttttagatcttccatgcaactaaaagccagtaagatggaatagatataaatgtttggacccttcaacaaacttatcatcataatggagtcaaccgaaaaacaactacaaaaaatgctaacaaaacacaggaagctaataatagtagctttcctcgtatacgttgacaacattcaatgagttaaaatacctttagaatactagcaagatctccatatgtttgctcaaactgaatgaatcttttccagacctacaaaacatggagcaagaaaaaagttaatcctagaaatcaattagcataacggcgtaacccattgacaccagtcgtcttctttattgttctagcattttaaacagtattacatgtgaaccacaataatattggactctttcagttcagttttaaatgtctactatccccaccactgttcataaggctcagatgtgcatcaagattacacctccaattgctaaaccattatcatatttaagcattcagaaatgctataatcaaattaggtgctcggtttggttattttcattagcaggttagtaattttccttgttgtctcttttcatgcttaagaacaaaatctgcatactttaacagctttgagaaacaatatatcactatcagcgtacctcagcagagtcttcaactggtaacgtgcttaatgcccgctcaaatagagctctgatatttctatcatcattcaatctagtcaagaaatctgcatacctagattgcaaagcaaaaccagatggttaaaattctgtcttaggaaggtttgggagagaaacaagtttgaggatattttatctgagaaggtcttaaagtctcaatatttcttcaataaagaagagcttccaagtatcttaagaaaatggaacgctaagtaaagctacagtgacacttacttaaggatgtaaacaggttcactcatatagagtttcaacccctcttcaaagatattatgtgcaacctgcataaaaatacaaacataaggatttttattgtgaaactgaatagaaattgaagtcagatggtttacattagtatatatgtcttgcaagaacatgttaattctttgttaaagaatcgaacaaatgaaggcacaaagaggaatgtacgaggcataaaagtaacgtacatgtattttgcaaacaaatgaagagtttaagtgcatcaatagccaaaacaccccaatattcaaatcattttgactttattatcacaaaagtctcatgggtcctggttaacttaaacaactaagagactaataagacgagtgggttctgaacttgactgaacgaccactacctccttcacaagacaaaagcagttctaaatagcatatagaccaccacatagtgggtaagaaaatacacctttggttccttgtcaatacaaaaggccatggtagcaaaagcaatatacacatgatatgtgcagctaggagattttctagcatctaaaaagtacttgcgagcagcttcaacaccctcagccctccggagaaaacgaaggtactgcgaaagaatatatatatatatatataagtatatatcatatgagaatgttttcagagaaaagaaacaatttcaaagtgaaagatatgctgtttatgccaatcttcgcaagtcctaaattttgaaacttgagcgtacttacttgtatatgtgccaaagagtttgtgctagcccccaaaatgttttcatataatttcttcgctgactgcaaaatcatacaactataagcaacgagtatgcggacaactaataaagctaaattacaagaagccagcagcaagaaataaaaacctgaattgctccacgagattcctccatctcagcaaaagcatatttcaacatctctgaatctgacatacgagagtgggaaatgtagacacttagtaaaaaatataaaagagtcgcagagagaaaatagacttcttaagagtagatagaagataagattaaaacagtaagccagcaggtaagcaaagagtaatagttgatccttcataaagcaactagttcatagacataaagaaaaaaggatagattagatttttaccaggaatggctttaagagctcgctgaaatactttgattgcagcatccgtggaaccagattttacgtgccactcagcatagtcataccatacatcgggatagtgatataaacacatcagacactgtaaaaccagagtaatagtcagtcaattcagaaatgaacacatttcggagattagtcctccaaaatttcagcaagagcatctcactgactcttcgcatacctgttcataggcatatataatccgcttagttgacgaggccgtgtcaatcctttgagggtttcctctgaaatttacaattgtattagatacagaagtttgttatatttagaaggactcgttaaacaattctatgcataagacctcatcatcacttgttggagacataactggatagtaatttattccagctctctagttaatatcataaatcttaatcggcaaaacacagagacggaacaagatataaaagtcttaccattaggcgtaaaccgaaaaaatcaaaaaaatctaccaagggaccaattaactgttgcgatatattaaaatctagctatggtagagaaacaatggctaaggagatacgtaaaacacacatcatcactgaatggaatgtatattaaaattaaaaactgtatatgataattggggatttacttttcaaaggacaagaactttttccaggccacccactgggtttcttcctgcaaaaaaccataagacggtgtaaagtagcaaagtaagcagatgatactcaatatgtatttcctatcttaataacatgatctcatgacgtgaattatgctcataatgtcttttaggcagtttaagagtcaatatatccaatcttatcgaactcaaaaagataagaaaataattgtacattcagcactcagcagttccaaaaagaagcaatggatgataaattctttaccttggaagttcctgttggtgggacagcaagcatgttccaatcaatttcttcaatgtacttcttgcgctccctatatacagccctggcactgttaaattttggttgatactcatttacaagtccttttgcctgctcacatgattagattagattatccatcaacaaagccaagagaatgaagttcgtacctgcttcttttcatgaaaataagaagccacataattttaatttcttagaagtttaccaattgacggttaacagtattttcgaagttttcataatctttccaaagttgttcaacgtggtgggtcggagttaatatagctctatgatacacttttcgaagagcagtcttccgatgcaaatcttcgttgaggttaagagcctgcatgggaatctattagtttctctgcaataacaaattattagtatcaaggacaaagttagagtgatataacgaaccggaagagattttagaaaggcaatgtactcagtccatataggccctgatgcgatgtctgtccctggagattcataaatcgaaataaacaaccatctgtaaggcccaagttgtgttatgtgttggcatgataaagggaaactagaggtctacatagacacgaagcgtaactatgtgcttgctattgctgatgaatagttatcattagcaactatattaagcataaaattgatcaaatcatattgtttactaaacataactgtattcattactcacaaaacggaaaaaattccctctatgtatgagacatgattgaaatgaaaaacaaacaaaatagagccaaaactgcggaagagaagcaataccaatatagttaagcataaactcaaaagcctttgtggtctcctcttgaccctctgctcccttcttgtcgtagacctttctgatgaaccgaatgtaacattgcctgagagaataagatgttagaattatatccaaggagatggcaagacttgcattgcagctgagcaagaaacccaacaatgagacgaaaagatgttaaattgactcttatcaacgactaataaagggtaacatggcattaccaaagaggaacttgaaggcaggtcaacaaacaacgactaaatatctgtttggtagcatcatcattgtttacagccatctgtgcctccacatattgcttccaaaatctcgcctacagagtacaaaggagctcacaattaaccaaaaacatcaggaaactcttaaaatacgtggaagcaaagtcatgggaaacttacagaagtgggataaagtgacaaaagctgctcgtagatcggcgtcgcctgtgcaattggtgaatgctgaggaaaggacacaattttacgaaacccaacaagtaaaaatctaaactttatgaaagagtacgagaagtcagacaagtatatagctggggaaagaattgtaccaaagctctcttggccaaagcctctgcttcctcgacgatgtacttatcagccatgaatttcaccttcggaagaacagtctttcaaatattccactcaatggtaatataagtagaccctaatctgagattcaataagtgtcacaatcttccgacaagtctagctaaagcttctgctgcttcaacgccataaaaaaaaatccctagaaggacctcagatcaggaaaacagacagaccttcagaagtttaccatagaagtaaaccctaatctgagattcaacaattttaacactcctccgacgagtctgcccgaaacacggtggtcggtgataccctattgtcgaacggggaaactcaaagcaaccggtccgtcttcaggaaacgaatattttccgcggttctactgtccacgtggattctactaaacttatattaaaaatattacgggcctagatttttggcccattaaaagtaagttggaccgattacggtacatacaatatcttttcgatttctaatatttctctctttttttttttccttcactaatttcctaagtacataaaacgttaagccgttaagttaggttcaagagagttggtgtattcgaatttgaagtctgatagatctttggcgggattgaaatctattttggcctaggttctttggaaacatcatgaattactctccatttttcgtaccacatgtactaaactaataatgcttgtatatatacactttagtaagcattatatagcttttattcgtgaattcacttttaacacttataaagatacatgtaaaataagaaattaatcataagaagatatatttcaatgaaatagacatgtaatataagatattaattaattcatcaatttccaaaatcaaatcaatttaagtttctagctctaaagtcgatacaatgataactttagagatatgagcctaatactttatactcaacgttaatagataattatggaaatgaacatcatatctaaattaatttaaatgacgtagatgaagaaatttcatttgaatgttatagttattatacatagtataggtaatttattatagtttgaatcctaactaatatatttgttatatagggcgaatacatagtatactgtatttgctaataagccctggttttgttgtgtcttgccattgatgttgcctagagtcgtagttcttgcgttgcaatgcgttttgctatggttgctttttcactaggcactagaggagttagtaagactattggtgttcagtgtggcgttgagttgaaaaatctagctctcaaaaatctagctctgtactatgcgacttcgggaaggaacttggtagggtgagctcacattgttcacattctttggtttgtggggtttcgttctgtgagagctcatggaatcctttgacgggccgttgacggcacagtctcggacctcctgtgaaaggcttctagtgtcttgtatcttggtaattcggctcttcaatttgcattcgcccttcgtctcaagcatcagagccgggaagaacttcaaaatcgtcatcacttcgtcttactccattagcatttgtgcttatgtttgagtggatggactgaaaatgtttctaagatctatgcttccatgttttttgctttttttgtcatgggaccatttctttaggagtataatctttggattgtaaacctaaattgttttcatttttaatgaaatatttacattcttagcaaaaaaaatatactgtatgtacgtaaagtatgcatgggtttacattttaatttggtaatacaattttttttattcgtgtgcatgaaaattttgtagcacactttaagaccagatttttgtcccctattaagtattgcctcttagtctaatagattgatattttggaattttttgtttcataattgattaatgttttgtttcaacatcattattactttcatatgttatcaatatagaaagagaaaaacataattaatattattaaatttacaaaaacttagcaaaaaagtaagattacttattcatgtgcgaaaaaactaaaacatcgttctgttaggatttaggaacataggtagtagttttttttatcgtatattaaatatctttgttctaaattagtaattatgcttatttcacccatccagagaaatgttggcaatactattgttgccctaccttaaaatactattttggttcttgacatgcatgctaatattgtagcttacgtgttttgttgcaaaaaataaaaaagaagatacggtgaacatagttgtttgggttaactatactagaaaattgttgcaatttccaagcaaaaaccacttttgaaagtgttcgttattcaaatctcatgactcatataatgtacttttatatgttatgtctatgttatgaaccatccataaaaattattcccatgaatcaaacatttcccttctcttatgcactaaaaaactttaaaatattattgtagttagaaatttaaggtagttatcgcttcatagtaaccttgtgactccttttcagttaaagattatccacaaatattttctagcgcatgttatattttattacgtactttgcaaataaaatatgtttacttgcaaagatgcatagcaatattagtatttattgacatttgcattactctaaatgtgttgcatactataagctaagcagaaaccaaaagtttttaagtaagcatataatcaactctggtcattttcttaggaaaatactatgctacacctactattacaatggaacaagatctatctactaagaaaatccaaattcattctctatccatttttatttttttgataacttgtgaatatattaagaggaaaagttatttacattgccaaaaaggtaaacagacccaaaaaaataataaaaaagccatagatgaaacacgattagctcagccaaagagactaacaatgagagaattc

SEQ ID NO: 1129 - DNA, 75133 bp, Arabidopsis thaliana
ttacaatggaacaagatctatctactaagaaaatccaaattcattctctatccatttttatttttttgataacttgtgaatatattaagaggaaaagttatttacattgccaaaaaggtaaacagacccaaaaaaataataaaaaagccatagatgaaacacgattagctcagccaaagagactaacaatgagagaattccattgagacaaaagtctcccacaacctttctctatccatttgatatctcttttgtgctattctaagaaagtacattatcttatgtccatctttttgcaagaaacatcttcctatttcactatatgtgtttttgctccattttagttttaaaataatttaagaatcttgtttttaagatattatatgatctagctttccacttaaatttcttcagctttgttagctttgttgcagcaaacattaatatccataaaaaaaaaatcatcctatatttcaagtcaaattgatctttatgcgttagcaccagtccatgactataaggaagaaactgcatcaagagctttgtattcatagatgatgtacaataacatgttgtagtggtgtcacataattagttgaatcggttgaattcgtatatatgaggtcctgtcaagtacttttggataactatttaaagttaataatatatatttgttcttaaaatgagaaagttctgaagtcatattcaaaatttaatgtttatgttaattattgaactttttaaagatagtttgaataaactatagaaagatattttgaataaaaccattgaacttttttattaaggccagaatattaaaaccattgaaccttttaaagatagtttgaataaactatatatatgtagaaaatataatttaaaataggaaaataaagatattttacattaatgttaattattttttcaggcaaaaatgttaaaacattaatgtgtattctaagatacattgaataacatagaaaaaaatctaggatttttaaatgactcaaaatttagaaatcaatctaacattctcctttttttgtttgtaaacaatggtacctcattctaattacctttaaatagaggattatctctactcttttattcactctcaaatatcacaaaatcattataattttgttacttccaacatttaccgttaataattttccgcaaaattctccatttctctcagttcgtgttgaggtatgtatctctatgcatttttatggtcaaggtgtgaattttgttttgtttaaattgtttgactaatgtgtccggtgtggataattgttttctctaatttagttcttgtttattttatttactatttttttatgttggtgtcggaattgagattatagatatattgaaattttctattgagattttctatttttcaaattggaattttgaataagatttcttcttagcccagtggtatcatcactaaataattcagatctgaacatattgtaatgcgattttataataagatatgtggattgaatattgtcacaaaattatagtttattcatcagtatttcagtctgaacggctgtttagtttatttactagaacagaaaaatgacgatttatgtttttgtaatgatcgcaacctttgaataatgttcactgccatgtttcgtaaatctcctcgctataccatatataatatctatacttgattaattatgactgatctctaacttcttctttttgtatataatgataggattttttttccaatggataagtctattccaatcaaggcaataccggttgcatgtgtcagaccagatttggtagatgacgtgaccaaaaacacatcaacgattcctacaatggtttcaccagttctaaccaatatgccatctgcaacatctcctcttctaatggtcccacctcttcgaacaatctggccatccaacaaggaatggtacgatggagatgctggtcctagtagtactggtccaatcaaacgagaagcgtccgataatactaatgatacagcacacaacacatttgcacctcctccagaaatggtcataccactgatcaccattaggccaagtgatgactctagcaactattcttgtgatgcgggtgctggtcctagtactggtccagtaaaacgaggccgtggccgaccaaaaggttcaaaaaactcaacgccgacggagccgaagaagccaaaagtatatgatcccaacagcttaaaggttacatctcgtgggaatttcgattcagagataaccgaagcagagacagaaactggaaaccaggagatagttgattccgttatgatgcggtttgatgcggttagacgacgattatgccaaataaaccatccggaagacatccttacaacggcaagtggcaattgcacgaaaatgggtgtcaagacaaatacaagaaggagaattggtgcagttcctggaatacacgtcggagatatattctattactggggtgaaatgtgcttagtggggcttcacaaatcaaattatggtggtattgatttttttacggctgcagagagtgcagtggaaggccatgctgctatgtgtgtggtaacagcaggacaatacgatggtgaaaccgaggggcttgacacgttgatctacagcggacagggcggaacggacgtgtacggtaacgctcgtgatcaagagatgaagggcgggaatcttgcactagaagcaagtgtaagcaaagggaatgacgttagagtcgtgagaggagtgatacatcctcatgagaacaatcagaagatatatatctacgatgggatgtatctggtttcaaagttctggacagtgacaggaaaatccggcttcaaggagttcagattcaaattggtgaggaaaccaaaccaacctcctgcttatgcaatctggaaaacagttgaaaatctgaggaaccatgacttgattgattcaaggcaaggttttatacttgaagatctttcttttggagctgagcttttacgagttccgctcgttaatgaagttgatgaagatgacaaaacgattcccgaagattttgattacatcccctctcagtgtcactctggtatgatgacgcatgaatttcattttgatcgtcaatcacttggatgccagaattgtcgacatcagccatgcatgcatcaaaactgcacctgcgtgcagagaaacggtgacctgctaccgtaccataacaacattttggtttgtcgtaaaccattgatttacgagtgcggtggatcttgtccttgccccgaccattgcccaacccggttggttcaaaccggtttgaaactccatttggaagtgttcaagacaagaaactgtggttggggtttacgttcttgggatccaatccgagccggaacttttatctgcgagtttgctggtttgagaaagacaaaagaagaagtagaagaggatgatgattacttgttcgacacgtcaaagatttatcagaggttcagatggaactacgaacctgagcttttgcttgaagatagttgggaacaagtctctgaatttatcaatcttccaacacaagtcttgataagtgctaaggaaaaagggaatgttggtcggttcatgaatcacagttgttcaccgaatgttttctggcagcctattgagtatgaaaacagaggtgatgtatatcttcttatcggactttttgctatgaagcatattcctccgatgacagagttaacatatgactatggagtttcatgtgtggagaggagcgaagaagatgaagtacttctttataaaggcaagaagacctgtctctgtggttcagtcaaatgtcgtggctcttttacctgatttggactttgtatcatttgaatttattgtttttttaagcttctttgtttgttttgcaattgttgttgttattttccccttttaaaaacattaataaaagtaatgaattttgaatcatatttttttgtctaattttgtattttgttattttacaaatgttattggtttttaatttaccaaaatttttgatgactttgataaaatcatatatattaaagaaatgaaagattataaattattgttaaagagttttttataattgtgtttgattagtttttcacaatcttgtaaagttttttaaacaatctctctattatgatgatactttcatgactttattttgaaaagtgtagaaataaaccaataatacaataatttaattcattaacaatcatagatttttttgttttaattgaataacataaaatttctaataactttataaaaatatgaatccaataattctagatttatgaagattttatattattttttataaatcttaaatcaataacagcaaactttaacaaaccttttaacaatcttgattaaataacagtataacaagagattctctataacattttaagtaagtaaaattccgacgaaatcacaaaccaataacattcctaagattcattttgatttgggcttacaaatatttttaacatctaaggttgctttacataatatgaggctgaaatcagaactatccaatagttttttattccttaaatgataagaaaataagaacccttgtttatatataaactaatgaaagaaaaataaaaaagactctggtttatatatttttcttctggttcgttctttgtcaagtcgacttcttcgggtctctctctatctttcctttgtttgattttcatctatatctgtctttaatttgggtattagggttttcttgtctgcccttacctttcctcgtccctctggccatcttcctcggagattcattttcttatgtaaattcgatttgcgtaagagtgttttgttttatgccctcgtgtgttgatcacaaaattggaaaagattctttcttctttcattagattttcaacatcttgtctgaaaaagtatctcgctttcgaagttgggacctttcttttttactttatatggaaaagcttccctgttatcatttgtgtttagaatccatcttcttctgatgatgatcttgtttgtttcacaaaggtgttcactggtttttttttgtacttcttctcagtagtatttgtcgttgttgtgtgagctattatgaatagaaattccaaaggaagagcatggtatgataaaatctaccgtaaattggcatctcaggtacttttgctagttcctaagtctctcgagtctttgatggtttaaaaagatgtggagtagaagttattgaagtctcttggttcttatgttggacagggtaatgtttcttcaggattggattctgtaaaggatgaaccagagaaactcagggaggaacaaatggagggggatggttttaaggagaagttatcagactctgtgttgatagatgagaagcttgaagagtacagtgattgtgatcgaacagcaaccacttcccgttctcacacagatccagtatcttctcaatctactcaccagaccccggaaagctttaggactccaataacatgtgatgatgatacttttgtatctgtctctgggatttctagggatgtttcaaatctaatcccattcgcgacagagactccagcttcacctgttcaagaaaaaatggcaaacactagatcctttagcaacaactctgtgaaaggtttgtgagttttctcatctttttctacatgttttgggattggtctctctgcagttttgtaagtttcatcatgttcaactcttattgtgtaggtaatcaagatgagttcttcattgaagacttcgatgttggtccaatggataccattgatttgtatgacatgacatttcgagaagacccctcagattttgacgacaatttgctatatgcaatgcgtgacaggactaagcaactcagatcattcaaggttctctttcatgatgtatctgtcataaaattgaatactgttctccctgtatctttattcctaatatgtttcttctttatcataatcatcagagaaaaataatggatgctattaaatcgaaaagaagaagagagaaggaatatgaacagcttgctatatggttcggagatgcagatatgggttgtgatctggtaaacgataaggaacagtctacaacatctatagactccaaaagctcgcagacaaatgtgccagttgtatcagaagattctgagtgggagattttgtaagatataatgtgttctattttggtgagactcatgtgatgatgaataccaatatttagtttgtaactattactaatatggaaatatttaattcttctttctgttccttctagttttgtttactgcttttaaacaatcaattgatccaatcaagaagcaaggaacaagcaagttgattagatccaaaagcaggagaagaaaacattaaatggtttcatttttctgtacagtaaaaaatcgcaatacaggaatcaatccttttgggaagagttatcgacttagtgtaatcaatctaactgtgctattgaaagagatcaaacagcatgacggttctgactctaaagctaaaagactttcgacttgttggcctaattaccattatctgatccacgtcctgaagagctgtcactgtcagtatctgcagattagaagaaaacttatgttagttgtgatgctaatatggtaaaagagcttaacaaaaagtttcaacatttaccactagagcaagatcctgagtcactactagaactgttagaactacttgatccacttgcattgttttcttgccgagcaggagatgatgtgcgaattgcttttcctggttttttacatgtcaaacaaaaattatggaaggatcattattcccctggtttttctttgtgtaggtaaatgaatactccgaatttggtatgatgttgtgaacttaaagcttacctgattcagtaactctcgatgttgtggtgccacttactaaagtggtctgtgaaacaaaagaagaaacagtgatattagccaaatacagtaagagcagaagacctgaataaacaattagctatggaaatcttacaggttcttgaatactattgtgaacagattcagcatctctttctgaaccaaatccatgagcctcgtttttcttgctcaagctctccttatacccagtcacaaatctataaagctcccaaagcgtgttgatatcaagactatcaatatccagctcaatctcatcatctttttgagagagctctggattgctcttctttatgatctgaacaacagtctctagtttgtcataaggcaagtcttgaagctcttcactgagtctccgtttctcttccaaggtgaggtccctgttgttaacaggtgcttcctcttcttcagctttctctggagcagtaattacagcttcaggttccacagggattgtcatagattcttctctctcccaagtcctattttcaagtaccggagctgctactggtggcggtggaggaggaggaggagaagacggggatggtgaaggaacaatggcaggtaatggctctacaataggagcaatggatggagcaggagcagggaactcaatatcacgagttggtttgaacttcctatgaagattatcatactgcatttcaatggatacccatttatcttcaaacatgttcaacaaaagctcagcaaaacgatacacatcatgcccaatcggattatacaaaatcgcattgttaaaagtaagtctaacatcttcagcgaaatccaatggcgacttatacaaacttttccccaacttagtcttcactgtacccaaatccataggctctttaacaatattgtgataatcatgcaagccaagtcctttagcatccacagggacattgaatacccatgcactcttatgcttcatcaatttcgtaagcaaactgttacagttcttaaaaatctgaaccgtacctttatcagctccatgcccacttttcttacctcctccattccctgttttcaccttcttgcttctccctacaacaccacttttagccattgacccaccaggattagcttcgggatcgaaccgtttgatcaagctcctaacctcatcaagctcagattttagtttccgcttcaagttcctaacctcaagcttcgaaatcgagctcagacttatcttcaacatgtgatgatcgtcctccgacgcaaacgagttcgaaggagatacaagaggaacagatcgttcctgtctagaaactcccattggtttgggtcggttctggcttgagctccacttatgtttcttcgtctttgaagctccaccacctgatatatgttcagaagacattcccctgacaaccaaatttggggtttctctagggttttttgagctccgaggtaccaagattgaggaatttaaacacgaaatcgaagattggtgagatcgaaagagaagaaaattagggttcaatggttacttcaaaaaaagatcgctctggattttttgcaaagctgaaaaaaaaaactaaagggaaacaatggtgagagccgcgagaatagcgtaagctcacgcgctttagaacccgagaaatttgggaaaacaaacacatgtgtgtagtaagggaaagtaatctcaggtgtcccccaacaatattaccaaaccggtacgaaccgtatatatacataggctaatcagataaaagtaagagccatctccttatctcattgcaaaccaaactatcatatgcttctcatatctttcatctccttactctttaatggaaggtatcctgtttttaacgtttttgtctagtcgtttcattaattgggtggtgggtgttatgattttcgccatgtcttctactgtttctctctttccaaattgaataagttaccagctgaaaagaatatcttagtaggaataagcgaatctttccatgaatgttgtccgtgagtagccttagtaccatgttccaatcggtagagaaatctgcagctaagagtttttaagtgagactcgaccaaacttcctttgagtattggcatgcgaagaacaagtggtttctagtttctacatgctcttgacaaaacacacacgaggtattaatccttacattccaagtaaacaatctatctcttgtagttaaacggttatgagttattagccaaattagaaattaaaagagtattttggtgtggcgtgcgagaaccagataccttcataccttccttatttggtttttgctcccgtgttgcttcccatgtgtctttggtgttgaatgtggcctgaaatcgatcatctttacctctccaaagaactacatcctctgtttcgactagccctttggaccaaagctcctctattaaatcctccgatccatttggtttaaatgtacgactcgatgccttctccgtttatgcgttagtagtacttcgtaaatgttccttttacgtgacgtctaactgcaaaccaattcgtattatctctatctagaattatttttttcaaaaatatacaaggtgtactatataatatgatattcattcatatgatgatatgacaacactatcattttcaatatttacatttcttccataaccgcaagctagcatgactcaatcaagtcaattcaaaaggaaatctacgaatttattgaatttgtttctatttctggcaactgataaaaatagtcatacgtatatataaagtcttattactagttcaccaaattaaaaccatgcacccattgaccaaaaagctcttccataaccaggtatacattgcatggaaatgtattgatctttttcaaattcaagaatagtctatatatatatatatatattaataattaggtgttgaacaattcacaaaactaaaacctttgacctattaacacaaatggctcaatcatctggacacgtttcttatgtggcggttacggttccaatagctattgtcatgacagtgttgtgcttgtttctagccaacgccgtgacctatgcccggagaccgaccacctacattgtgggaggcgacgatggttgggatccggttgttccgatggacacttgggcacgaggcaaaaccttttatgctggtgatattctcggtatgtatcaatgatcttaaaaaaaatcttggtacggtagtgtgattgataaaccatatccatcatactttaatattggcttaactttaatctgctaagacaataaatttatattggtatattcatggtgatacattgcagaattcaaatacgattatcagagatttaatttgattgtggtaaaccgaactggttatgaaacttgtgaagcgaacgttggagcgatagaatattcgtccggagacgataagatccagcttaattacggttataattatttcatcggaacatatactcccgaggattgtaccaccggtttaaaaatggccatcaaagcattggctccaagataaattaaatgaagcaacttattataacaatgataagtggaatgattagtgttttcgtacgtagtgttggagttatttgtaacagtttaaaatgttagattaataaatatcttattaaaattcatttgcgttttaattagtagcttttcactttataaataatctaatgatatctagtttatgtgctcaaaacgtaaatattcttaggttatatattttctgttctaaaataaaatctaatgatgtagaatctcgttctttgtaatcaacaaaagtgaaatatttataacaagttcttagattgaatctgtcttaaattatcaaactaaagcaagttttagtctctcttttttttctttcataatattcgttcttaccaaaaacttgtaataaatatcatgggatcgatattttgactctacgatctcacatggaaagacaaaataaatgacgaggaaaacagaaaccggatcaagattcagagaattgtgacttgatccacttggcacacatgcatagatatatagtcacagcatggatagtagtatacatacacatttacacagtaccattgttatgtatatattgaatcttaataaaggaactgtccagattgaatgatcaggtaagatcaaggaatagatagacacgaacaggatccacgtgttcagcttcagacactctcatatcacatctgtctcctaattgcttccactttgcttcttttaagctctctctcttcaagtcttcttctcttgccttttcttccttcttctttatccattaaggtttgatcctctcacttaaattagggttatatatggctacatctgctagaagagcatatggattcgggagagctgacgaggcgactcacccggactccattagagccactttggctgagtttctttccacgttcgtcttcgtctttgctggagaaggctcaatcctcgctctaggttagtagtttatacatacatagggtcatagggaatatccccccaaaaatatatacattttcagctatatactgttagcatctttacttgagagagtattagtcaaaacaaacactagtactctagtagtatagctcctacacaaacttatttatataatcaattttagaatttgttttaataaggaatgaatatataagacttcctttgaatttagttatagtgaatgttatcgttggaactatgcataatcatgcatgcatgtgtgatatgaactatgttatatgtgttattggacagacaagttgtattgggacacggcggctcacacggggacaaacacgcctggagggttagttctggtggcgttagctcatgcattggccttgttcgcggctgtttctgcagccatcaatgtctctggtggccacgtcaaccccgctgtcacttttgctgctctaatcggaggcaggatctcggtcattcgagctatctactattgggttgctcagcttataggtgctatcctcgcttgtctcttgttgaggcttgccactaatggcttggtatattacttctcatcaatctctatatattactattgtctttttggtacagttttgtgttgaaccaagaactttgtatatatctctgtaaatatatgctcatgaatgaatgtgattctctgtgatgcagagaccagtaggtttccatgtagcatcaggagttagtgagcttcatgggctactgatggagatcatacttacatttgctttggtttatgttgtctactcgaccgcaatcgatccaaagagggggagtattgggatcatagcgccactagccatcgggctcatagttggggcaaacattttggtgggaggacctttcgatggagcctctatgaatccggctagagcctttggtccagcattagtgggatggaggtggagtaaccattggatctattgggttggaccgttcattggtggtgcactcgccgcactgatctatgagtacatgatcatccccagcgtgaacgaacctcctcaccacagtacccaccaaccattggctccggaagattactagaccggagcagtcttcatgtagagggttctctctttgtataaatagtctctgtgtttgcttgtgttgtttgtctctttacttgttttgttttcctgccatttcctatgtataattgagtccacaccaaaatctgttttcttgtattgtatatcttacagaataataaagattttcaatgatcggataaatatggggacatctatggctttctctcacatctctgtacatatgtaacaatgcctaacttcctctgtttctataaatcagtttttgcatctgaaacctgcaaaagcttcttccttctcatgttaagaaggtcctctcatcttttcaacaatctgtctactcttctcctccatgtgacgcctcttctcctccaatttctcccccattttcttcccaagatccaacattcttgctcttcttccctgttttttcccccttgaatcatcttcttcgcttgaagctacagacctagatggtgactgaacagcagaaacctctctgctactccctcttgagttcgtctcctgcttgttactgctgctgggtaccagtagtggagttttcagttcttccaaggatttatcattctctattgttacagttgtggagtttgacaatggcgtagacataatagcttctgcttcagtattctgtttctggaaagcagtggccgctttctgcacttgctcagactgagcacaggaggaagaagccaatgtccctatttcagaaataatcttctgggtggcgtttgcagttctctgcatttgctcagcttgaagacatgagaacgaagtcggtggcttgtcagatttagatctcgcttctgttgcatgggaggtattgtgatcgttttcttgattcagccacatgaatggagcggctttgcgttgaacccaatcatctttttcagcaatcatccaaggaatcgttaggctttcacagttgggaagaaccaccgcttctcgtattgccgtctacagaatcataatgttatcacattctgtcagctcaaagtcctctagagaacaaaagaagagaatcacaaaggagaaagaaactgtaccttaaaccggttgatcaagaacattgcaacatggctgttggtgattttgtgttccccaacagaagatgcgagatcgaattcgatatccggcatgctcgtgaatccaaaccataattgatcagaaggaggcggcttcatgtgtacccgcagtgtccctcgaagagaagacacccgtattgacaaagagataggcacctgcatttgagaaacagagatttctagaaaaccatattgagacatgaatgactagaaaagcaaaacataagaacccaaaaaaggttatgaggagaactaaggataggttatatcaagccaacaagcaaaataaagaataatcttgtggatgtttaggaaaaggagaatcaacctgagaaacttgttcagcaattgttttaagaatagacttccacctggatacaccatttggagctgccttcgtacctcttgagctcttggattcatctgcaaccaacagaaagatggtaagaaatcaatcgtaattatcaccttgagaaaaagttttgaacaggaatcacgctcgcatgatctctgtgggttaaactagaaaagactgcattaatccacattaagtaaacattgaactagcctgctttattggctccaccatttttcacttctcctgcattaacagtttccacagggaagactaattgcttttcaaaatcttcaacaccttcagcaaaatttgacgggactacccctgaagaccttggctgcaaccttgtatcggttatgccttgttgcagatccacctcacggatgtcaacccgtgtttcaacgtcaatcaccacgtcaccagagtattcaatatctagttcgaatgcccacacaccactcatctccattggaagaacccgtgtagcatgtatatgaggtgggagatttccagtgtcaacatcggagcagattagttcgcctatgtagctcggagtcctcatgttagataacaaccgctgtttaaaaccaaaatgttacatctttgttttgttatagaaatcaaatcatctcaaatttctaagttcatcctaaggttcagaatcatgaaaagtgcagacctgaattcgtgcttgcactgaattcttcactcctgttttccgtttgagatcgaaaaatagcctagaaatgagcaagttcaacgctaatgttccttcatccatgtcaaccttttcttcagagtctccatctgaaaccccagaaagatgactgaccccagaaatatgactgctatggctcacagaacgtgaaaaaataggcacatcagtatcatctgtcatattattctttcctggaaagcacttccctgagctacttccatgatgtgaataggttttcctgtcttcacgatttgatcgctttctagaaaatttcttcaagaacaagcgaacctttgaggatgaaccatccgttctgttccctttgtcaagtgtctcaaaactaaagccaagtgatggtttcataaatgaaggatatgcaacattaagagaagtcacataattacggaaatcttctttcaatttggtggagtaccaaataaacctttcctgattttcacaagaagcaagacgaagggctttacaccatgattccttttcccaagaagtctccagatagatgtaaaacacctggtttcccttgtataaggctggagaaatcttgctttcaacttttattggaaaccttttggccctaagaaacaaaagaaaacaaaacttcatgatcataagaagttccacttaatcattaaaaaagggtcataaagaaagaggtggtaccattttcttgtagggagatcagagcctgaaacagcctcaatactgcaacctattaaagaaacggtagtctcactctgagtgctatcagcatctgacaagataagcttgtgatctttgattcgagcgaactttcgaagtggatgaatctccaataagcctctcttcctcttctgctcttttggtaacttttccttcatccagttcttcagaccttcatccaattccaaaatccataccactccctgaaaatagatacaaaacttcattacagacattgagaaagaaacccaaaatggcagaaacagatattgtctggctcctaacttcaactacaattcaaacggtctcgattgaaagttggtgactttaataatcaatggaccctaagagccactttagctacaatctcaatcgaaatttccaatgaaacgaactcaattctcacaacggaagcaacatgcacgcacacatttcagaattaagacccagaattcagttttctaaaagataatatctttagagaaggaacaaaacccagaattcttctctctaagaaacaaaacccttaagaaactcaaaaagaggaattaagagcgatcacctgtttgttgatacagaaatcgatggattcgcgaggattaaaatccttgatagatggatcagagacgggttttgactcaatacgatctctcttgcgattcaatcgcttcaggagatacataaatcccgcagcttcagcggataagacggcgagaattcccaggaaaaatccagagaggaacaccacgaaacccacaaacgaaaacatctcccggaagctctgaaaccgtcctctggtggcgaggaaatgtggtgagagaaggaagcaaaaggaggagaaagattcgaggcgttgaagttgttcatgtcagtgtagaagaacaaggacaagtcaaaaataagagaggaagagaaactctgggattagccatcattcatctctggaacctcaattccaacttccaaccaaatattttttgtcctaagattaacatttttaattactgtctactgttggttcaattaaaaactccattacatagagaaattttaaatcaaatttcgtaaataatcttttttttttaatgggttaccttttctttgtttttgcagaattaaggtgccaaaacaaaatctagtatatatgtggtcaaagtatatgattttacaaaatatagataatatggataatttagaaagctaaatttggttcaaaataaccaaaacagtgaatggtataatcgtaattaaggaacaagttttcgcgggtgatgtatggcgaaaccactcaactatatatatgatctctagttctttttgtctaaaacattttttggtaccagagaaaagttaataattttgtttaggtttagcaaatgttgaccctttcttcggctgtaacgacgaaccaatttacataaaaaggaaaacattgacagatatgtttggacaacaaagttatctggtcagatatccatacaaacataaaacacatcctagaaaaaaaaacttgagacaatactcataggtttcatttccataatctctcacaaaacaaaaaaaacttccttctcataaagccaaaaacaagcctaattctctttattttccacgggttcaagcagaaggaaacgaaacctctacatttcgagttgctatatacctaagattcttaaaacaactaaaaacagagcaaaaaaacagagtcttggctaagaaaacaactaaaaacagagcaaaaaaacagagtcttggctctctttttttggatctacaagctcatgttcatggagaagaagctatggtcatggtgatcttgaacattaagctgtttcagccacgaatcagctgcactgcgaagataaactatacgtccttggtcaccacattcttgattcctccacaaatctccttgcaatttgtaactaactaaaccaaaaggagccaaaggtatactcttggtcaccggtccttcatcaaaacacaatgtttcttctttcatggtttcgttaatctcatcgtctccctctatcaagttacctatgaagtcgaacatcaaaaagctagttgtttcaaagtttgcaccaagatatgtctaaagctgagaaattttataacaagaaaaatccttgcaagttgtatgctataacaacagtatatacaaataccttggaaagccgaagataaagtatgataactcaagaaacatgtcgataaatctttatcggtcttccgagagggaatgtggtaaattggatacctaaatccgcattaaaagttcaagattttatcatcatcgaggccagaaaccaattgcaaatcaaatacgcatagaatttctatacttaccaagcaatggccaaccaacttgctggagacaaatcaacactccttagagtcgaaagtcccggatacttctcagccaattcatttacctaaaacaaacccaaagaagggagaaaaaaattgtaagctagttaggtttttgatgcaagatgaagagaatgaggtcacaaaatttgaaatggatgagaaccttagcggtaagaggaacacgcaagtgcggtttaacggactcaaagtactgaaaatcaatagaaccgagcttatctcgcatcaatgaagaagtaccatcgatctcataacccgaatcatcagaaacagaatcccatattttgctagaaccactgctcattgacctagacaacttctcaatctcactatcatcactccaacattcactctcacaatcaaccacatcactatgaatcctgcaaaaaccaatgattcactcctcaagttccttgacactgacacatatatagaacaacactctttatatgtaatagatcaaacctagaaatggctgtagatttgttagtatagatttgaatggcggatagatacgggacatagtactgcataacggattcaccattgtttaagtcgacctttgatccaagtccatacgcgcttggctcatcaaaacagtcccaaagatcactaagcctgaaatattcaatctcatctttgttctcatggatccacaaactgttcaaatcattcttgcagctctgcaaattaacatcaaagtttaagtagctttttaaacaattaaagcccatgtgtttagtgatataaagctaactatactccacatattaaatactgttcataaatatacaccacatgcaattaatcgcacatttaattacaatagttgctgaaagagacagtcatctaatggcataaagacgacgaaggcacattcacacaggaatataccttggtaaatccagaatattcaaaccaatttcagtataagacattttttatgattttgatttttttctctattacattttcaatacacaaattgctgtcgtaaggtttccacgtggtgaaagaaaacttcacgaaatgggacataaaatgctaaattttctttgtccttatttcaaatttcaacaaattcttatttaataattgtattgtcaatatctaactaattaaaaacacgagattttggggaatttgttttaactaaaatgattagttgaaaaccagcaaaaatgctttgacgcggattctcggaagcgaaacaaaaatcacaccaattgaaaaaacttttttttttttttttgatcattgccaatagaagaaacttagaaacagttagtagttttttaaaaaatatcataaaatagattacctgtgataaagagaaagaaggaggttttggagtgattcctctgagaaatctttcaaggtttgatcggagtttcgtcgacgatgatgaccaccaccacattctctctcccaccatctctctaaatattagatgactatattaaacagcttaggctctctcttagaaaatttaaagaaaaacaagaactcgtagatgagtttactgaatttagatgaaatcttttaggggaagaaagtggtagcaaggtttgaatgaaggtttttggagtatgatttgcttctatttattattgcaagaaagaaagaaagaaaaacgaacacgaccaaaagcttctctctctcctctggctctttctctcttttttcacttatcgtaatcttttttattttgtctggtaagtaatttagcaattgaccatatctctccttttgtccaaaaaaaaaaaaaaaaaaaaaccatatctctcctttctctctttccctctttaagatcttcttatcgttaatcttttttacttttgttaggtaactaattttccattagatatttcaaagtgagcatgttttaaaaataaactctaataataccaagtttgtttcaaatttagaagaatcggcaaagctttgtattttttttgttcgtgaaatgatgtcaacaaattatattcaaagcaaaatggctaaaaatatttttgttgtcagtttttaaaattgaaccttttctgttcacatttatttatctatttatcattttctcattttcaatcatcatgttataaaacaaaaccaaagaaatttgatatttataaacatatatgatatgtcgatatatagctgaactttgacgtttggaatttaacaggccacaagacatatatcagtcgacataaagtttgtagagtggcaatcttagtcacctctcccatgaacaaacctttgataggcaatatatgtatcatctttccatatttggggttccatgagtctagctcccaaaatgattatgagtcttaatcctattatgaacatagttaagagcatgcatgacgacattgacttcttagttcttatatggattggagccagtcaaatgatttcccaatattcaagaagataaaagttatttttttctattatttcagctaaatcaacaaaatctagagcatttttattttaccaactagcaaaaactataacatagagctaaaagaatgttgtatgtggtgacagtggtgatggtctttatttccggcaaaataatagtcttctagaaacagtcaaaatcgtatttcgtacaatgtgaccatcatttttataatattttttgtttgataaagaattttgaaagaattgatgagtgaaaacgaaaccagagattgtacttactgtgtgcaagagagtgatgggttaatctggtctccacatgtcgtcgaagctgcgtcgatctctcgcgttttacttatctcttctattttgttttcttccttatcttgtcttttcttttctttacttcacccgacaacaactcatcgtttactcatcagcgatatcatttaatttactctcatctaatctaattttaaaccgctagtttgtaaaacaaactcttccaaaaagaaactttacgatcacaaattcgaagaaacactactatttttgattaaaaagagataaattattagttaatatactttagttaaagtctctaccggagacatggtttctttaggttgagtcacgtgttttggttccttctcgtcgttttcctcgtttcttatattatttttataatcaaatcatttcggaccgtacgatgcgacggatacaaataaacgtatcatttcacttttctcgtctttgcggtggtttaacttttgtttgtgtgataactaatctatcatattgaatgattttaagaacgaaaaggtaagtaaaagctatttttgaaaaatacagtagtatgtattcgtttcttcttcctcagtctgtaagtaaacacggattcaatagtgaaaagaaaaaagaaaacacggattcaattattgagcactaattggttaaaggcccattatgttccattttgttttttgggctttgactcttttgtcacacatgcgttgacgtagtagaattttataaacattttagcccaatataacattctttcagcatcttgatccttcctgtatgataaaattaaaaatcgccatgaatctttggaaatcaacaaagggccagaacttataagaatatttgttttgattattaaggtctataaatgtctgtcaaacaaaaatgcatgtattgtctatatcatcaaagtatgaatatccaatactgttaaaatatttatttatccgcataaatacaaatacctctgaatatagtttttatttggattaaatactagaatttaattaagaattaattgtctaaataaccctaaaaaataaaataaaattacaaacaggcatttacgtaacgtaatgacttacagaaacaagcacttttatctttgcaaaataacggatttaccttcattcatccacaatattacaataatagctgagacttttgacgacgactatggtgaactccggccatagaaactcaaatgacggtgtgataaacgaaaaatcgtgaaagacatgactcgaatctgaaacagttgtgtaaggatctctctgtcaccgttggcatataaataccattgtttctctcctttagattccaaatttctgttttaatcacactctctgttgttgcagtttagatctatttctgaaatctcaatagaaatctttcccgattcgtttgtatgtgatctggtttttgtaaatagccattatcgggagaaattatgttgaaatcaatttctcctttgtcacgtcgagatcaacttctctgatattttccttcatcatttcctattacatctcacaactctaagaatatcttctctgcaatctcaatgtcaatcacaattcatcaattccaaacacaaatctttttcttctcctaactatcacaaaattagatgagtgtttatgattagaacccttgggttccatatatactatctcattagggtttagattttgcttgtattctcttaattttgtttgattaaaatcgatttcaaggtttctgtaaataaataaatacaaattgaagaagaagaacgatggagaagaagcatgaacaatgaaacaggggcaaatcgtaagttggcatatctgaaagtttcttttttcaaatcccatctcaaaaatggttaccgagaggaagcaaatgtttttggtcgacggagtaacgtggtggtggtggtcgagaaagaagaaagaaggagatgatacagatgacaggggtaaaacagtctttttccctagcacaaagtactctttttcaaaatccaacacagaaaaacctaaattcaaagatttggcaaaaaaaagccctgttttgacaataaaccctttaattagttgaaacaattatagaaataaaaggaatatttggccacaaaataaataaatagttttagcaaaggtgtgttttcccctgtgcattactcaatcataaattttacaaaaatttatagtcaatgagatccataagaatacagagaaattttgaattggttagaaatatgtttgtttttttcgataacttaactaacaaaatcgaaagtcttatgaattcaaagatattatttagtttccaataattattttacttttgattttttttttgttgaattaatcattaatgacaaatggacctacgaagaatgccatcaagggtccttattaacaagtaccaacaaatcaacaataggctcgtactcctttctaatttttcggcacttttttgtcaacaatatttcagcatttatatacatggttttataattaaaagacaaattattatttgtaacatatgtctcctactacaccgaaaattaccggaaaaaaaaacataatgtacatatctcaaaagacaaaaaattaaataaaaacttcaatttcaaagtagtaactttcattttaacaaaaaaaaaaagtagtaactttcattcaagcatataatttttctgtaagatgcttcataactaacttttaatcattttcattaccattaagcaaaagctataaaatcccataattcatatacataacaaaataacaatcttccatcaaataacttttatctatgatattaaaaaaaaagagaggccagatttgggggtggtctattcatactaaatgcaaaccatctatcgactaccagactgcattaaatgtaacaagtaacaacaaccaaaaaaaaagatgaaaattcaccacatcaacagtattggaccccactttcttcttaatttttcattcaattcttctcccaaccatctctttgctgtcttcataactatctcatttcttgtacgaatcaagaattttttttcatttttgaaaccaaataaataaataaaaatctcattatcttgttagagataaaaagagaaacaaccaaaaagaaagaagaagaagtgtttgttctgtttcagtcattcaagttcatgagaatagaaacgagtccaagtttgttgttcatgcaaaattctcatgactctgttacactcctgaatttcttctacttatattccattcaataacttttcttcttctatcagttcaacgttcacacactttttccatttcctcgacaaactcctttttttctctcacttttctcgaattctttttttttttttttctctcaacgaaacataaatcctctgttttggtttaagagatggagatagaagcaagcagacaacaaaccaccgtaccggtttcagtcggcggtgggaattttccggttggtgggttaagtccgttgagtgaagctatatggagagagaaagctccaacggagtttgtcggagacgtgtcagcgaggcttacgtggcaagatctgacggtgatggtgactatgggagatggtgagactcaaaatgttcttgaaggtcttaccggttacgctgaaccgggatctctcacggctctcatgggcccttccggctccgggaaatctactatgctcgacgcattagctagccgcctcgctgctaacgcttttctctccggcaccgttcttcttaacggccgcaaaaccaaactctcctttggaacagctgttagtattttatacacaacccttaagcttcaatctttcaaacgtacacatgcttttgcttaggtttcagtttacatgttgtcttggtatgacatataagaatgttcttggattttggatcttagctattcatagtgttttggaaaagagaaaaaaaaaaacaaaggaatcttggtcttttatatataatttagtcatgtttaatgaatttggtttattatacaggcatatgtgacccaagacgataacttgattggtacgttaactgtgagagagacgatttggtattcagcgagagttcgtcttccggacaagatgttacggtcggagaagcgtgctctagtggaaaggacaataatagagatgggtcttcaggattgtgcagatactgtcataggaaattggcatttgcgtggaattagtggtggagagaagagaagagtcagtattgctcttgagattttaatgagacctcgtttgctgtttctcgatgagccaacaagtggtcttgataggtaaagtgtttcagaaaaaagcttttcttaaattttccgattctgtaaactgattaatccctgatgattgtttcgctttttctgtatagtgcttctgctttctttgtgactcagactttgcgtgctttatcacgagatggaaggacggtgatagcatcgatccaccaaccgagcagtgaggtttttgagttgtttgatcggttgtatctgctttctggaggcaaaactgtttactttggtcaagcttcagatgcatatgaggcaagaaactagaccaaaagaaaacattattctctgaagaattcttggaaactaatcagtgttttgtactttcgaatgcagttctttgcacaagctgggtttccatgtcctgcgttaaggaacccttctgatcatttcctgagatgcataaactcagactttgacaaagttagagccactttgaaaggttctatgaagctaagggtactgaaaaaccttcccttttaactgatatcatttctctgcaagtttcattttgctgatggacttgttattctacttcccagtttgaagcaagcgatgatccgttggaaaagattaccacagccgaagctattagactattggttgactattaccacacttctgattactactacacagcaaaggctaaggttgaggagatatcccaatttgtaagtactctttgttcctttctcgagcttttgttaggacgagtcacttgcctcttttaaccattctccgctcgtctctgttaacagaaagggactattcttgactccggaggcagccaggctagtttccttctgcagacctacactttaacaaagcgatcattcatcaacatgtcaagggactttggttattactggctcagacttctaatttacatcttggtcacagtctgcattggaaccatctatctgaacgttgggactagctacagcgccattctggtattgctaatatcatttactggagagcaactcacactcagaattgtattaatcttacctctttcggtttgtgaattcaggcacggggctcatgtgcgtctttcgtctttggctttgtaacattcatgtcaattggtggatttccttcgttcgttgaagacatgaaggttagttagctcctcctgcagttttttttcttgcgcaaatagatgaaccaaacagttttgttaaactgaaaatgattgcaggtcttccaaagagagagactaaacgggcactatggagtagctgcgtttgtgatagccaacacattatctgcaacaccattcctgatcatgataactttcatctccgggacaatctgttacttcatggtgggtctgcatccaggattcactcactacctcttctttgttctctgcctctatgcaagtgtcaccgttgtggagagcttaatgatggcaattgctagtattgttcccaacttcctcatgggtatcatcatcggagctggaatccaggtgatttctccgaccactttcatcatagacttcttaaaagcagaagagaagctcgtcctaaatctggttgtctgtacttttgtttcaggggatcttcatgctggtttctggattcttcaggcttccaaatgacatcccaaaacctttctggcgttacccaatgtcctacatcagcttccacttctgggctctacaagtaaatattgttgaaacaagaaaatgtttcatatcagcccatcatcttgtgatcaaaatagcagagagctaataccgtcttgttttacttgttctccagggtcagtaccagaatgatctgagaggcttgacgtttgacagccaagggagtgctttcaagattccgggtgaatatgttcttgagaacgtctttcagatcgacttgcatcgatcaaaatggattaacctcagtgtgattcttagcatgattatcatctaccgcatcatcttcttcatcatgattaagaccaacgaggatgttactccttgggtcagaggttacatagcacgcagaaggatgaagcagaagaatggaactcagaacaccacagttgcaccagatggtcttacccagtctccttctctgagaaattacattgctacacgaacagatggagctcgcagatggtagagcttgatcctgtccagtgtttgaagatacttcatgaaaattgatcaaagcaaagccaccatatttcactaggcctgcaatatcaaaactccatgtaatgtgacagcagagaaacttcgagtgtgttagttatagaaatattaaaaccacggatttgtctaaaataatcactactacatttatttttctactttggtattaacaagtaccatcttgttgcattacagtttgcattgtgccgaaattacagcagatagattaagttgtgaattgttacaagctttgtttgtacatgttgaaatgaaaattgagttctgagttctgacaagtgttacacctgaagaacctcaaagaatgactactagttcttcctggaacaggcttgtaattaaacttcattagcttctgcttcagcactcatctgcttttgctgtgtgctgttctcatctgatcacttgcccatggtagaccaacgaaacactgtaagcaatcacaagggggagcagtgaacataatataaagtgacaagtcatgaatgccctacatcactagcctctaaaatctctcaaatatgatcaaaccaatggcgcattttgctcttctgaatcgcgatatacatgccatttttcatatctctttactccatgcaagaccggtctaagtctgggagcactaatgcagtctgaacagcaacaacccttcaagtcgacaacacattctgcacagcatctgaacaaaagatagaggtaagtttagggaaaacaatggaaataccagtcattgtcaatcaaaatcaaacttttgtgagtcatacattatttgtaactaatgtctattttgtgttaatagacataagaagatgaaacagaagcgataatgcaactcacaagaaaagccgattgcagtcaaggttagcacagttccgatgtcttagttcctgaacttgggaattacaaagatagcatcttgcaaaacttgtatccacgggcgtttgtggagttcttccggcttcatccacgacgttatcacctacggctttatccacgacgttgtcattgtaggcagctggtgggagagaaagacgagagtcaaacacaaacagatttccaacccattcggcggtgccttcttctttaaggtaatgggaaactccacccttcaatgtatacaggttcttgaaaccccgctgtctgaaaagaaatttgacttctcacaagaaagttatttgggaaacttctttcagatattagtaagagaatgaaggagtagaagccacagtgctacctcaaaactgttgaatacacatcacaacgtatacctccagtacaatacatcagtatatctgtcttttccttgtcaacatttatcaaagggtctgaaggggcttcctgtagtgtagaggaatagtcaaaattcttcactgttagatatatataccttccgtactttacaatatgtaacctatagaagagacttgtctgatcacttcatgttagtctacagattgtaaataagaacttttcagctgtcacagtttaggagtagttgtaccttttcatcagatagcccaaaagaagtgttccgaaagcaatcaacttcaggtctatgtgccccacgaaagtgaccaacatcccactcataacctgttcaaaccaaatgtttatcatttccaaaaaccagtaggtttattttttcctataacatgctaacacattttaagaatcacggacaattacatgcgtgcacaactggagataaagtgggaaaccacaatacaactatcagaaaagaatgatcagtcatggagatactagatatagataataagtgaaatcaagactgttctgttactatagacaatgagaaggcaaagtaaataccatttctgacatccaataatatgtaacttttgccactatttgaaggtgaggcttcatcatcatccgttaagtctttcagtttccttttccattcagatggctctaagggttttgctcgcatgggtggatcaagtaggggaaggtgtgaaattcctccctcatactataggaaaaaagaaacgcaactaatggtaagtaatcttacaccatatttcacaccatatttgaaggcattgcacataagtaaagtggtgttgtgggatgtggcttgcctgcactaaggagggtttgttctgtagcttcaacttagggaatgcatgcctattcatagcgggagacatctggacaagcaaatccgagaatctatcatctccttttaaccattcaacatatgcaagagcatctttagatggtccactgtactgcagaaaacaaggattacaagatgtaaacacacaagatttgtcctagcttgatatgcaggcatcctcaaatagtttgatgaaagattaatccaaagctaaatatgttaacagaacctgcgcgttgattccttgttcattgagatatattcgacctcgtatattcaaatcctggaatacgaaaaaccattgaaaaagattcaaattttaaaccaaagagaacatttcagaatctacatgtatatgaattttggtttttcaaacaacttgacaattcacattctgtaaaagacggacctttaagaatgagaggtgcttctcaatctcagcctcaggatctccgattgatacaaaccgatagaagttaacaacaatgaaatcttctccttcgtcatcgaatttcgcgtaaccatttcttcctctgttacggcatttgcaggagaaggtccatcttctggtgggtttaaactctgagaggagatgttttggtcgggagcaaatctgattactcaaaacatattgtttgagtcgcaatggttcgccggagaaacgagctttggttaaagttataggtagtggagtagtcaaagagactgagagtgttgccgccggcgaaactctcattatcttctcgcgggtggagaaaaagagacggcatctttctttaatctaaagatctttatgtcgtatgaggccttaagcccaattcaagcccagtttgtcttatagctaagataagaagagattagtaagaaaatattccaaatttatatcaaactttagtgtatactattctggctatttaattcgatttagattggattgttatattaagaccttatctaatttacatttagacagtatccagttttatcatccactagtcaatgaaagggacatttttcgtcaggggtgatcgaaatatgacgtcgtcaagctttgaccacaaatatataaacatatcaacacgtcaacgaaattatcatatgctcgaccacaaactaaataatacaccgagcatttaaccaaaatcagatgcactttgactttgacttttgtatccgttctgcttattaatagaaatctgttttctcatctcttttcaattcatactaaaaagtttccattaaaagaaaacttcctacaatgtcatcacttctctatatcttcctcctcttggccgtcttcatcagccaccgtggagtcaccaccgaagcagccgtcgaaccagttaaggacatcaatggaaaatctctcctcacaggcgtcaactactacatcttgcctgtaattcgcggccgtggaggcggactaaccatgtcaaacttaaagaccgaaacctgtcccacaagtgtgatccaagaccaatttgaagtctctcaaggcctaccggttaaattctcaccatatgacaaatcaagaaccatccctgtctcaactgatgtaaacatcaaattctctccaacttcgatctgggaattagccaatttcgacgagacgacgaaacaatggttcatttcaacttgtggcgttgaagggaatcccggtcagaaaacggttgataactggttcaagatcgacaaatttgaaaaagattacaagatcaggttttgtcctactgtctgcaatttctgcaaagtcatctgtagagacgttggagtgtttgtgcaagatggaaagagaagacttgctttaagtgatgttccactaaaggttatgttcaaaagagcatactagaagatgataaaacaaattccacaagaatttacaatgcttttgtaacaccattaataataaataagaacaatgcttgtttctgcatcttaatctatacattctttagaaatcatcaccacggaagaaaggtccattgaagaatgaagtggagaaagtacctccactgttaggaaatagagtgaggaagcaaatgagtccaaggactataccccaagcgaacctatcgtcccctacaggtgtgatttcgtcttttgcgggtgtttcttcgccaccgcggaagaaggttgcgaatagcccccaagctaaacacaagacgcttccgctgagacctccgataccaagaaggagtgatgtggtaaatgagagaattgcagctgtgcttcttccaaacatggcttgagcgattcgacctccttcaagtcttccacatggtaataagttcaatgaagtcactaccatacctgaaaagagttaaaatgaggtttaggaaatgataagaaactataatgtaaaccaacaaaagttatcaagtttacccaaaagaccagcgaaagcgagcggatcaactggaacaccaactccttcaaccgcattaggtaatacattaccaagatcatccgcataaggaccaacaacgaattggacaaatgaaagcaacgggttattgtcaaagaactgtggtcttatatacctatatagaatgttaaacaaccaatcagaaaagtgcgttgaacaatagcaaaagaaagaattcaaatttaatgaagcacttacaaagcattgtcacctccattgaaactaccatcagatataaacgcagctgctgcaagcagaagcgaggtcaggtacgcgctagctgtacgggctactgggatgtcgaataacgcctttttattaggaagcaatgactcataattgttcataactcctaagcaaccagtccaatttgatggcacaagaaacgacgggcttaatttgacaccgtgtcgcgcagcggttactctagttgctatctgaagcaaagaactaacaggtttagttacatgtatacagcaaaggaacctggagttagttcttttaatttgcttcggcttacctctgagacacctaagatggaaaggaacccgccaaaaagaggaactacattagcaatgtagtcatcaaaagtggcgtcgggtttcaggaaaaacccactcataagagctatggttccaaaggttgtaacacataaagcaattgcactaacatatccccaaggagtgcttaatctagttgattcaaactgtagatcaatttccgccttcggctgcaccatacacacctttaaaagcacaaataacaaacaattcacaattagcttaaatcctgagatcaaagaacatcaaagttaaagagttttcaaagctttcttctacctgctttgtgatctcattggacctttcttccataaaccacacaacaacatcacgcccagctgcttcagatagcttagcttcaagcttaggtgtgacttcatcaatgggttttctcaggttcccaatgaagattcctccatctccaaaccggcgaacatccgtagcgaaaaatgtatcgaacccaaaacagctcttcaactgtcccatcatcacaaaccactttcaaaaacaatgcattccaacaaaacaaagaagaatcatagcataagagaaatgaattcatttttttaccttgttgagatcaagagccttgaaagtctcttctgctttctcaagcctttctttctctttagtcaaactatcacgagccaagctgttgtaaattccaatgatcggattctcactgttgctttccttgttcagctccttgagcttacgatcagttctcgtcttctcaagctttatcgcagcttcgatagatggattccccataaacttcttgaactcctcgtctgttttccaatccatctcttgctgcttcgacttcttttcctcctcttcttcactgctctctggagaaggcggcgcattattgttatcgtggtcttctttttgctcctccgctaacgccaccggagaaggagcttcgttcacaggttcacgaacgcgatcatcttccgctgaacatctcaaagaatgtctgcttctcgttgtctgattcacagaagctttcccaaagttcgaaaattctgctctgtcaaagcgacgaagatgcaaactgtgacaggatttaagagttaaggaagatgatggagtagaaacaaagagagaagccatggtttacgaaaactcagaaagattgagatttgacgacgaatagacatgtctctgagagagaatttgtagagaaagtgatgaaatgtctggaaagtttgagaagaaactcatacagtacaggtggaatggtttttatgcaacaagacaatgtgtcacatcaaaatcttctaatccacatagtgaagaggaagaagaagacgaggacctgatttgctgtcaaagaatcaataagacatcaaataattggataaaaaccttaagtcattagatggaaaacaagattctggtcggaaactacaaaaaggatcgagcgaacaaacatattataaagatatgtaaaaatcaaagtgcggtttttttttggatgtggtctcgctcttttctctctaagaagaagcagcagcagctggtgctttctcttcagcagcagtttcgaatgtctctccaacaagctctgggacatcgtcatcatcctcttcttgtatggttgctgaggcggcattaccttcaccagaagcctgtttctggaactgttctgctagcttcttcaggttgtccatgttgtctggtcctgaaagagatcaaagtaacataaagttagagaccttaggatcgatgaagaacatttaagagctgtacagttacatggtacacaccaagttggctgatgatctgaggaaggatatcttgcaattctgcaggaagcaacacgtttacattaatcagagaagatgaaatgaagaagaaacaagaaagtagagattaagagatattatgagatgcaatacttttggtctgaggagaaccgctaacaacccatgtgtttgcagcaattgaagcttgaactgtagtaacattcaaaggaggaacaatgatcagtaacatgaaaaaaaggttctgatgtatagataaaaaatggttaaaaatgacttacccttagggttgatgaactgaataacaacatcatccttaaagatgttaacttcttcaatagcgggaatggagttaactccaattctcttaagagtgctttgaagcctcttgtcatcagttgtattggtcttgtgcacagccttcttctttctgcaagtaaaaatcgaatggtttcataacacaaatcatagtaaatgctaagtattgaacaatgaaattggttgaataaaactctataccttctgacagtaccctttccgccagtgcggacggtattagccatcttcatcaacttctccctattcatctgtgtataaaccataataagaagcaaaatccatcaatccccaaatcacttccaaaagaatcaatgaacacattaactgctaataatacattcacaaaaacttcttattatacaagaaactagtgagaagaaagtaagcgcgaacagatttaaactcagatgcgtatgaagacacggtgatgtgactagtagttttaacctaaatttaatcattttcaatcgattaggtataccaaatcccccaatcaaacacacagagaagttgaaaacccagtaaattcccaaacaccgacaaaaactaatcctatctacagaaagaagcgaaatgaatcaagaaagaaagatatctgacattttgcaaaatcggggattagagaaaccctagaaccggagagataaaacactaatagaaaggaaaattacagtgataatgaatttaccttgagattagggttcttccttgttcgaagagtgtgaggagataagaaaatgaaacaaaaagaaaagaaacagagagaggagagacgcgggcggcgcagggttttgccctttaactatatgctattcggagccaacctcgtctcttaatctaacggtggatatcagatattccataaagaaatctccatcactaccgttggatgctcgatgataatattggcccataaggcccaaaactaaactgggccaataattatttactgggctcttttgtgccgtaatcaatcaccagtattagcgcgtagcaaaccataatcttttggttaccagaatttcaaaatccacaaatttatctaaatgagtttatcaatgaacagacttgtttagttgactaaaatttagagaagaaagctattcgattattgataatctcaacaacaatggtacatttattacaaagtaagtttgcttaacttgaactgtatgaaatccatgaatacaaaaattacataaaagagatagagagatctgtatagaaccaaaaatcaaacgcataaacattcacgtgtaaagagaatgaatattgctttgtgttttggaccttgttttttttactgcttcttctgcacaacattttccaaataccattcataagtttgggagaggccatctttaagcgaaatcttcggtgtccatcccaaagacgcaagcttcgagctatccatcagtttccttggtgtcccgtctggttttgtggtatcccaaacaagctttcctttaaacccaacaacttctttcaccaactcagccaattctttgatcgtcacttcaacaccacttcctacattcacatgctcaaatccgctgtactgatccatcaagaaaacacaagcatcagccaaatcatcgacatgtaaaaactccctcaacgggcttccacttccccaaaccacaacttcgtcagcattattggctttggcttcatgaaacctcctcatgagagcaggcagcacatgggaattctccgggtggaaattatcattctgaccatacagattcgtgggcataccggagatagcatcccactgatgctgaagccggtaagcttgacacatcttaatacccgcgatcttggcgatcgcataccattcgtttgtcggttcgagcggaccggtaagaagcgcagattcgggaatcggctgaggagcaaatttggggtaaatgcaagatgaaccaaggaagaggagtttcttcacaccgtgtgtataagcagagtggatcacattggtctggatttggagattgaccccaatgaaatcagctgggtatgtgttgttagcatgaatcccaccgactttagcagcagctaggatgacataaactggtttctctgtagcaaagaaagattcaacatctgattggctagtgagatcaagctctgaatgggttcgaaggaccaaattggtgaaaccctgatcctggagcttgcggacaatggcagatccaaccaatcccctatgtccagcgacaaagatcttggcggatttctctaacataaacgaacctgatttcatctctgcacagaattacgagggatcaaagacctagggttccaaaatttccacgaaaatctaaattcaattccacaaaactccgtatatagacatgaaacattatattcagacataaaatagagagatggacgtaccggatcctgtgttgtccgccattgtttagtcaattagttctacaagacgatgagcgattgagaatggggattttgacttatagatatcagttttcgaagtcaacgacagaagcttagatttgtaggtaaaggttaaattccttggagaatgtaatgtggaggagatctgaatatccgccggcgatctgaatcggtgtcggatattttgttattcagtttatggatcctggcccatgggcctaaataaaatagtcacctcactctccgcccatttcgcttacttttccatcgttacgttattggcctattgcaattaaaccggaccaaattccggttcgcagctgtgagttaccaaattagctccatcagccaggtgtccgtactccgtaccatccataagaagagtacggattcgaataaaatataagcctagtggtttggtgaagactgtgacaaacctttagaagactcaaataaacaaacattagcctagtggagcatttttgcgatagaagacgacacattctttttcatcatcgatgattggatgagatgtgattttcaaacacaagcaagtaagtggtagttacaaattatgcagtgaccgacgaccgtggatgctgaagtccaagggataaggaaatattataatggtcttagacctcttcgttacacacaattagaaatgaaaaaatcaatttatgtatagaaaatgtcgctcatagagacgtttggagaaaggaattgggcaaaggaaagaggagaaccactaggttacaacttaaaatagtacttaatcgctactcaaatatgatgaatatttttaaaagaaattttcacataagtgtatgaaaaaaaaattactctcatggtttgtcaaagtgagatatggttttcaccgtttgtcttttcaattgttttcaaatcaaaatattcttaatgggagcaaccaaaccacacaacacttgatttcggtttagtttctgtggttcagttttgagaaaaaaaaaaaaaaaaactgaaacaaagaaatcgaagaagaagaaaaagagaaagagacggagaaattcgagagagaagtagaaagaagttcaaaattcattatccactccttcatatttcgacatctctccattgaactccaaaattgaggaacaaatttcttgttttcagagatgaacaaaatgcaaaaaaaaagctcatagattcaaacactttagctttttaaactaaagatactctaggtttacaagatttatttataaatagtaatcaaaacgtaaaaaagtgagattttgagaaaactaataaagacggccacaaaattaggtttgcagaaaaggatacacaggttgaagatgactggaaaattacaattatacccttcatcgaatttttctgtgtacgtatatccaatttacagtgtacgtacacaaaattatttattagaacgtatttgggacaatttctaataactcaaactattttattacgtattcttatatctcaataatctcaatacatacataataattaaataaaaatagatggtgaaataatgtacgtacatttttgttggtaaattaatgtatgtacatgtgtaataatatacgtacatctttgtttgtgaattaaattattaagaaaaatttattgatacaatattaaaccaatattgtcagtggctgagataagtcattgtttgttgtatgatttttctgttcttaaaaacacttctcaatctctagtgtacgtacattggtacaaaccatgttgacacatacttcttggagtcacaactggtgtacggtcacccgagtgagaaatgttatctctgtcaggtacacgctgacttgtgtacgtacactctgccaacagacgactgaattcccctggtgtgagaatgacgttctcctcaacattccatattcttctacaattacatcgttccacttgttgtaatcacaatcttcgtcactactttcactaccatcaatagtaggatcgagggtacttccccccatagattcatcgtcaccctgataatcatcatacccatcaccatcttcgttgtccccctccttttcatcctcatctgttttatcgtcttcaatgttgtcttgctcatctacggcctcattattttcatcaacatttgaaacacggtcactttcagcatcgtcaccatgagtcctagagacattatttccgagtgtcttgacggttgtaatgaaagagacaaacaagttgagagaaggatacctaccacgaattaaaaagaacgtattcaaccccacttgactgtcaatgtagacaggagggcgtttagtatctatcatcactaacatctctcccggaatccagtaactaattatgggattgatctctatgaactacaaactgaaagcctcgcttagtgttacgtacaaattccgtgtacgtcatgttttccttaacacgtacacagcgaccaaacatgtattcctttagtttaaatttttattcttcttctttgcatcttcactcaccgaccatactaaatacaggaatatccattacccaacaacatcataaattcaggaaaaacctagtaaatgcaactgaaaacatgattatatctacaaaaacaaatagaatttcaatatacacacttaaaacataaatatttacacatttatcattttcaaccaacaaaattgaaaataaaatatttctgggtttatctataaaaaacaaagttgatttcgaacacaattgaagatcatagtgtgttataacaaaaacattttttaaaacttcattacttacacgataatgcttatcttggctccaaacttcggaaataaacaagatcaacacttcttgagcatcaatgtacgttcgcaattaatgtttgttcctgggttcatctttaattcaacaattattgtcaataattttataattttataacatgtaatgatgattttgcattaattatgacaagagtcacgtctaaactttttgggccattaaatgttgatgtcatttcgtttttaatggaaaaaatctctcttcttactgtacagccgcactcctcaacgtgaaacaaaaataattccaactaaaccggaacagtgtacctaactaaacctgactaactaaactgtacattcaacagtttctcagctgtagcagcaaggaaaaaatggtcaaatttcagctgaaaagacaaaacgtgaaaactacctttcactttgccaatccttgaaaataaaatatggtcaaaaggtgtggcccgcaaattaccctattttaaatttgattgggtgcaactttgagctgtagtaagtaaaaaaagggatgttgggagttgacttaagatgttttgagctatcatatattcgtcactgtttgatttcttctaaggccataagcgtttccgacatacaaacaagtagcattgtaccagcagaacgggtctaaagaaacaatgaatgtaaccttccctataactctataagtatccgtctcagctgtgcatacttgtttaacaagaaacattcaacatcatgaggggaaacaagaattactactttctgagtctcctctattttctaagtctacccatccttcattttagctcttgtacacacaaatgtggagatatccagatcccgttcccctttggaatcggagaaataggttgctatctcgacgagtggtaccaagtcgaatgtcgaccaagtgctacttctgggaaagttttccccttccttcccaaaatcaacatggaggttgtgaatatttcccttccggggaccaatgatgatatcttttatacttatccgtcattctcttcaattcgtgtcaaaagcccggttgcatccatgggatgttctaccgatggaaacgattctggattgactttgaattttacggagactccttttttctttggggaccaaaacaacctcgtggctgtcggttgcaataacaaggcgtcgctgacaaatgtagaaccaacgatggtgggatgcgagtcgacttgcactacaagcaacaattcgcggagcatcccttttttcaacaaagttggatgctctgggtccgtcgacagcgtcactcgagacctcttgcctaaaaactacataccggtttgcagtacaacgaaaatacaggacgacacattaatctgcaacggggagggatgctgccaggcaaaagcacctgttggctctcaacaactcattggtgtcacaataacgaactctactaatggaaaccttacaaagggaggaggatgcaaagttgcctttttaacagatgaagtctacactttatcgaatgcaaccgatcctgaacagtttttttctaagggcgttactgttagcctaggatggttcattcaaacgaaaaaccattcgtttttacagtcattggactgccaaaacagaggagaattggataaaggtaaaaaaagaacaagacaatgcacatgcgataatcatatagcttccgggatgggttacgcaagttgtgcatgtgctagcggttacaagggcaatccatacgtttcagacgactgccaaggttttttttgtttgtgcatctaacatcatctatcatctgagtacaatttcatgactttctttttatacgtagtttcatgactctttcgtttgcagatattaatgagtgtaccgaatataagaacccctgtggggataccagaattttatatcgcaatacttgtattaatacatcgggaggtcatcgttgcatagactaccacattccagaagtaatgctaggtaagtcactaaattatgtatcgaaactcaagcaacaaaattttaagatattaaaaaaaatgatgatgaacgtctagtttttcttgtgtggtgtttacaggattaggtgcaggtttttttgtcttaatcgtagggggtggtatatggtggtggagaaaacttcttagaaaaaggaggatgacaaaccgcaagaggaaattcttcaaacgtaatggaggactattgttgcagcaacagttaaatacaactcaaggcagagttgaaaaaacaaaattatttagctcaagagagctggagaaagccactgataacttcaacgataatagggttattggacaaggcggtcaaggaactgtgtacaaaggtatgctcgtagatggtagatccgtagcagtcaagaaatccaatgttgtagatgaagacaaactacaagagttcatcaacgaagtcattattctctctcagatcaaccatagacacgtcgtgaagcttttgggatgttgccttgagacagaagttcctattctggtgtacgagttcatccccaacggaaacctctttcaacatctccatgaagaatttgacgactacacagccttatggggtgtacgtatgcgcattgctgtagatatctcgggagctttttcgtatctacatactgctgcatgttctccaatttatcacagagatatcaagtcaacaaacatattactcgatgagaaataccgggccaaagtatctgattttggaacttcaagatcagtttccatagatcatactcattggacaactgtaatatcgggtacagtcgggtatgtggatccagaatactacggttctagccactttactgagaaaagtgatgtttatagtttcggggttgtcctagtagagcttattacaggagagaagcctgttataaccctttcagagactcaagaaataacagggttggcagattatttcagacttgcaatgagagagaaccgactctttgagatcatcgatgctcgaataagaaatgattgcaagctggaacaggtcattgcagtggcaaatctggcattgaggtgtctgaagaaaacagggaagactcggccagatatgagagaagtttctacagctttggagaggatttgttcagctccagaggattttcaggtgcaaattcaaattgatgaagaagatgaaaccacgaagttatttagaggctattctggaagcacggagattgcaagatcaatgtgaggtagtgtacacagtaatttgatggtcaaatacatttgatgtcttttgttaaggcttgctaagtttgtttatttgtaactcaattgatatattgtgtggttatgatcctcaaaagcaacttctcagttccattacttgtcctaagatctccaactatactatcacctttaatcaatcacaatgtctcaggttatgctaatggacagattcaaaactataatgcaatagcaaatattgagattaatggccatagatagagaaactatggaataaattaaaccaagaagaaatagtaatttggtcattgtaattagacaaaaagaagtaaaaaacaaacaaacagaagtcaatgcccgaaccatacaaaaaaacatttgtgcatggtgcgttcttgactcccactttcccactaagcttaaaaaagaaactcaaaaataaagaacaagaaagaggagagagagagtgatacccagaagaataatgatttcttacactctttgcaggcattgaagacaaaacactaataataactttcacttctctgctcattgaagacccttctcagaaatcagatggggaaatagcttttaatgacgtctcaagcagttgaaggacaattcaaggtcgttttaatttggtggacagtggtattgatgagattatttactgtctccattgactccatgttcagttttgccggttgcaaaccactcaccattatctgaaacccaaccgttatcaatgatcctcctcctttgctgcttccgtctggtgaaatggcaaaacctgagggtaatatcggaatataagatgtgtcttgaccactcattgctatgttcaacgctggtagatccactggagtgtagatcacaagcgctgcacttgatgagtctatgcagctttcttgtagaatcaacatgttgttttgtgatgatgatgcattgaatccctgatgaaaacaaaggaaccaaattatcagtttgaagaatcaagaatccaaaaatctgtatagtttcaaatgagcaagcttacacgaagaacagatatgcagtttccaggatttgatccgtttgtgatatgagcaacttcttgaacagagtttccatttgaaagaacgtcccactataaaaccaaaacaaagaaaatgtcactcgggtgattaattaaacaccaaataattctggtttctatggcaatgttaagtctgtgtagtacctgaggccgagttctctcatctttgaggaaattgaagacgttttgtggagaaatagggagccagaaacttgtggctgcacatagaaccattccatttggttcatgtctgctcttatgcgaagtcacacggattccaaattcatccagtcccgagacaaccgttgagcgagtgttgttagatgtgccaacactcaagcagaagttgcttaccattctgtgagcaagtctcattatacttctcttcccttctggcgatggaatcactgaatttatttcaaatgagttacttatggtttacttagctgatcaattacgatttcaaaaaaatggctttatttacctcctccaagatcaagggatgatgttgcaggttccaatagattcgtgaatctctcacacattctttggagagtagcaatccaacgttcagctccaaaagctaatcctttatgaactatatctttaaacatctcatgtatcggttcttgctcctcgaattcaccatgttccacccaagtaacctgttgttttacattcaaaaagatacaatcaaatgattcaagaagctaaaagaatgaaacaaacaggacagttacacacctttgaatagccattggacatatcttggatcaagcaaccagaaggaaatctatatgaccgagattgagatataaactgaggaaactcatatgagacatttactattgcccaagttccatgttcgatttgctgacaatatcttagcacacagaactcacgcgttgttaccaatggtgaaagcacttgaagctcttcaatcatctaacacaagcaaaagcaaagtaaatcaaaagtttcacacacacacacacacacatggttttaatagtaatggttgtttttaccaaatgcaatgcatctccatggtttccacgcaatcccgatgaaatcactgcaagggttttagatgatgcaacgatcgagggaaaaagctctgttaatttgacctgcaaattcatgaaaaactatatgagaaaaaaccagaaaaccaactgtggaaacaaaaacttcgattcgggttattgcttacagagttcataagcatgtccacaagtgtaatagcattagtgaaaacaacaccagaagatctagatgcttccattccaaggttattcttctttccaccactagtacttgatcttgtaaacatattctcatagttttcgagattgagaacatctctgcatccatcagttttgatccacagaggctcatttgtttgaagaagcctaagcaattcttccatagcggtcacagcaatgttggtcataagagacttatccatctctgataaaaccaagtttggctgagatggtaaacttggaacagacattgaagaacaacttcctgggagaagatcaaaatcaagtgaaggtccggtatggaataactctaatggcgaaacatgcatcggatttagtaatggtggaagatgggagattggtcttcctaagaatttagctgcaatactcgaaaccctttcgagctgcaaacaaaaaacatccaaattttaatggaagtttctaacagtaaagagaatcacaatgcaacaaaaaggactcagaaaacaaagacctcatctctaagctgtgcattttcgatgcgaagcttttgctcatcaaagtaagagtcttcattaacaggagaatcaccacagctggggcaaatggcgtgtttaatagcttctctaatagcaatgttttcgcatcgaatcttatcattctcttctttcaatgcacaattatcagctctttcgtgttgtgcctgcaacaaaacaaacagagaagcaaaattaagagacttctatgaagacagaacaagaaagagagaaactttaaaacaaaacaaaaaccttcttttgagttcttctgttttgaaaccagaacttgatctgtcttggagctaaacccaactctctactaagttggttcctctgtttctcatctggatgttgacactcattgaaagttctacaaacaaaaagcaaaatcagcagagaacagaaaacaacaaaaacagagaaagcactgagagaaaaagggtttacatacgattcaagccgttggatctggtgaggtgtgtgacggtgaaatcgcttcttcttcttgttcttcttctctgtttcagagctatcgtgattttgactgtcgccgagaaactccatagtaatgtgcagacgaaaaaaaacagtaacaaagcctttttccctctactctctgtccttttaaccaaacgagtaagtaaaacttgctaactctggaccatcacacaactgtcgccattaacgcaagcctagtgaaacaataaaaaagtttcaaactttatcttcctttaaccaaaagatctcggggaatagagaaaacgaaacggaagagaatcagagagaagatattaaggggagaagaaaaggctagaattggaaaacgataatctccaggtttttaaccaaagaggaagaagaatctcatagaatccccaaatttcaaaatccgtaattatggttcttctagactgagagagagagagaaacgagagtagagtaattgatggatgaatcgacctttcgtctcgagcctatcataagccgccattagtgcattcgtctctcccacctttcgctccttttacattcattacagattcccaaaaaacaaatctctctctcttcttacctgtctgccttgagaaattgcgtaactgatactgatgggtttttaatggcgtttgacagaaagcagaagagagagaggttatgggtttttaattctcttgctcctttctccattacttccatgtacttctctctctctctctctcaccttcttcgaggccgagagtcagatgatgctcctccttaaaccaacccttcatttaaatgttcctgagagattagttaatataatggtcggtaagcataagtcgccggcgagatttaaatcaacggaggttttataaaccggagacttttctcaacgtcgtgtaatgacaaatattaacttttctatggggttttgctgacgtcatcagcctttttttttttttgaactctcaaactcttgtttttccaatgagttgctaaaaagtaaaaagttaaacttcgaagacagaaaaattgaaaattgaacttgcattgttttagtcaggcaaagtatacaattgtgttcatacaacttgttgaacatgagatggatgataagggagaaagaacattttgtttgctgtgaaattagacctatctttttttttaagtaaatggtggatatggtactttgaaattccatatttatcgcttctcgttattaaggaacatcacacaacactttatgtgttactttctccaattaatcagtgtattttaaatatactctgattagaacaccaacttattaaatcagacatggtattaacgtttgacagtatccgtatcttctcatctaatgctcttgttgagctggttcgaaatttattgcacatattgatttcttacaaatctgcagctgccatggaaatctgtagactgtagcaataccctttaaacagatacaaacttaaaacctcacttgaatttatttacccacaatagtactactctttaagataccaaaccgagatctctacttctaaagtcaaacaattagcagaatatatgaatgcttgttaaagcataaactcaagtgatgatgatgggacttacatcatctttctctaagtgaaggcctgagaagctaactgatcagccagaaaacagaaggatcttcttcttttttctcattcactccaatccgtttgttgttgttcctctctccgttttcgtttattagttgttgatgcctcgtaccaatctcctactctcaaggcattggacatagacatcactgcttcttcaattgcttctctctcctctggatgtagatcctctaatgataacgttgaggccacctcgtcaaattgtagtatagcagcttgctacaaaagaaacagcaatgacataagaagaaatttcgaggtgattacacataaataaccaagaagaagatgatccatttaccacgttcattatatcagcttcgagacttgtatctctgtgaagctttgggactgtgatgctattgaaccactgcatatattcactttcatcaccgttacctcctccattctccacgatgttttcccttcgtctcatccattcctcatctgctgtgttcatgtcttccagtaagtcttcatcatggtttttctcgtttttcctgggaggaacttctccggggataacttggcacagcccaaactgcttcatgcatcgatctgggaagtgccattctactacttttggaccaatcagttttgttctggaccttccaagtagtagattatctttgaaactttgtggcacaatgtcaaggtctccttcaaagggacaccaactaacctaaaagagtaacaaaatatcataatggattcaaaacaaagaaatgtataagaaaacaatgatttaattcttacatttgatggatctaaatcgtcaagtgccttgcgatacttaaacaagtcattctttgatcgactctgttgccttcctttccacaaaagtgccagtggaaactgacgagtggttctctttggccggtcaatattgaggtggaagtaactccagcactgaagatggtaacacaactggttaagaacttcttggagaaaaagaaacaacagagaagatgatgctcttaaagatagagagagcttaaaataaatgaaaacaaacctgtaagagagtcaagcaaccaccaatgatactctgagaccgttgagaggcattaccaatttgtctatacaagaaagctagcgcggcagcaccccaagcatattctccagctttctcaaaatcctcaaagaggataaggtaatccacagagatcttactgggatctgtagttgcaaatatcgtgctcccaacaatgtatataagatacgcacgagtgtgatactcaatctctttcatggtagctccttttggacactctgcaaaactctccttcaaccatttagcagtcactcgattaccgcttaattctccttttggtagcttccccaaaagtctcaaacatacttgagaagggtcttcatctttttctttaacaccaaccacaggtttcccatcaacagcaagaccgagaatcaacgatacctcatcgagagtaattgtcatttcgccacaggggaagtgaaacgtgttggtttctctacgccatctctcgacaagagcagagataagcgaattgttcaaactaattgatcctactagcctaaaccaaccaaaaccagctttttcaaccaatgctatctgctcctttgtaagcttccagtgatgaagcaatgaagttcgctcctgacatctaagcacacctctctcctgcaaagacaaaaccaaaaacattatcccaagttgttcgatttaagacgaagataaatccagattgagattgattgaaactgcgttactacttacctgtccggtcaaaatagcagaggagacgtgcttatcttgctcgtaaaggacgggcatggtcctcaacgcgtggttttatctgataatggcactcgaaattagggtttatgagtaaaaacgcgatcacttcgacacaatgattggtttccgtttatacaaacatcacaaataacattctggttataacctaacactttacgagattacatcgcgataaatctaggtgaaatttcaacgattacgatagaaagaggaacaatttagggttcatcaatctcttaactttaaaattggtacagaccagaattaccagcggtaagaagaacatatgtaatcaacataacgaaagcttacgattttggaacgaaaccagatgaggaagatcgaacaaggttgcttcgaagaaatttgagacagtgttgagatcgctgcgcagagagagtgaagaatccggttgtggtaaataaaaaaaaaaatcgtctttttacttttacatcatttattcattaaattcattagatgtaattttgatataattttaaacttttacaaatatactaaacttttgtgtaaatggaaaattcggtgttctttcatgaaaatataaatgatattttttatattttaaataactggtaatttggtaagaattacaaatttacagccttattggactttcccttgagtcagagagtttcaaagaagcactgtctaaaagcagagagcgaaccggtcctgaatctaacgatcctgttgttgtctgaatgcaacatcttctctagattctgcttttattctaaaacttttgtgcaattttctctgattcttcaagctccaaactaaaccttctcttacctcagcaacctcattcaccaagaacattatacactctctcagaagtcagaacccccaccatttgcttttgcatattactttttattttgttgaagtatatcaatcttggaaatgggaaaaaaataatgctttattgaaggaatatattagtacattaacatacaaagatctctctcatgtaaactgatccaaacccaattttgataagtgttttttctcacacggtagagatcagatcatagaaacctgttgggtaaattctatagccataccataatttgcaggccgtcattggaaaccactgattttttggctatacaaggtttacacatctctctctctcttcgtttgctcctaaagttggttcgaagcgctttgagcatcttcagactacgaagcttcggcgagtggaagttgatactcatctggtttcaatgccaaagcgaaatcaggaagtgttggtgctgtctccatgattctgttaatcagaaagcattaacagattaatattaataaatgagctttataatgctattgcaaaagaaagaaaggcagattaaactcacttttcataggagtagagatcacggtttatcctgactttactcgaagtatctttcgggattttctcagttagatatttcattgttccaaagaggggcggtgttctgcagaaaagaaaaatagatctttataactgctaatttgcgaccaaatcagctcaaactgaaaccgatttcaaaaaagaaagaaattaccttgaagtaggcgcagaggcgttgaatgcttcggatgctttcttactttctttgaaacattcatctgcagcttgtaaagcagcaactgccatgccatgtgacttctctgtgtttccttcatcaagaatcaaaccatgatagtagtaagccgcagcctgatccaaaagattccagaagatgaaacaagacattagacacatgaaccttcgtcacctatagcacttaactccacatcgagagatagactctcttaaaagactcatggttctcaaataataatgatatggatcatattataagcaaaaacaaaatttgggtcttatagagacagtttacaagaaagggccatacctcaagacaaaaggaacagacaaattcagatatgaaaggagtataagagcaagagagaaagaatgtaacagtaccttagcttcaacatacttccacttaacaaagagtccatgcttttctccccaaccatttgctaacgggagattcattaaattatcttgtgcctgtttcagcgcacaccgacaaggaaaaggaagcattaacaaaaaatttcagatgtttccatgggaagtaggaggcggttcatacatagacaaagtctcaatgagaaacagattggataatagtaaggacttcacctgctgccaatatttcaccatttcacatgaaagtcttcgttttactgcaagagtggcctttgagctatcaatcgccatgccaagttggatatcaacaccctattttcagaaacttgaaagatgttagattctaaatgagagaaagaaactacatgaggtacagttagatgccatgggatagcttaactctatccatcaaaggagaggtattacctggccaagtgcttgcaagcaaagagcccgtagagttccttctgctaagtcaactggtaaacttctcctgcagaaaaatgaaaacaaagagaagggttctgccattaggctcaactgataaaagtcaacgagtagagtgaatgactttagaaactttgtcacctacaaacctttgctcagcagaaaactgggggagaacatgcttaacggcacaatcaagatatccagctgcttttaagaagatatcaatcgaagttcgtctgttttctataatgaaaaaccaaacaaccataatgttaagtctgagaaaccttaccctttttttaagaaaaaaaatcattgcataaaaaatggtcaagagactgtatgagaagatggatgagaaagtttctcagagaagcctaaccttcggatactttcggatgattgtgaccatcactagaacctctaggaagaagcagtaaattggcttgagacatttgtagcattgccattagatgcaaaacagataaaacttcataccaaacgtttgacatctctgtttcctggttagaagtaaacatgtaagagtctgtacattatgatgacacttgaaagacaaacagctttgaaaaattattacacctcttcctcatcctcctgatttacccaattaaattgcactttaaactgtagatggctacctgaacaacatcacaaatactgtagggtcagaatacatctctgaaaccaaagagatctttttctaagaaacacataatagtttataccatctttagttaatcccaagacaacaggtagataatctagcaaagcttgatggagatccaagagcgttgaacctcctgccagagaacactagtaattaattaagagttccaaaccatagaaagcagaaggagatagaaaacacacaaagatcttgacagacatataccatgttgtgtctttctcctagttctcgtaattgtaggtccttcttgattagccatcactactatacgcgttcttaaagctgtcaagcgttccactaaagtcttcggtaattgatcaccaagtgactgcaaaaaatccaccgctctgggtatccttaaaccaggtacatatactgaaacctcaccgatgcttgttggctttcttctgttcccacctgagtctttcggcgttgacgcaaagcatcccatttttcacagaacttaagaaatctacaaacccaaaagtcaacaaatatacaacataagtgccaaatcttgataaaggtttcacatagaaccttttgagaaacaatctgtgactacaaaatgatcaagctaaaagaaaagaggagaatgattccacatctaaaaatgcaataagaaggagttgataaaagttaatgtccaaccgaaaaaaacagctcaagtccgtcctcctccactagattcatagggataaagtaaaaacccagctcacgagttatctgccattactataccatcttcacaattcaacgtgactagataatctacacgaatcttaacaataatcttactttaagaccaagttccaagcagaaacaaacaagcaaataacaacgtttgataaacaagtaagaggttgctgattatctcaccttgattggctataagctatcaaaaccaatcgagttctgcaagaaattagagaaaaagatacaaacttgatcagccaacaaaaaaagaaaggcatgtgagttcacagagaaagcatgaaactttttgcagtttgtaatcacatttctccactatgaaacgttataacgaaaataggaaagaaaaaacgaggaatttcaaaggctgcaaagcaacttgacttaaaaagggaagattttgagtaaaggctcaccaataattatgctcaaatgtaagaaaagagtaatggaaagtgatgcttcatcgagctcaaccccaaaaataataataattcaaaatccttgacagaaaaggaaaaaccttaagcaacattttccccagagaggaatgaagaaaacactatatactaccaaagctggactagccaggatttctgattttggaattcgaattgaaccaccaactagatagcttaaacctctaaatcagcattgaatcgctcaaaatttgaataggattcaaaaaggaaaacgaattctgaatctgaaaaacaaaaagtatacaagaaggagagattcttacctaagatatttttaaaaaccgctcctttatatagctaaactggaaaggagatatacagagagaatggttctttgaaatgattgatacaaattatgaagaagaagaagaagaagaaaaatattagaagggatcaatttcaacgagaagagaaaataatgcttcggctactacttcactagtacagctaactaccaaaataaaatcaatttaagagaaaaatctaaaaagatttgtctcttttttttttctttagaaggttagatcatctccatcaataaaaacaagaaaagtttctcaaaaaaaaaatattaatattttaattaaaataaatacattaattattatttaataactgaattatgataacacttgtccaaattggatgagaatcaaagttttttggaagagaaactcaactctatttttctcctactttttctaccttctctcatatttttttttttaattatttttcttttgttggatatctcgttgagatattttcgatagagatgctcaaattggtaactaacatgaaacttttacaatcattagaccatcataaagcaacaaagtaaattcgtttccttggttgctgattttcctaggtgtttaatatgataatgaaaaaaaatatatatatatgataatgactatgtttagaccgacatgaagctcaaattagaccatatcgtaaagcaattacttataattaaaataaatacagttttaaatgtaaaatgatcttatcctctatgaaaatagtgcctagtgggggtatgagtagtgttttaatgatttaaaattttggacttattggcaccattagctgtccatcggcctcattctaacaagatcttgtaaatgatatagatttgctctcaaacacagcttttattccgtttttatacattacaatatttctcaaatacgattctcttggcatatttcaaggatgtttgtattataatacttacattttaatattactattgagatattttaagcctatactaattctatcgagcatgatcataaaaactgtttaacagaagaatctttttaaaaatatttaaattgaggtagatttggatatttaattatagaatgaatataatacatcaaccagcatttttcttagcattcattgcattgctgaattttccacaatcattcatttaaaacttgcaatctaacaatatccagcttaaaaaaaaatctaaaaatgccgtggttaacatataaacttcattttgtgaaataccggatttgattataataatgtgatgcttattaaaagacctagtaaactaaaagacaatcgtcatagagattttttgttgctgctgttacaaatagaataataattaatgagagacaaacgaaatcgtcaccggcctaattacgttacaaggtgcataagcactacacgtccgttcacacttgtttgtctatgttcccataattaaggccccatggctgggctgctcaatgtttatacaaaggaaaatgccatccacgtgtcagcctcgttggtcacgtgatggttactattttgggcgggctcacacatacaaaagtactaaaactactaaatgtggggactgttggacaggtgtcaaaggttccgtgagtcgttcgcggttagaaacgtcgcggttgtctttcacggtcaccgtccagtggtcgggaatgctttaataacgctggcaaggtggttggtgacgacacgtgtcctcaatcattccgttatgttgaagatatttctgctttctctctctttttcgtcttcgtttaggactctttccttttatagaacagtcttcttaattattattttttgtgatttaattataaccaacaaacattattagagaactaaatcattatgtggatcaattacataacccaatcattttctaattggaaaagcttttaaatatactttataaacgtttatgcgatggtggaattttatttctcaaagatgaaaggtgattaaacaaaaagcaaatgaaaccgaacgtcgtttcactagcatattcgtgtgaaattgagtatttggcctacggccagagcatctgcgaatttttcttctaggggttccaaaatttaaggaattttgttggaactttggtttgagtgatatctgctttttttacgatgagatggctgatctattttttggctctagcatctttctggattcgtcttccatttcaacaccagaaagtccgagttatttttcaatcttaggagtaagggttctcaacgtggtttgatggtattgattaagttttaagaaatcttacaaaggaaattaaatgagctttgttgttgaacaaaaaaaaggaaatgagctttgtgatataattttctgcttacattgagatgattgatatactatctaccaccaaagtagtttatgaaatgttttctctcatcaaaagcaagaataagaccactatttccaaagcgttgttgatcaacaacagagtttggacacacttagtagtccatgaatctgattgtagagatgatcccaaattggtcactaattgatgtgagtgcaatgatgctatacatactactgtacatatatactagatattacccactgctgtaaccagcaagctcattaattatccccatgattcaatagtcatccttgctttgcctttttgctttctgattaaccaatttgttgatagacctaaccggtttagtgtaatcaggatccggtttgctttatttgaagaaatcttatttgaagaaattctttttagttgtgaaagattgtatttgacttccttcccaactaactctgcctattttcctactaatctccaccagtaattaagtttggctttgttcctacacacgtgcaaatgactaatgagttctaaaacagtttggttatagcttacctaggattgaattgattagttgattggattataagctatatatccaatcaatccttataaatattcaataaactgttttgcaagcaatctcaaggaaaatttgaactttgaagtacaatacatcacttttcaggttttcaacttattcctatcattttatttatatttcatatatttatttttaatgttcttaagtatttaggctatgttattatatcttatctgaatgttaaaaatagaagtcggtaaccatgaaatagaagtcggtaaccaatgctacatttcatgttttttttttcaatttaaatttgttagagaactgagagtacaaattaaaagccaaccgtcgtagacaagacaagagagaaagttggtgatgtgcttgaagaccaaatatatgtttgagcaaataagatgtcaaattcatttttataaagtacaaagccactgatatatcagtcagttaacctattaattaattaagacacagagtcgttttagggtttccacgttggtccgatttaaggaaaataaaacatttggttaggtctgaaaggtttaacaaaacatatccaacgatatttaattactttattctacttatacgtgacctgcaattaaatcataggtccccaacatctttaccaaactctctccttcccctccagtatttttctcttaacaatgtattgatattttcgaagttataaaaccattttaaaacttgtaacaattgtccattagttataccaaaaggcaatacggttgaaatttagtcatcgagttcgatccacaaatcctgaaataataaccgttacattcccccttaattctggacgtacgagttcgccttagttattttttattgttgatttaatttgcggttatgtaaaatttcataaatttggaaaatattgtccacatgtaatatacatagctagacttttgagattttcattgcttgtaacattgttgttttatgtagttaaacactaacaaatgtaagttttatttatttctttcaaagtaacactaatacaacatcataacaggtaaatgcaactatagattttgcaatctaaatgttcgttctttgaaccatatattgtagttaactaattatagcgttctcccaccttgattcatattctagaagttgtccatatataaaaagctgaccataataattaatatacatgtgtacatgtagcttgtaaaaggttatacgaacgtagatgaagtattggtggctgaagtagagggtttaggttggaaaaaaatatatttaagggtagacgttgaaagtttaacgaaaacaccccaccaagcaatctcttccctcctgtgtaatctccttttttcttttcattactcatcaattactcaattattaaaactctcacataaaccaaaataatgtatataaaaattacgaaataaatggaaaaataaaaaagggtagattacttaaaaggagtgtgtttggttagggaagacgttggcatcaatcgccggtgaaaacctctctccaaactttccctcactctctaacgaatcttattatattcattactttcaattctttatataatatctaaataaatatacttatataaatacatgtatgtatggtgctgttgctcttcagctttcttcttgttcctacatacccatcttccctcacctacatcaaacctagggtttcttaactatatcaacaacatatataaatttatatataggttgtgatttattgaagatcataaagatcaaaaggagagaggtattaaaaaatgatgtgtagtcgaggccattggagacctgcagaagacgagaagctaagagaactcgtcgaacaatttggtcctcataattggaacgccatagctcagaagctctctggtcgatctggtaaaactgactttatattaaagtcatttctttaatttcttacaaagcatatataaactagggtttaatatatttatataaaaatatatatgttggtttgattggatcttttggtttcaggtaagagttgtagattgagatggtttaatcaattggatcctaggattaaccgaaaccctttcacggaggaagaagaagaaaggcttttagcgtctcatcggatccatgggaacagatggtctgtgatcgctagattttttcccggtcgaactgataacgctgttaaaaaccattggcacgtcatcatggctcgtcgtggccgagaacggtccaagctccgtccacgaggccttggccatgatggcacggtggctgcgactgggatgattggtaattataaagactgcgataaggagagaagattggcaaccacaaccgctatcaattttccttatcaattctctcatattaatcattttcaagtcctcaaagagttcttgaccggaaagatcgggttcagaaatagtactactccaatacaagaaggtaattagataatatggcttgaatttctgtgtttatgtagctaatatagctgcacaaagataaaacatgtgtagccatacgtatattgtattttgtgtgaatacatataggcatatataaattacgaactcatagaaaacatgtacattcgtcatattaatgtgcaagtaaatgagtaatggtgcattaattcgtatacaacttgatttaaaaaaaaaaacgatttttgtatagattatatgggttaaaattcattgttttctgtaaactctaaattaatttttgatcaattttttttgtaaagatagtatgaaacgatcatgattttcatagttacatgcatgcatatggatgtacacttgcatgtgggtacgattacatacttgtgtaacttccaaaactaacttttggacatggattaatttgtcaggagcaatagaccaaactaaacgaccgatggagttctacaattttcttcaagtaaacacggattcgaagatacacgaattgatagataattcaagaaaagacgaagaagaagatgtcgatcaaaacaaccgaattcctaacgagaattgtgttccatttttcgactttttgtctgttggaaactctgcctctcagggtttatgttaatttgtccgtaccacatgtactataaggtggaccatatgttaattaaagataatgtagaaagtactaatcaattagagctcttgtttgagccaaatgtgaaaattagttaagccatcccaaacatgttcttgtataacaaatataaggttgtacttttccacctttatcaggtctaattttctatttttattttaaggatgtttaatcagactcatcaccattcggtatttttttttcttcatatttacagaaattcaatcagaccaatcgataaaaaggattgagcagaagttaatttattttaaaacattattaagtttaaaggtttgtcatgaaaccaatcttaaactgaaattctgaagtaaaaccaaaaatttattccaaactggcctagtttcactttatactcattttggctatggactatggtatatattgtctaaattacaagatgcgtatgtactgagaaaattctgtgtcctgaatccggattaatctataaattatcgtaatagaaggacttgagagttgagaccaagattttatattttgtggaatttaatttgcaatcgtcggatataatttttgtgttgttgcgttcttaaggaagatcaaatattataaggtttgattattaaccgaagaaaatatgtcattggtgcctaaatatatgtaccaccaaatgaacatccttttaatacagtactacttaattataatttcatgcagactattttgactcatataacttgtgatgatgatatcaaaaaaagaaaaagttttttttttttttaaactagtggttttatttatgagagccttttaacttctaaaataaagtttggtttagtttctttaattgtgtgaagaataataataagttaataacggaaagacgaaatcgaggttggagtatagatatgattaagttgggagtagttatcagccaccaagaaatacaatcaaaagtagcaatctacctttgtctagcttaagaaaacacgaataaaatagttcgttttatttaggtggagatgaagaacacacatcttgacacgacttataaccatacaattctccatccgaaattaatatatgaatttatatcatcgagttttctttttcttttcaatttacttttttctgaaactgatgtcattatgattgctagggtttcctcgttgagttagatatgtatgtcaccttgattattattgtttaagacaatacgaaagaacaacccaaaaagataagcataactgtatatacatattttattatggaagataatgaaacgaaacgttgatcattgtacaaagatgttgaattaatcaaattttggataagattaagacacccactagaacaagaatgtattaatttctgattggatgtgtgtatatatttcctagaatcacttcatatgaaaataatgacgcgaatcgttgaatatttttcagtggtgactagttgattaattgttcaaaatagttgaaatttatcagatatagatatgataaaagatcaaaatagtgataagactttagagagcgagcatacagagtcaataaagtgccgatagatgcaaatgcagataggattaagacttgtttttacttatagcatcttttaaaaacactcagacaagtttgtgaaaataaaatgattattcaactgaaaattttcattagtggtgttaaaaaatcaattatgagatcataacatctttcgttggctttgaattaaacttgaattcaaagaaaacattgcgtcttaatccaaaaataacactgtcccaaaagtcgagattttattttgataattggttgattatacttcaatagtacattttattccaaaatgtgtcttggtacaatgaaaaagaccattataaaagaaatacattcatcatcaacagaaaaatgaaattttaaaccataaacatcggatctcagaggaagttgactgtcttgaacttgaattcatcaagcaaactttcgatgctcatctctggcaagtctttacggccttcagggtcctctctgagccgaactgtcacctgaaaatgttacagtcccaacaaaacaaaaagatcaatcaatgtttgagaagctcgatggtcaaagagatatgaatcatgagaaaaaagtgagacactcaacctgtccagttgcaacctctttttgacctacgaccagtatgtagttgtatggtgcatcccgagcatctgccacctacaaacacaacaaaatcatcacactcgtgaacacatataactatgcattttctttgcaatttctatatatacattcatatctaccaagaaaaaacgactttattttataatgaaatttagacaactagcctttacgagataaaaatttatggccttaaataatctcacttgtataatatgctcaaagacctaaacatttggaaagcttgtaatcataagaatttacctttttacggaggcttctgtcactttcatcaatatcaacatagtacccgacttcattaatctgtttttgtacctgtttgaatgtacgtgcaaaggaaacaaaaagcttagagattaggcactgcaagaattgcaggtgtgagggttcataaataaagaatgtaagaaaacctgtttggcataggaactacaatcctctgaaagagagcaaactatggcctggcggggactaagccagaagggccaaattcctttgtaatgttccaacaatatggcaaacatacgctcaatagatcccaacaccgcactatgtatcatcacaggtgcctccatttcgtttttttcacttaggtatttcagtttgaagcaagccggaagttgaaaatcaagctggtacgaagcaaataaggatcaaaatcttattgtaagagatcaagaacaaaaaacagaggaaaaaactaaaaagagtttgggagcctaacctgtatagtagcacactggaatttcctattcctggcatcagacactgttatgtctatctttgggccataaaatgcaccgtctccttcctttatcttcagaaaacatcacactttagaatctctctatgaattataaagttttgagtagaagcatcagaaagtagtgacacatacaacccatggctttccaaaatcatctagagctttttcaagatcattttcagctttagcccatgtttccaaatctccaatgtgatcctttggcctctgaagtcgaaaccaacatgcaaacaatgagatacgtgaccataccatgcaaagtatattaggtttggcagagaagaaatgtgaaaatatcctaccgttgaaagcgttagttcataggtaaacccaaatattctgtaaacatagtcaatgaaatccaacacacccttcacttcttcctcaacctgcaaatagataagaatatttctataaaataagaaactgggaggataaggagctccaacgttgctgcataagaaacaaatatcacaaacctgatccactctacagaatatgtgtgcatcatcctgaaaacaagtatgcacaatgttatttaattaagcaacacgcgcacaaaagggttaaaatcaaattgacaaactactaagtaaagtaaagtaaaggggtaacttcttcacttcaacatggcaaataagctgcttaactaatcatgatatcattttgaatgtcgctagtctttatataaagcaatcaatttttaagttttaaacattttaccacaagaaaagtccagaaagatgcaaacatacctgtacaaaccgtcggacacgggtcattccaccaagtgctccactgtcctcatttcggtgtaacactccaaattcggccattctaatgggtaattctacattccataccgcaaaacaaaaaagatgtcagcaaaagatatatatgcaacacttgcttcgatgtttggaaaatgattgtcgtttaatcccagctcgccataataaagtgaatcgtaatagaagccctgcaataacaattaccatcagagatagcccgtctttgcaacattacagatgaaataccaagaaccaaacaatattgactcctcctttttttactcttttagccaaagaaacataattaaggggaaaaaacacagaacaaagctcttacttcatctctgggttcgcagggtccaatacatagcttgcatccatactcctgctcgagagcctggcctagaatgtgggcgctagaatgccagaaagtattacggccttggtcgctgtcaaatccgaaaatctctaaggaacaatcaccttccaggggcctattcatgtcccacaagacatgattaaccgaagaaaccagagcagattttgctaaacccttagaaatctgcactgcgatgtccattggagaggtctcccatctccttccttctttctcgataccgtcggggagaagagtaatcctaagcagtgaaacaaaaaccagaaatcaactaattgcaaaaccctagcttagcaaacaaattgatgcaccctagtgaaaatgatgaacaattaatcataaacgtatttacttgattggatcgtgtggccgagattgaagctgctcaagctgctcggcttggatttcctcgaagagcctgatacgcttggggatgacggatgagagataagcctcatccttgggatgatgattattcgccatcgatggatgagcagagaacgaaggacaaatagaaactatagaatatagaagatgacgttgagagcagaggagtagattatcccaaggtcaacttcccttttatagctacaacactaaagtgacttgcgggccaagctttagagcttttcctttcattttttgtaataaggtaataacaacaagtggcagatgcacctaactttacataatttccttttgtatttaaataattttctacaatatttataatttcttttcaattgaattgtagttttgttgataaaatgcaaattaaaagtatatgtatataacctattttggcgtgactttctttgatttaatgtttcacatttatatttgttgcattctcaataatatccaaatgaccattattaggcctattaatgtggaagctataaaatcagtttgaagtgggcttattatttgtagttttgggctcttaaaagcctattaatgatgaagctagaatcagttttgcaacgttctcggatggtttcgtgttacaaaaatgtagtcgggttcgatttggttgaaccgggtctggtagacaataatgtaatattggaaaggaaaacggttcaggcttcgtggcgatgagcatcaaccatcaaggctttgctggatgtcttcaaagctcaagagtgccaactttatgtatacgaggattgttcaaatattaaaaccaaccaaagaagtggtcttttgatgtttaagcttatcgtaggatgtttcagctggactttgtgtctcttctttatctctaccaaaataatatctaatcactctctctctttttatttatttaacaagattgtttcgacttaaaagagtcatgtagtgactgacacctttcctatttttacaagcaagcatcattttaaaaattttaaaatttacttttctggaatagaaaaaccaaaaataagcaaaatcattaaactaaattgcccaaaaaaagttaaaaacccagagaaatactcaaattaacctaaacaatatctcttataaaatcattatttctaatttggtagtattcacaaaagatatgcatgagctgattttgtttggaatctcatactaatggttgcatgtaaaaacaaaaactaaaaaatctttaatagtattatataggaaaagctataatcattatacaaaaactgtatcatcatcatcatcaagcttgaaatcactctctttcatccttccccgcgcactgtgtctcgctctctctctcccacatttccattatctcctttactttctttctttgagaatgtcttctacaacaatcggcgagcacatcagactccgacgagctagaaaccaaacaatccgtcatctccacgccgccgacgatgatccgccgctaagccacgtcgttcttccgatttcacaacctaatcgcttctgtaactccgcaatgtcttccttctttcccctcccgacttcctcctccaacgaaagcacgaggaagaaaccgtaccaaacgtcgtcgtttcgagggatgggttgctatgccgcagcagcagcagcagctcaagaggtttctgttccctccgtcattcgctactccgcggatttggatgccagaattagaaaagataagaagaagaagaagcataagcataagaaaaagaaaaagaagaataaaggaagctacgaagatggttcgattaggattttaagcgaagaagctagagacgttattgatgtttggtgcagacctggattaggcttctccacggatgctgtaattggtcgatcggttgatcctcctcggggaaggaatattccgtcgtctcgtcgcaaaattgatgtggataacaacaattataatcacacactggtaaattgatctaaagttggatgatgaatttagtgttattatgttattgactttgactttgaggaaatggtatcgtttaggcagaaactgtgtggagtggttggagctctagtggttgtagttagctctatgccaattgctgggccattgttagtttggtttggtttattaatatatgtgtttggattctcgtttagacaaatcataagggtctactttagatgtagcggttctctattattagtttttgtttcatgtgaggataatatagaaaatttctttgtttgacgtgcgggtggttcttttgggtttgatgctcaataaactaatcgaactctggtttggttagagaatggaatcttatcatgcttttgtctcgtttagctagaggatggaatcttagcattgtttaagtttctttttggttggattcaattggttaggggagttgttggatttattttgatcaaagaaacgcattgcttcagaggacttgaaaattaggaatctatcatcatgtctaagtgtttgagaaatgataacacaatgctacaaatgttctgcagggttcttctgttcttcccattcggtttctcaatcaagaaactcattctcatgatatcttcaactctgattctacttttgtgacatcatcacgcgctgaaccaacgatgttgtcaagtagatgtcgtggccatcttccacgctcttaccctgatgatcttaccgaggtagaatgttcttgccaaatagttgccttgtctttcttgcatctggtaaatgttatagatttgacttcttagtttattaactgatcacactcaacactatgttaaggtttgacttgtcacttggcttcatatcaactaagagattattctagagttgtctcttacatattctagtgactgatagagtggaagacaaataatgtaatcgttctctttggtgctgtatggtgctgtaaaactgttttggatggctaatagcaagtgagcaagttaaagaactaaaccatgcagctagtgtagtcatgttcctgctgttcactgcagatgaggatgctccagaatggttttgtaatgggaagaataacagattcccgtgataactaccacgaattgaggctcgatgttgatagcatgtcatacgaggtatgtttttcaaaatctcatgagaaaaacacttgcaatctcatcttctcaactttatcgagtgtgtttgctttggtctacgcagcaacttcttgagcttggtgatagaattggttatgtgaatactggactaaaagaaagcgagatacatcgttgtcttgggaaaatcaaaccatccgtatcacatactcttgttgatagaaaatgtagcatctgtcaggtaaactccagattgagtcaatggcttctcgaaacttcagacagatcatgagtttcataatgctattccttattgtttgatggtgacaggatgagtatgagagagaggatgaggttggggaattgaactgtggacacagctttcatgtccattgcgtgaaacaatggctttcgaggaagaatgcttgtccggtctgtaagaaggcagcatatggcaagccttaaaagacttttgtatctcgtcgggtttctgatagctcaagatctttcaagccaccttgctgtatagagatctgtatcatctgatacttgattcatatttgttgtttttgcatttagcaatcacaattttttttttttaagatcttatattctttgttgggtctatttatgtgattgaaatcaagagtttgaaatctatgttttctgttgcctaggtagatttaagacaggtagagagtaatttagcatatagcatacacgcacgtaactaagaatcaatgttttaacgtttgagtctgcatttatatatatatgtgaagtaaactcaacccagacttttatttatgacagaaaaagtgtttgggatccatagacaagaacacattacattaatcttatccaaacgagttttacatgagatcatgcaacatctaagaaaagcatataaatataagacataaagtaacaagaacccctcaacttaacatctcgaatttccgtaagtgctctgagattcttggcaatgtagggaaaagccattattacttgccattggttttgcctagagacgtgaagctcaatctgcgaataatcagacaaacaaaaacaaacaatctttgtcaaaatccaaaaatgtatattcaaacgttaagagtaaacatagacacaaaatcacttacttgattatcggttttcgctgttgtactgaaggtctatgtgccgcatcgggctgtcgcgtgggaagaacctttcaacaaaagagaaatcagacaggaggaataagatcaagagaacaatttatgtatcgaaaattgataagaaaaataagaaacctcaagttcttccactgcttcataagggaaaggagagccatttgaagtagcttcgaatggaggtatagttgcagtagcagacaggactgcaactttatgagatatctgctcaatcacttggtttccaaaatcaaaactttcttcaagctcctcagtttcatgagcttgaggagtggctatcttttctatcggaagactctctggtggatccttactgaaagcaacaacattttctggtggatccttactaataggctcagatttaccgtttgtacaataatctttcataggacttgaacaaattgatccaacagatggatttggactcccgccttcacaattctctacaggcactgaaacagcaatgtgtttagagttccttggctgatcggtgagtgtttcactatctccccattttctcttcttcccatcaactggactgttagaaccagctttactttcagaactcatttcggtagtagtggtagtagcagctggtgcacttgatgtagaagaatttctgtgctctgaacggcgattgctgtcccatgttcctttagaggtatgtgaaggtctaactccaccaggaaacacaaaattaggtaagcttctccgttttatatggccaacactaatctccatccctggaatccacaatgtgtaagcgttgacagtgtgtttaaactcctcaacggttcttctgatatcgaattgctcgccttctgctgctggaactccttgtttacgttgcagacccatgaagtaagagcaatggagtggccgggatgtgtcttgaaaatcatggggatgagggtggcaatgaagcattttaaaatgtctctcgatctaagattacaatgcaaacatccaagacaaatcattagcaaagcaaaatcaagagaaactattcaagttaaagtaaacatggcttttcaccttcagtgtgagctggcggaggcgtgactcaacccagcctttccattttcttagatcatcgacatttgcagcagaaatgtctatctgtagatagtttttatacgcttcaaagaatgcaaatggctcaaaaagggtatcccagtcagctttgtttgattccatagcctgcaagacatcaagccgttgtaataagtccatgaatctgcatagaagccaactatttggacttatcgaaatcttacctcacatatttcgtttcctctctgaaactctcctttcataatccgcaatgtactttcagagacattgtaactagagttcatacaaggataagcaggagtaatgatgggcattatatgcaaccgatcctttgggtttattctaggatcccaaacttgaagaccaagggatccttcatccggagaacaaagaaaaatggcgttcggccaattccattgatagaagaccctaaagaaccgagacactaaaatattagggagggcgttaggataaagttgacatatccgagctacaagcaatgcccagtttataccaccaagaaatcccgagacctagcaattgtcagaaagatactttacttaagcaacatgatagtcacataaaaaatagaagagcattatagaagaattctccatacattagagtatactccacgtcgtttggcccaaaatctcatgcatcttaatgttgttctgaaattctgctcagaaacaaagaaaaaaacatgtactcaggctaagcaaatcatatggatgagtaattaaattttagaagataagagatttatggtcagtgagcacgaaacctgaatgtttggaaccagacgcaagatttggtcagtaactctacaaccgttgagacttcgaacagtttgctcatcagcattctgtagaatggagtcctgtgataaatctaagtcctgcaccattaacatcaggcagggaacacatttaagcctccataagaggaacaggaccagagctccaggttcagattacctattttctacgagatccactcataacattcatttaaattcatgaacataatgtaaactgtgtaatagagtgaaactaattgattgtaatcagtaaggatgagtttagtgaggttcaattcgataagttaaaacatacttatctacgaatttcctagtcctcactaacaatcacctcattgtggacaagaaattacctcaggtataacccagagtggaagttgtgcataaaggagatctatagaaactccattaagtttgaatcccatcaatggaacatgagcatcaggcacagggtgcagttcagttacttccggcatttctgacagcattctttgtagctcaccaaagaaatcaccctaatggaaaatataaagatgaatattgaacacaataaattgacagaagaaataatcagccaacatatagatgcaagaggttatagtacttctctagttgcatgtctaggtcccacacataaagtgtctatatcagcaccaggtccatgtacctatttgaagaagtaaaacgaactgttataggagcactcaatatgctagaaatcggagagaaggaactctttaggactctgaattctctccaagaaccaattgcaaccataaatagccccctattgtgtctaagatttaccaataattaaaatgactgaaaagctcagttagatatgattcaagtgacatatataacattgagacctcaatatgtttaaatgaatgcaaagagcatgtaaagacgagtgattccacttcccactcagggacgtctcacaagacaagacaacagaaacaaaacacagtttccaccaattcacattgttccctttccctctacttcgcaatacaagaagaatgactaaaacaaagctaaatcttctatagatcttaatcattacccctagtcgataagaaccgaaagtaaatatctttgcattcgcctcatgaagcagctgatcattcaaccctttggcgcggctgattgttttaatccatgtttttacaatctggacacatcaacaacgaagatttatcaagagttcgttactaacatcgatgaaaactccataagcacaagttcttaggattcaaaagtactacaaaacctgatctagtatccccagaacctcctcccttctaacagcttcctccttgctctcgtacaatccaacatcttgcaagtgctgaacaaccaaataacacaactcaatatactatcaatcagtataaaactaagaagtatatcatgagtaaactttaaaactaaaacaataaagcattacaagaaaaaagcattaagatatcagtaaaaccttctcgagctctcttgtcttgatcacatcaaactccgttggtcctcccatagagataggttctgaaacgccaaaccgttgcccattttgctggacactagccatctatcctacttactttgctcttttcctctcttttttctcttttttcttaatatttcaatcagattctacgaaaataaaaataattgatctccgcgtgcttgttatttggtttctccgcgtgagaccaaatcctcgctggaaaacgaatcagccgcgtgcttgttatttggtttctccgttgcagtcaaatcagattccttctccaacattcgttgagaatcttacgcttaatcttctcggtctgtttcccggcaataatcttgtcgggtcaccgtcgcaaagaatgagatagtaaagtaaacacaaacaagttgcaagaatatataatttagtacccaaagtttctgtatattttattttaggccccacacttttaaatttacctgaagtaccttgaattttaattcgtatacggtattattacactacacataaatgattcggtttcttaaccatgatattcgtatatttgtgcaagtttatcaatcggcgtaagttttgcgaaagcatttgtgactttgtataaccaattttagttttgttgaagcatttgtgtaagcaattttggaacttatagtttgttgcggacgatgatgattttatataggtggtacgttgtagtggaaatgatgaaacttggagagttggacactgccgaagcttgtttgaggcaagctttttgccttatgtgattgaaaaatatgttttgctaataatgcatctgaataaaccccttaagcagttgttgtatctgtggtctcgaggaaagggtagtctgtatagcccactacaggatctgaagtgtagaacgttgatctatcgtacctattcaacggctcattgagttcgaatctcctcgtcagatccggattcgccaagaacggccgtccataagccacaagatcggttcttccctcttccaccgccttgttcccgtcttctctagaatatcctcctgctactatgaacgtacctttgaaggcttttcgcatgggcgtaagcgattccgtgcattcgaagattccttcaagggttttcattctaggttcaaccatgtgaccgtagacgactccatgccatgcttgttcatagcttgcaccaggtagagccctaatgcttctggattcgagtctcctgactccatgtaatctgcaaatggcgagagtctgattccaacacgatctgaaccgatctcgttcaccactgcttcgattacttcaagagcaaatctacagcggttctctaatgacccaccatattggtcacttctgtcattcactttgtctttcaggaactgatcgatcaggtaaccatgtgcgccgtgaacctccactccatcgaagcctgtacttgtatatatgtcaagtgtcttgatcatctaacatccaaaggggaaaagactttgcttaccagcttcgatcgcgtttcgtgcagcgattctaaagtcgttgacaatggcgggaagctcgtcgctccttaaccgccgtggaggcttaaactgacctccatacatgttcttgcacatcaatggcttgtctgtagaggagacgggtgcttccccatttggctggtctaaagaatggagaaaatttagtatacaagaacctaaagcatcaaaatctttttcgttttggtttacaacaaggaggaggaagctacagtttttagcaaaccttgatgaaaaactctgccaccatgccaaatctggcagaagaagataccgcctttcgaatgaaccgcatccacgatgggcttccatgcctccacttggtctctgttccataatccaggtaaatccggatagcttgacaaacagagctcacatgttagagagcgaagctattggtgtattttgaactataagctaaaaatattataatccagcagagttatatataccccaatgatgtctcggagactacacaggattcggaaataagaagaccaccaggtgttgttctctgagtgtaatataatttggcattaggctgaggaatgttaccatacgatctcgatctagtcaatggcgccaaaacaaccctgatcacaattcaaagacaacattcaagcttcgtaccttccataagcaaaagaaaagattttgaagaaacccagaatggtgcttaaaagttaaaaggttgagttggggaattctatcaaacactatgtgtatgcataagagtcaaaacacatattcaaatccaaacggactaaatggaagattcagggggcaactataacagagactgagacatggagaaaggagtacctgtgagaaagattgaagggtcccatcttatagggcatgaggagagggatactctgtttagtctccatggaatccgtgtgtgctgtctatgtgattcttcaacaactgtggaaagataatatttatataaatgatacatacagatttggtgtattgactggtcaaagcggtgcccaagtcgtcgtcttcttattagacaaagccatcatatatgtttgcagttgtatctagctagaagcttgtgtgcttgagccaagacatgatttgagttagtatatcaaagtacagctataggttgttttcttgacgtgcatgcgatcctaatcattgttttcatttctgtaatgcgtatagaaaaaaaaggttgcatgtccacatgataatgccttgtgagtttttgacaattaggcagttctttccacactcacggtgagt

SEQ ID NO: 1130 - DNA, 81129 bp, Arabidopsis thaliana
aagcttgtgtgcttgagccaagacatgatttgagttagtatatcaaagtacagctataggttgttttcttgacgtgcatgcgatcctaatcattgttttcatttctgtaatgcgtatagaaaaaaaaggttgcatgtccacatgataatgccttgtgagtttttgacaattaggcagttctttccacactcacggtgagtcaaataaaagaaagaagacgtgcacaaatgcttaaggttagagttttctaatttgttttctcaaacaactttccatcttgactcattcaacacttctgtgatgtaacagatgatgtctcttcacacaaagacatttcaagtttagttattattcagcgaagaatgagattttcttttatcccttagcctttgccctatcttgataaggttatggaaattgctggtccccatgacaagtatgtgattggtgtaacacaccatccgtacagtgaagattgcaccatcgatgccaacttgtattctctattattatcatctctgtctcaccccatttcgatcgatgacatcactactcaaaagttatgtgtcatatatactaaacaaaggacactactttatgagaactcaattaccatgcataaaagaataaaggcatttcagagcctcaaatctttgtttctctatgtaactgttacattcataacagaacgtcatcgtattaaaaaacagttaacttactcaatgttctaataaactactatcttctaaaccttatcattactatcatcatcattatcatttttaacataaaaatacacaagaagaacaagtaaaggataacttacagtagtaagtgaccaattaacaataagctgtgacattaacggaaccttacgagtatccacttgccaagccactgcagctcctgcactctgcactcctttgtagaatccactatatctactcaaagtctgcgaatcatcagccaatgctcctatcaaccaataaaccatactctgatacattgcatctaacaatccatagctcatatataacacgaatggtcccgcaaactctatcccggaatctttaaaatcaagtttcttttccggtagtttgtccaacgagtaaccgtgctgattcgctaacccgcccgcccatataatggttccgattaccgcgactagtgatattccggtgaatcctctagctcgccggcttttgaagctgaagtccatcacgtaaccaatggcgatggatccagccatttgagctccccagtagaagacattgttgaatcctctggttcttaagttaaagaggagtccattcacattgttgaattgatagctgtagaagaaattgctagcccaagccgcggggacgatgaggagcattttccgatcgaggaatagccgtagcacggcggctgcttcagttgacggacgggagtatttcacggcagagcatctagatccgtcgttacggatcacggaggtcgccgggaggataccgaaagagagaagaacgccggcgaacatgaaacacatgaacgctatgtacgtcgagtcgttgaccgatgcggcggagctacgttggtagttgaggataaacgggattaatccaccgataacgccgccgagattgaagatactccagaacaacgctatgtaagtgcctttccgatgcggcggagggtatgacgtcatcacagctccttctccggcccagagaagtcccgcgccgcaaccgagtaaagctccggcgactatcgcgaaggcttggtggtggtgatggttgtagtagaggaaagatccggcgtagagtacgtaagtcgaacatccagcggctaacgtgagccgtggaccaagaacgttgtaaaacccgccgcctaaaaggccgaaaacggtgaaagcggtgtaaacggcggtgttagcgttgttagcagcggttggatctacttgaccaccgcctcccatgccggagagagcgttgaacattcctggacaacagaaacaaacgaatcccattaagctcacttgagctagaggagaattaaatcgccatttgttctccggtgatttattctcctctcctccgccgtgtttctccgccgtagtttttccctcgtctctcacattcatgatcggataaaatggttaaagatgagaattttaatattcttctcgtaaactcaaaacagggctcggatctgtgactgtttgtgatccgtctgttacgattctttctttagtagtagcggacattttcatgggaataaatattaactaaaacttaattttctaacaaaacaaaattgatgctctctactggtttaatctaatcctagtaaactgtaataactagagcgaaaagaacatgtcaatgaatgttatctgttacgttctttctacgaaaataaaagtcaaacgtcattatttttagaaaaacaatagctacttcttcacgttgacactgacaaccaaaaaactagtactccctctgttgtttagaaaaacataaaagaaaacatgttactaaaaaatagttataaatatataatttttttgtattttacaattttctgatttttaaattaaaaatgtttaattatttttcttaaaacttacaattcattaataataaccaataaatattacataaaaaacatattaaaaaaaatcaatcttttagaaacaattttttcttctaaaaaaatcaatcatttaggaacaaagaacgtaatatactattatatttttatataattaattaatatcgacctagttactactaaatacttttatattaaatgagtcaaaactataatattaaaatagttcaaatctataaatatcaaaaatagtaacagaatcaaatccagctataatactataaaattttctatttaaatagatattaaaaaaaaaaaaatttggtaggggatatttcaaattgacattgtcatattatatttgtattatgggttttatttaagagtttttttttctaatcagaattaaaaccaaagcaacatttaattaaagcaaaccaaaaataagtaagaaactatatatacagtatatcagatgatgtgaccttaaaatcttaatttatataaacccttgtccaagggaaaagtgtcacatgtcagctttttaaagctttgtgtttgggaaaaacattattttattatactaaactagattaaattttgcaaatctaaaagttaaattagttaaaatacaaatattattggaagagaaaaataacaaaaatacatattggatcatctattatattagattttgcaattctaaaagtttaaacttattaaaatacagatattattggaagaggaaaataataaaaatacagatttaatcatctattatattacattttacaaagttaaaaagtcaaatgtaataaaatacatatattgttagaagggaaaataataagaaaacagatttgatcatatattgtccagcaaaatgggcaacggtttggacactagccatctatcctacttactttgctcttttcctctcttttttctcttttttcttaatatttcaatcagattctacgagtataaaaataattgatcttttttttttctttttctcaacgattatttgcctgaatatttccaataatgtaaaactaaaaaccgaaaactcaaagaaaattactatggagaaaatgttgatcatacagaatacaaatcaaaggcctttttgcgaaatttaaagcaaagcaacaaaaataacagaaaaatttcatacaaaagtagccaaacgagtcgggaggctcttctcgggaacaacccttaaaccctaatccaattgactggtaatacaacgaacggaatcgagcgtacagcagaaagtctcggcctttgaacacccgattgatcgatgcgaactgggtcccgtcggtgaagtcgatctccggcgatacaggacgaatagattctccggcgaagtgaagaacttttttcccccaaattgtcgtgcggagtttctaggtttagggtcgcaacgaatttcacccttctcgcgagggattgcgacaaaaaactctctggccacacatatataaatttatggatttttagaaaacctattgatattccccacgagaaagaaaccgtgttccaatacctgacccgattattgatccgattcccttaattgaaaacccgacccggaactatttatttataggtttaatatcttactccctctgtttaaatagatgtaattttaaattttttttttttaaagtattagtttcatttgtctatgcaataattaaatatatttaataattttatactaattatatgttatatcatattttttattgattgatttagttgtaattaataatgtttttatgtaaaaaaataagttaaataaaattttgtgtttttttttttaatttatgtgaaaaaaaattaaactataaataatatgaaacagagagatataaattaagtaggattctccagaagctgacatgtagcaacaaggagttacacatgtccttattttctctcaccatctctttttctttacttctttccaaattcatcattttccaaaaaaaaataaacaacttattttttatgtttacacaagttatttacttcaaatacatcactattttccaacaatacaacgtttattttatttgttaaaaattagcaaaatttaatttaatacatgatcaaatctgttttcttattattttcccttctaacaatatatgtattttattacatttgactttttaactttgtaaaatgtaatataatagatgattaaatcaaatctgtatttttattattttcctcttccaataatatctgtattttaataagtttaaacttttagaattgcaaaatctaatataatagatgatccaatatgtatttttgttatttttctcttccaataatatttgtattttaactaatttaacttttagatttgcaaaatttaatctagtttagtataataaaataatgtttttcccaaacacaaagctttaaaaagctgacatgtgacacttttcccttggacaagggtttatataaattaagattttaaggtcacatcatctgatatactgtatatatagtttcttacttatttttggtttgctttaattaaatgttgctttggttttaattctgattagaaaaaaaaactcttaaataaaacccataatacaaatataatatgacaatgtcaatttgaaatatcccctaccaaatttttttttttttaatatctatttaaatagaaaattttatagtattatagctggatttgattctgttactatttttgatatttatagatttgaactattttaatattatagttttgactcatttaatataaaagtatttagtagtaactaggtcgatattaattaattatataaaaatataatagtatattacgttctttgttcctaaatgattgatttttttagaagaaaaaattgtttctaaaagattgattttttttaatatgttttttatgtaatatttattggttattattaatgaattgtaagttttaagaaaaataattaaacatttttaatttaaaaatcagaaaattgtaaaatacaaaaaaattatatatttataactattttttagtaacatgttttcttttatgtttttctaaacaacagagggagtactagttttttggttgtcagtgtcaacgtgaagaagtagctattgtttttctaaaaataatgacgtttgacttttattttcgtagaaagaacgtaacagataacattcattgacatgttcttttcgctctagttattacagtttactaggattagattaaaccagtagagagcatcaattttgttttgttagaaaattaagttttagttaatatttattcccatgaaaatgtccgctactactaaagaaagaatcgtaacagacggatcacaaacagtcacagatccgagccctgttttgagtttacgagaagaatattaaaattctcatctttaaccattttatccgatcatgaatgtgagagacgagggaaaaactacggcggagaaacacggcggaggagaggagaataaatcaccggagaacaaatggcgatttaattctcctctagctcaagtgagcttaatgggattcgtttgtttctgttgtccaggaatgttcaacgctctctccggcatgggaggcggtggtcaagtagatccaaccgctgctaacaacgctaacaccgccgtttacaccgctttcaccgttttcggccttttaggcggcgggttttacaacgtcctcggtccacggctcacgttagccgctggatgttcgacttacgtactctacgccggatctttcctctactacaaccatcaccaccaccaagccttcgcgatagtcgccggagctttactcggttgcggcgcgggacttctctgggccggagaaggagctgtgatgacgtcataccctccgccgcatcggaaaggcacttacatagcgttgttctggagtatcttcaatctcggcggcgttatcggtggattaatcccgtttatcctcaactaccaacgtagctccgccgcatcggtcaacgactcgacgtacatagcgttcatgtgtttcatgttcgccggcgttcttctctctttcggtatcctcccggcgacctccgtgatccgtaacgacggatctagatgctctgccgtgaaatactcccgtccgtcaactgaagcagccgccgtgctacggctattcctcgatcggaaaatgctcctcatcgtccccgcggcttgggctagcaatttcttctacagctatcaattcaacaatgtgaatggactcctctttaacttaagaaccagaggattcaacaatgtcttctactggggagctcaaatggctggatccatcgccattggttacgtgatggacttcagcttcaaaagccggcgagctagaggattcaccggaatatcactagtcgcggtaatcggaaccattatatgggcgggcgggttagcgaatcagcacggttactcgttggacaaactaccggaaaagaaacttgattttaaagattccgggatagagtttgcgggaccattcgtgttatatatgagctatggattgttagatgcaatgtatcagagtatggtttattggttgataggagcattggctgatgattcgcagactttgagtagatatagtggattctacaaaggagtgcagagtgcaggagctgcagtggcttggcaagtggatactcgtaaggttccgttaatgtcacagcttattgttaattggtcacttactactgtaagttatcctttacttgttcttcttgtgtatttttatgttaaaaatgataatgatgatgatagtaatgataaggtttagaagatagtagtttattagaacattgagtaagttaactgttttttaatacgatgacgttctgttatgaatgtaacagttacatagagaaacaaagatttgaggctctgaaatgcctttattcttttatgcatggtaattgagttctcataaagtagtgtcctttgtttagtatatatgacacataacttttgagtagtgatgtcatcgatcgaaatggggtgagacagagatgataataatagagaatacaagttggcatcgatggtgcaatcttcactgtacggatggtgtgttacaccaatcacatacttgtcatggggaccagcaatttccataaccttatcaagatagggcaaaggctaagggataaaagaaaatctcattcttcgctgaataataactaaacttgaaatgtctttgtgtgaagagacatcatctgttacatcacagaagtgttgaatgagtcaagatggaaagttgtttgagaaaacaaattagaaaactctaaccttaagcatttgtgcacgtcttctttcttttatttgactcaccgtgagtgtggaaagaactgcctaattgtcaaaaactcacaaggcattatcatgtggacatgcaaccttttttttctatacgcattacagaaatgaaaacaatgattaggatcgcatgcacgtcaagaaaacaacctatagctgtactttgatatactaactcaaatcatgtcttggctcaagcacacaagcttctagctagatacaactgcaaacatatatgatggctttgtctaataagaagacgacgacttgggcaccgctttgaccagtcaatacaccaaatctgtatgtatcatttatataaatattatctttccacagttgttgaagaatcacatagacagcacacacggattccatggagactaaacagagtatccctctcctcatgccctataagatgggacccttcaatctttctcacaggtactcctttctccatgtctcagtctctgttatagttgccccctgaatcttccatttagtccgtttggatttgaatatgtgttttgactcttatgcatacacatagtgtttgatagaattccccaactcaaccttttaacttttaagcaccattctgggtttcttcaaaatcttttcttttgcttatggaaggtacgaagcttgaatgttgtctttgaattgtgatcagggttgttttggcgccattgactagatcgagatcgtatggtaacattcctcagcctaatgccaaattatattacactcagagaacaacacctggtggtcttcttatttccgaatcctgtgtagtctccgagacatcattggggtatatataactctgctggattataatatttttagcttatagttcaaaatacaccaatagcttcgctctctaacatgtgagctctgtttgtcaagctatccggatttacctggattatggaacagagaccaagtggaggcatggaagcccatcgtggatgcggttcattcgaaaggcggtatcttcttctgccagatttggcatggtggcagagtttttcatcaaggtttgctaaaaactgtagcttcctcctccttgttgtaaaccaaaacgaaaaagattttgatgctttaggttcttgtatactaaattttctccattctttagaccagccaaatggggaagcacccgtctcctctacagacaagccattgatgtgcaagaacatgtatggaggtcagtttaagcctccacggcggttaaggagcgacgagcttcccgccattgtcaacgactttagaatcgctgcacgaaacgcgatcgaagctggtaagcaaagtcttttcccctttggatgttagatgatcaagacacttgacatatatacaagtacaggcttcgatggagtggaggttcacggcgcacatggttacctgatcgatcagttcctgaaagacaaagtgaatgacagaagtgaccaatatggtgggtcattagagaaccgctgtagatttgctcttgaagtaatcgaagcagtggtgaacgagatcggttcagatcgtgttggaatcagactctcgccatttgcagattacatggagtcaggagactcgaatccagaagcattagggctctacctggtgcaagctatgaacaagcatggcatggagtcgtctacggtcacatggttgaacctagaatgaaaacccttgaaggaatcttcgaatgcacggaatcgcttacgcccatgcgaaaagccttcaaaggtacgttcatagtagcaggaggatattctagagaagacgggaacaaggcggtggaagagggaagaaccgatcttgtggcttatggacggccgttcttggcgaatccggatctgacgaggagattcgaactcaatgagccgttgaataggtacgatagatcaacgttctacacttcagatcctgtagtgggctatacagactaccctttcctcgagaccacagatacaacaactgcttaaggggtttattcagatgcattattagcaaaacatatttttcaatcacataaggcaaaaagcttgcctcaaacaagcttcggcagtgtccaactctccaagtttcatcatttccactacaacgtaccacctatataaaatcatcatcgtccgcaacaaactataagttccaaaattgcttacacaaatgcttcaacaaaactaaaattggttatacaaagtcacaaatgctttcgcaaaacttacgccgattgataaacttgcacaaatatacgaatatcatggttaagaaaccgaatcatttatgtgtagtgtaataataccgtatacgaattaaaattcaaggtacttcaggtaaatttaaaagtgtggggcctaaaataaaatatacagaaactttgggtactaaattatatattcttgcaacttgtttgtgtttactttactatctcattctttgcgacggtgacccgacaagattattgccgggaaacagaccgagaagattaagcgtaagattctcaacgaatgttggagaaggaatctgatttgactgcaatggagaaaccaaataacaagcacgcggctgattcgttttccagcgaggatttggtctcaccggtgaagaaggcaaagaagtcagaggaggtttccggcggaggagaagctgtagccgccgttggtaatagagaggcggaagaagataagcctagctttgtaagtgaagaaaagaaggagtttctggtcgaagctgatgttgctgaagacaaaggagctagacatactatggaagatgtttgggtggttttgcctgacgcttctttggatttcccagggacactaaggtaacaaatacaagctcttagttgaatcaagtttagtaattggacacattctgtttgtgggacttagaagaattaggaagatacgaatcttattgtgcaaaatgatatttttttaggtttctttataaagctaggtaggcttttctgtattggtatgtaggtgtgcgcattttgcaatttatgatgggcatggaggtcgtttagctgcagagtttgctaagaagcatcttcaccttaacgttctttcagctgggttaccacgtgagttggtctgtcttacttggttcatattaattatgtctttacaactgttttcatgtcattcactcggtctcacttcaccttcttctctgtcaaattgctgtttcagctggatgtcaaagttgctaaaaaggccattcttgaaggtacatatataagtttacttcataagtctcttaaaactttttagtcatttcattatggcttttcagatccacaggttctcaactgttaaagcaattttactttcaggtttccggaaaactgatgagttgctcctgcaaaaaagtgtttcaggtagtttgtgtatgtgtgtgtttgtcttggctatattctgcatctatgtttcgaatgtctgagcttttatctcggctgttgattgctttcctatatcttctccatagaatctcttagttcattcatatttatgcttctctctgacctgtgtcttgtacaggaggatggcaagatggagccacagcagtctgtgtctggatacttgatcaaaaggtatgactgtgatggggtctctggaattcaatatttttactctctagataaatttcataaaataactcgaccttttctccagtattcacacccataaactctcatgctttataggtttttgttgccaatatcggtgatgctaaggctgttttggcacgatcctctactaccaacgaattggggaatcatacagaagcaggtaatccactcaaagcaattgttttgacgagagagcacaaagcaatttatccacaggagcgctctcgcattcaaaaggttagtttttgatgagccagacagagacttccaagtaaatgtgagcacaccatgctctgttgataacttgctatgagtttcacagtcaggtggtgttataagctcaaatggacggttacaagggcgtcttgaggtttctagggcttttggtgatcgtcattttaagaaggtaatgatccggtggcttcccactttatattgagcccattatctgtgacattttagctctcgcgtgcaatattctatcgacatgttcttgaaccttgctccatatcattttgcaacttcaaatgcctagaatctgtaacttatcctaaaatcttatggtttattcgcatctaacgcaagttattgaatctagtttggtgtcagtgcaactccagacattcatgcttttgaattaactgagagagaaaacttcatgattcttggttgcgatggattgtgggaagtaagtaagctcttcgtttgtggttttgcagtgctctataagaacatttcattttgtctttatatatcaaagtttgctgctcatacacaatgcaaccgttttcaggtgtttggaccaagtgatgctgttggatttgtccagaaacttttgaaggtaaatacctacagttgtcaaaatcactttgtcctccatttcacactctctttaactacatagaaagaagctcaaaaaacagatgtttttcggtagccatgtgagcaaaatggcttgttagaaccttgtgcacacaagtaaagagtgtcaagggaaattaaatgtgagaaactaagaggctaagaactatgattttgtaggagggcttgcatgtaagcacggtaagtcgccgtcttgtgaaggaagctgtgaaagaacgtcgttgcaaagacaactgcacagcaatcgtgatagtcttcaagcgggtatgactaaagaagagcctgactgacatgtgggcatctgtttttctggctcgtatgtgttttataaacctgttgttggtatttggtaaaatctttttgagctgtcaatggatcaattaaattcctggggccaccatcgaaagaaaaatgagtttgaagattaaacagagctctctttgtaccgcaaagaattctagaagcaaaaagtagaaagctttataatcatagacttcatagtacagtatgatcagtttacaatgaataaaaagcctatgggacaacaaaatattatcattgtgaatctaaggtccctctggtttgtaatcaagctaaatatggaaaagaataaatcgccagattacacaagcagcagtaaattgacaacttaacaatggtgtggtttcaccagaacatgaaaatggagaagctaagagaagagtgcataaccaacagtcttactggaactcaagatcgagtttcctcttcagatgagatctatcagcactacaaattgaacaagaagaagtcattaaaacacaatcaatcttgaggctgtaatgacaaatgagattaatatgcagtgagggagaaactgtcttgttttttacctggtgattgttggcctgtttggaggtcgctcagcgaggatggtaaaatctaatgacatgggtgcttgttgatccttgtcaacatgagacttcaaactatcaaccctcccacgctcaggcatcactcttctaagcttacgtggtggtgattgcactgtaatggcctcatgtttaccgtaagatgatttaccatcctgcttaggaacgggctttgggagcttagccgggtcagtaggagcaggtgcagaagtgaagtacctgaaataatgaaaacaaaggtgtgagagcagaacgctagatatactttgcctataaacagatggtgaacattaggcacctgtgttctagagcctgcttaatggaaattctagcctttgggtcataggtaaacattttggacaacaagtcgagagcatcatcactaactgctgggaataaagaacgtagagacggtgcagggacaaattgatactctacataatctggaagctttgttaaatccggccactgatctgcttttggtgtcccaaaagcagcaaatattttgcttaattgatcaatatcactgtttccctgcaacggcaaaaatagaataagtaaacataccgagaaaattgataatgaatatgtaattatgtagtctgagagtgagtataacatccaaagagatgacaattggactaaagttttaatggtagccattagatttgagtaagattatttaacctgaagaaatggtctgcgtagtagaagttcggcgaatatgcaggcaacggcccaaacatcaactgcagcaccatattgttttgcaccaaacaaaagttctggtgctctgtaccatctagcaaacacctgtgcattatcagatatatcaagatatgaagataatataacaactagaaacaagagaaaataagttgcattgcgcatttggaaacagagctcacatggattctattgtaattttgggtgttcaaagggaaacaaagaaggcagaaatagctcaggtcaaaaatccggttaacagcaaaacttttagtacagatatgagatagctactgcaccatcatttaatatgagttgagactgtttaatacatgttacatttagtatacaactagagaaatgaaaagacatgagacatctaatcttcctcatccctagacataactactgataagaactacttaaaactttcttatcaatatttcatatgagttagtcgatcaatttggttatattacagcaatagataaaatggcaatgcggcaaaaggcatacctggtgggtaaacttacgatttggactaccaaatatacgtgctaagccaaaatctgcaagcttaagctgtccatcaactcctattaacaagttatttggcttcatatccctgaactcaagccacacataatcagtgcccaaaccaagcaacattacagagacaataagcaagttgttaaggataaacaaatgtacctgtgcaaaacccatttatcgtggcaataagcaagtcctttaaatgtcattaggaggtaggatttaatgtcggcgggtgagaggaaaatgttagaatcgcgaataactgcttcgaggtcagtctccatgaactcaaagacaagatgcaagttttccttgtgaggaaatgcatcaatgagcagaataatatgaggatgctttagctctttgagcattttgatttctctgagagctgtaatatttacaccttctctttgtttaccaagccttatcttcttaattgctacagtttgttccgtctgcaaaattacaccccacaattacttccccttgatccaacaaaaacttcaatcaaaatccggaaccaaaaaagaaggagaaattaggaattgccgacagatcctaaaccctaattttgcaaacaaaaatcagcaaagatatgaccttagtatcagtggctttgaagacgactccataggtaccttgcccaagaacctcttgcttgagatacctatcagcaactttctttggctgctccggcattttcgggtttttcagaacccactcaataatcgcgcctctctctttcttcttaattcacgtcgctagaattcgattgctttccgatttttattctaaattgagtaaaatcgacgatgaggaagataccgggaaaatttagggtttcagctttgagagctccggctccggagaaaaagtagccgttggcgcgtttgcagacgcaatcggctaatcgagggaaacaacaaataaagagaaacgcccaattatttacttttctagttttttatacatttaatatccaaacattttcgatttataaaagagaaaaatattatttaatatctaaacttttaaacaatagctaaattaatcgtgaatttttgattttttgaaatgactgttttatacctcaacaaatttaacctataacctataaagcatattagcaatccacgtgtttttgctagagtttagctgatttcttaagagctatcgttgctgtttctcgtccatatccccttccttgatagtttcaagctctttgccagtaatccattcagggagtatagctgcatacttgcgaggtggtggaggcggatacttcattgtcggcttctggtcactagcaaagcccggaggaggttttggaatctgaagcggtggttcccttaccctcaccctcaatggaacatcaggtatcccataatcactaagtttgatctcaggtccctcatgtaattctgcgcacggtatccagcaagctttttctggtaataagcatgataacgatctgagctccagaagaaggagtactttgggtttcccgcatagcttgtcatcatctttctctccatctcaggcccctccatgaaaaccaaacgggctgagctatccgcataatatctagtcctcggaggtacatctgccggagttcgattgcaaatcactcgacatctcttttctatacaaagagaaacacaaaataatagataaagttaacccttgatgacaagagatgcaaagagatcgattgaatgtgttgattatcacttgaccctgagctctatatgactatatttatacaaggggtaaactaccaagaaaacgaattatcttcctaaacgtaaatataagaaaaggcaaagatacatatccaaggactacttagggtttcggagagagataacaagtaccgtacctcacccaccggaaagtaacagccacgccgcgagagccacagtgacgtcgtgaacgaacgaactctagttctgaagcttggaaattgacaattgcaaatcaacggagaatatcctcttagaacaaatccacggagccctatgcgtagcctagcacttatagacgagaaacttgtgctccaggttttataatgggcctctgttattcgggcttataacttcgggccatatttacttaatttgaagttaaattcggttttgggtcgagattttgggttttagttgttttttgttgtgagagacgtcgttttccattttcaccatacattatctacttaaccggtaagaaccaaatcatacatacatgaactgttatgttataaaaccattctgtttaacatcagaacattacggaaaaacggtctatttccccatgggaactatcgcatctggctagatgaagcccgatctttgacctcttgctatttacccatgaaatgaaagttaaacgtctatttccccaccaattaaaagttcaagagcttaatgtccccgaatcgtggttacttcggtttgatacgtaaacccgagacgaaaccatattatcggtcaaaaccaaaccaaaaaaacccggattcgtttttaaaacccgatccattgtcgaatcccaaatccaaaatctaaaaccccaaactcaaaactcaagaaccctaaatcgattcccaatttttttatttccagttgaaagatgagcaatctgtcatcaagttcgtcgggatctacaggacctcgtggtcgaggaagagtggttggagtgccaaagagatgttggattatgtccagttctcagagcataatctataaccgcctctttgaacgcaactccactgaagaaactctgcttttggtacaaaaacccatcaccacgcctcacatgtatgtcggaactgtcgtcggctccttcaccatcgctctccgggtacacgtcgtggcgaattggtggttcgtcggtccactcgtttagcatttcttccaggtgaaagttatctctgtcttcagcttcgggatcgacatcaccatcaagatcggggtcgtgatggattaacgacatcccgacatcgatcgatcaaagttttagggtttggaaaaactggatttgaggattcgtcaggttaaattagggttcgtcgggagagaatttggggatttttttgtttaggttcgagagtcgggttacgggtcataattttggtttaaattaggtttattctggttctaaataggtttagttggttaagtcatcggtttcgcatacagtaaaccgacttaatccagttcatggacattaagttctcgaagttttatttcggggacattaagctcttgaacttttaattggtggggaaatagacgtttaactttcatttcatgggtaaatagcaagaggtcaaagatcgggcttcatctagccagatgcgatagttcccatggggaaatagaccttttttccgaacattacaaataggctcaatatcttcaaatatcatttacaaggagaggcagcttctgagaagtagaagagagtcattaggaagcaatgcgacgacaacgacaccagaaagctgtaccgccacttctacctcgagcaacggctatttcttcatcgatgtagaaccaaatgaagaaagggtctttattactaggctcttccacagcgtctttcttccccaagctgaactctagaggatctaatggtccaatctttatgcggatctgttcgaagacaaaagctagtatccgattcttccatgaaaaccttccttcgaatgttaatgctccaaatggaccaagatacaccccattctctattctttttccctggttgaaaaatcaagcacaagaattgttttgttacttccaaaatatcggctttcaggattttaaagtgcctcaacacttttaccaatcagaccctaaagcagtactagaaccagtttagagacttaccgcagcatcaaatctctgaacagcagttagagggaaataacgacctttcgtcagtttcttctgtatttatggtatataagatcccaagtcaatgatttgaatggatcaatcaagactgcaatatttataaaaacatgtaaaggctaattgaatatctaatggtacctcggcggtgaagataagcatccatgttcgtccaggagactcgggaccaccaagcgtttcaaggaaagtggatggatcaatcttagccttttcgatagcagagaaagcagctaaaatctcatctgctgcaactttccgagtttttgcagccgtttttaatacattcacactctccgttacttgctacatttcaaaatcatttcacaatcaagtaaaaactagttgcctagatatattcagaatcttaaagttagttagaattcatgtaatttccattcgattcaaccaaaactctaataaccaccttggttccatgaaattctatctcctagagctagaagtaaacacataacacttatgcgaagagtcccaaaatataaatttgaccagaaagtaacttggataagctttgtactcctcaactgaatttctctgaaggagttcgttatgaaacgactcttcatcggtctaacactatcttttcaaacacaatcgaaatgaagaagggtgctgcttactttgttagggatttgatcttttgccggtgggacaatctggttcctgccatccaccgtggctttcaccaaatgtaatctctcccgacgactaaagaacagagacgaagaagatggggacgaaacacatgaagctagtgagaccatcatcgtctctgagaagctcctcactttttttccctcttcatcattcttgttttttcttccacatcactttttcagacaaaccaaaaacaaaaacacactagagctcgtcgtttcattgtaatccacaagttttatttggttgagaaaagctttcagttgtatattgtttgtgtcgacctttacctcaatgtcctcggaccgaatccttccaattttaagaattgttgtatgttaaagttttatagccagtataaaatttcaataaatttccatcgtgtttaacttgatccaattcggtttcataattgcagcttatgttctatagacaaaatccaatccatttcgagtgaacttggatgcacgaggttatttatggattaacctgaccgaaacaacgaaataacttgtcgtatgaagcaaaaagctagaatgagctagaaaccaatacttgtctgacaagtattaaggaacgaatagagtttcttcaactatgaaatatcaatctccaaatagccaaaaaacatactcgccagccaaaagggaggtagtcgtattaactgttaatttaatttgaaagaaaagtaaactctcactcacgttcatcataattctctctagctttgaaatataaaggaaaatcggtctcaggtaacacctctccgcagcttgtaaatctcaactgtgcactgaaaaaaacaggtattaggacttgggttttagggaactcagatttcttagtccgaatcattcatgaagcgttttcctaatctccctcctggtgcaacccgaaagccgtctcctgctttccaaagaaacagaacccaggtttagattggccattttctaaagttaattcttccatatggtggcttaaaaataattgaaatcataagactcctcaccttttctctcacaaaatttggatcaagcgcttgagacagaacttaagagctcggtaacctttccaacagcaattgtttttcctgtaccgtatctcagataattaggatgagtaaaactaaatgcattaagcattgcatttgatatctctgaaatctcttcttaccttcagttcgtagagtgaatcttccaagttgagggaaatctgagaatttttcaatacaaattgaattcgtaacctgcaagtgatacagcaagggttgagaaataataatttgcgaaatataaatatataaatataagtaacttaaaacttctggctatgaatacgtgtataagagaaacaggaaacggtagttaggaggagacaaacctggatgcggcacacaacagcagcaccattcttcacaaacaaaactttctttttcattggtttccttgtcttgagatcaatttggcttttcaattcgataatctcacactcctcgacaaccgcatggatgtggagaattgccttgtaaccagctgtaaaaatagcctacacgagcagcaaaataatgaagattatttaaaactgtatatactcaaacaaataacattctagaacgtgtgccttacgttgtcaagcagctcaaggatttgtagttgggcaacaaactcggtaacagcagggacagggtttactgcaacagaaaacaaagaaaaaacagctaagagaagactaagaattcggatattaagccaaaaaaaaaaatggcaatgcaaatcatttattgtgaaggcaatctgtaaagcattatactcaccaatgctggataaaacaaaaccagaaaggatgtcctcatcttcaatgccagtaatacgaactctcaaattctcacccggtcctgcacgcttaactttatcctcatcgcaatatatagcaacaactttcacttgttcctacattgattcatgaaagtcatcaggaaaacaataaactggcaatgaaatatgaactgagaaagaaaaaaacatctgaaagcaccttgttcggcataacaaccaaggaatcaccctcccgaatgctgccagattctacttttcccataacaacagttcccatgtccttgaacttatcaataattggcatcctacaattcataaaatcgattccggttaacagtctacaacatacagagattggtttacagtaaaagacatgccaaagttgtagaagttgcatgtgatatataaaacaatgcacagagatgtgttaatccatttaaaacatgattatacacaagtaattgatttcctgaaatgcaacgaccaataattaataacaaagaacaaccggaataaaaagagagaaaacaaaaagtgggcagcggcggttcacctgaatggaccattaggatcgcgtggcggaatttcaatagaatcaagtacttcaaaaaagctagggccactccaccaaggacaaatttcttgacccatcctctggtccatatttttgcccattagaccagatataggcaagaagacaacatcttaacaacaaaagagtaagagaagaaattaaaaatgctgtttgaccatagttaaactgcaatgtttacagttcagtgcatacctttctttgtgttgtagccagaggctttcaggaacggtaccattttttgttctatttcatcgtacctgcataggatttacataattacaaggatgtacagaagaagatacgaaaatcatcattgacaaggaatcaaaaggtcttctaattacctttctttcgaccagttcacagttgggtcatccatcttgttcacaacaacaatcagtttagagacacccaatgttttggcaagttgaacatgttcacgtgtctgcccacccctctcatatcctgtttcaaattcaccttttcgagctgaaatcacctatatcagagaggcgtgggtagggaagttaataagcttcctactggagaagctaaatcaacagaaaacaaattaacttataagctgactaaccagcacaccaatgtccgcttgagatgctccactaatcatattgggtacgtaactcttgtgcccctataagtccagaaaagcacacaagaattagaacagaaaactcatccaacaaatattctgcaacccagattccccgcataaaacaaaaataaatggaaaacgattagtttagattgatcccttaccggagcatctaaaatagtgaatctagtgctctccgtttcaaagtgagcccttccaacttcaactgttttgccctgtcaaattaagcaaattattcatagcacttagcaaacatatattcaacaataaccttgatgggatttccataaacaaattatcatcaaatacatgcattttaagcaaaagaacaaacattgaccaaaacacatgaagtaccttaagcctctcttcttcatttgtatccattatatatgccatatacctaacatacagggaaataaaagtttcaaaactagttagaaagcaaagcactcatttcaggtttgaccaatcaggaacactcaccagctttctctacttttgtcttttgcttccttctcatacttttggatttgtcgatcatccacctgaccactaagaaaaagaatctgtcctccaattgtggacttaccagcatctataattgaaaaaaattgaagccagaagtcagccattataaacttaaaagtacacagacagaaaggtcatggccaatggggatttcaaatctgtattacataagctctgaaaccctgtgtctacacaaggcaattatcttgcaacctccagctttaacaaaaacatgcccataaaaataaaaataaaaatcattaagtagatagtcataccaacatgcccaatgaacacaacattcaagtgtctctttttatttgcttctgcaacatcttcagcttcctctttggcagccttctcttgagcagctttctctttagctaagatagattatatatatcagaatgataaataaatcgtcaggcagacaacaggataccagagagatgagacgggagcagtatgagaagatagtcaagtcaacgaacctttcgctggattatggactggatgaagcattacttcatcatgatcctcagaagctgaaaccaccaaagtccaaagaaaaaaagtttgttatggcaaagtaagataaagcaaactaatttgaagtgaaataaaaagaaaaggaaactgatgccaggaaccttcttgctcatcaggaactggaattgattcttgcacttcatctttcaagtctgtaagtaaagataaaatacatggttattctctttgtcaaatgatttggctttgtgtatgtattgtaataggtaccttccggtgctttatccaaattctcaacttcatgtgagttatgaacttctggaatgacaacaccattgttttcatctgcatatattaacaccaaaatttggtaccatagaaataagaaggaaacaaaaatacagttaaagctagttgtctctattacctgccgattcaagctgtaatgcgcggatctcagcctcaagatctgcacggcgtaaaaatgtataggaaataagaattatcacctccaacaaaaaacgtacagacatttagcaaagaattccacaaaatacccaatccctcgctaactgagagttaaattcactcgaattccaaagagaaatagctaggtcagttctacgcaagccaattaaaaccaaccaatcagctaaaccctaatccgatttctaatccaaaagccgataaccctccttccgatttaagattaactaccagagcaacaaatcaatcagcttcataatcgaagttaacacagtaaaacgcaaaaattcaacaaaaattgaagaaaagatccgatcgaccaacaaaagtagtaagcgcataatcgagaaatcgagagagaaagaagacacatagaccaatgactagaaagagagagctcgagaacccgtacccatggcggattgaagaagcgaacgaaaggaaaagggtttctaggttatctcgcgaaagaagaagaagaagcgcgttaagggatccaccaaacgaactagtgccgcttctatgaggctctcatttttgcccaggtggatcttttatattccctttttttgcgtaatcaaatttttcttatttcacatcccaaaactcacgtgtcaggtttaacgtaaatacgacgtcggttagctaatataaggccataatgaaagcccaactaatgggccttagttacccttgtgtatgattgttggaaggcccatattcactattgtgagcaatatttattttgtacaacaattggaaaagcctttgtaaaaagacactagattttcaaccgcggggactaattatattttaaagttaatatatataaaagtttgtaatttgtaactatctatgtaactttctataaaatatttttattttatagtttagaattgttattaagtaacgtcctgccaaacccgtcccgccaacccgtcccgtaaaaaaaactcatttattttattaatgttgatcttatttatcatatgtttatgaatcattgtctaaatattttgtaattttgtagtaattaaatgctatcaaatatctctgcggtttgatgattataattgaattgtaatagtcatgcagaaaaacaatatcaataatgataattttgtagtaattaaatgatattaaatattttgaaagttttattttagtaaccaatcgtgtagttaatgtagagagattttaggaaaattgttaaatgtcaaatatttaattcgaagatttttttctaattatcaaaaacaaatattaatctagtggcaaccattgtaaataaatcccaactacaggatttatttcataaaatggctgcaaaaatgtatatatagatagatgtgtataaaaaacagaagaatttgcttgtaatttttattttatttttttaacacacccttataattttcaaaagtttgtatcttttacataatttctttcagttaaagaaagttaaaagttgaatgcaaaaaacacaaaagcactaatgagactaagttcttttctgtaggaaatctacccatagattctttttggggttattatcatctgttatatccatccttcaatcttgaccgcacaatgttatcttcttgttttgtatgttcccgatagaccgatactttggaattttaatccaaaaaagaaattgaatgttgcaatcagatttaagaatgacaaaagaaggagtggggttacacaaaagccaatgaggaggcatgtgacgtttttatgtaaaagggaatctaatagctaaacaatgtcagtccatttccctaaagtccttttcattaccacccccacccattctattttctttattttgaatttggtatgatgatattttcatcatttcatttcatgtactaatcaagctccatattccatatgaataaatgttactttaatagcaaaaatcgttatcagactcgtctattcattagttgcgtgtccactctcttattatattcttattcaattgaatttttccaatctaaagtaggttagaaaaagattggcaagatttgtttcatgattaacaatttaaataaataaattaattaaattaacagactaaaaagagtgaattagaaaaataactagaaaaaagtaagttcttgagtagtaatgaaagtgacaattgctagtaaataagtggtttatgaaatcatatatatgaagtgacaattgctgtaaatatgtgatttaatagcttttcattaaatatcacaacaaaaaatctgtgaaatgaatcaatagctattaaatcacaaaagtaaaaaaatctgtgaaatgaatcaataatcctaactattaatgggtttaagaaaagtcctcgaaatgaataccatctttgactccctctttctttctcattagggctacagatttttgtctttaaaaagccattcaagtttcaatggtttttcacttttgttctcctcctccctttttttcttttcaggattcttcttttctatgttttatctttcataatagatctgataattttgatttttcactatatatattatggttaatactagtagctttttcatttcaagttttatccttccattggttctttctgagtcaaattgtctcctgtttcgaaccatatataagttttcaatggttttgtattaactcaagtattcaacattatgtctctctttttcttgcttggatctctaatgctgttcatattttaaagcataggtttaggttagatgcatgtaactgccaattaaaagaaggtcaagagttttttgattgtatgaatatatgagttagtcaaagcagatccacacgattatatagaaaaacaaaggaagaagaagaggaagagctccttgaagttcaatggagggtttagcagggtgaagtaaagctgctaagctatggatcccataagccttatcaaattcaatataattgatgataaggttttttttatggatgccatatctcaggagctttcacttacccctttaatggcttcactcttctttggattgaagggagctcttcatctctccatccctatctctctctctctctatctttagttcttttaagaatgacttttcattttttgtgttgtctgttgcaggtgtataaacatggatgatggatcttgagtaggattttttattttattttcttgtgacatatatgcaatttttatggtttgtactttgtatttccattagtttcgtacttttcagttatgtatcattgttaattctaatgtttgaagacatttagagtttatacttctctaaattactttttcgactcaataaagtcgtttaagtgtctacaagtatataccgtgttaatacttttcaattcatatccaccattgtataaagatatgatccgcttttatttaagtgaatcaattaatttacagtattcctctatatctctctcacactgttcgaataaatttaatactcaacagatctagtttgaactttttaaataagtttagccgaagaaaattatcattgttgaacaaacttattaaattcggattggcttatttgatgcatccagattgcaaaactatatttttgaatacagctggaaatgtttttaaagtgtaaaacaacggtatatatataagtcaaactggttttttttgtagatttctctccctttagcaagttttattgctttcctataatccataatatttacatccaaaacagcaattatataagattttctgctatttcaatacgatgttatactatttcggcagatgtacgtactacattacatctaaccaatccagattgataactatatttgatgtaatctcgaattagtcaatctctgtaccacatataagaaattttgcttttttcacaaaagagttgttagaaatttgacctatacaaaaataatgaccacgataaatgagtatatacatgtacgtaagataaatgtaaagttgtatatttgtgcgccattcatgattcattccacgtatatattgtttgttcgaatcaaagcaaactcagaaaatgaaaacgctgaatgacgataaaaatagggacgcttttgttcgaattagcgtgcccattatgtcacgaacgtagattcaagtcttggccataaaacaggattccttatagcatccaccaaaacacgagaaatcattctcaaaaacagtctctccaaatccgaactaaacaactcatagcccatataataaggtctgtagtgggatgcgtttttggcttttagaacataccaattggagaacacgctttcttacacatggaaacaaattacgaacgcttccaccaaatatgggctgagataagcccattaacataagacccagtaataaatatataatatgagcccatattaaatgaaccctaatccatttttagtttctatcatataaatagcttcttgtgtttttcacgcccttcttctttgtatttccgcctcccccgagaaaacgaaaaccctagtttcagaggcatctccagacaccgaaaatggcggaaggactcgttttgaagggcaccatgcgtgcacacactgacatggtgacggcaatcgccaccccaatcgataacgcagacatcatcgtctcagcttcccgcgacaaatccatcattttgtggaaactcaccaaggacgacaaagcctacggtgtagctcagaggcgtctcactggtcactctcacttcgttgaggatgttgttctctcctccgatggacaattcgcgctttccggcagctgggacggcgagctccgtctttgggatcttgctgctggtgtctccactcgtagattcgttggacacaccaaggacgtgctctccgtcgccttctcactcgacaaccgtcagatcgtctctgcatctcgtgaccgtacgatcaagctgtggaacactcttggtgagtgcaagtacaccatttcagaaggtggtgagggacaccgtgattgggttagctgcgtcagattcagccctaacacgcttcagccgacgattgtatctgcttcgtgggacaagaccgtgaaagtgtggaacctttcgaactgcaagctcagatcgactcttgctggtcacaccggttacgtgagcactgtggctgtatcacctgatggttctctttgtgcaagtggaggcaaagacggtgttgttttgctgtgggatttggctgaggggaagaagctttactctcttgaagctaactctgtgatccatgctctttgcttcagtcccaacaggtactggctctgtgctgcaactgaacatggtattaagatttgggaccttgagagcaagagcattgttgaggatttgaaggttgatctcaaggctgaggctgaaaaggctgacaacagtggtcctgctgccaccaagaggaaggtacacaaatattttcccatgatggttcaatcatatgcttttaatcgattacaagttttcagcttttgtataggaagaattttctgtagttggttatgatgttgattatgacttgtgattaagtattacccatagctgagtatatcataattcgtaatgttggtctgttattgaaaatgtgaaagttcgtaaaaagtttcttacatggattattctattcaaatgctacacgatgatatatgtaaatggtcttctacacttggtttcagtttcagattctgcaattatgtttgcttgaattaccattccgtttggagacttaggctctctatcttctttatctgttttaatcttccatatatagcaattaccataattgtgttttcgccccagtttgagcctaaattgtcaattaaggttgtcttttaatggttttgtgtgtccatactcattgattacctgacatttcttgttaggatcatagtagtagtaatatttttctcctgatacatagccctttgtttgttgtgtaatagtacatgtaaataaccatggaaagtgactgaattcaatttgtttgttgattgggtcaggttatttactgcacaagccttaactggagcgctgatggaagcaccctcttcagtggttacaccgatggagtcattagagtttggggtattggtcgttactagtaatctcatcacttgtgctgtcgttgctctctgctatctgcttgttggttttatctatcacttatgtttttatcgacaactcatgaagtaccttgaggtttttggaaggatgtttgttttcttgtcaatctaggtttttgcttctttatcttatcgttcgagatcttggtttttagagttacttctcccattttgtggcaaatgattcccattaataatatagcgaaatggtggaatagcggaattctctaaaatttgtaactttatccaatatgacagatgaaccaaatgatttttaacatgtaataaactactgatttgcaacgaactaagaaggttatagacatgaacatactatctttggaaatggacatgaactgccgctattactgctgcttccttcgaccaacgaaatttcgccacatagactggtaaagtcgaacagccgctattactgctgatgtggcatctgtcgtattttaatcactcccgccattgccttttcgcgctaagtttttttttttacttatgcttttttactctagactggaaaaacaaaacaaaaaaggctataaaaagaaaaataaagaagacaaattcgcaagaaccctaaaaagaagaagataagaaatcggaaatgggcatcaaggaccttctcagattcatgaaaccttatatccttcccattcacatccagaaatacgccgggaaacgagtaattttctccgacttgttttcttaatgttctccatttccttctcgattttagtttccgttaatcgttctgggtaaatctccattaaaaatcaagtttttaaatgatgggcttacacatttttgtatgtccaggtgggaatcgatgcttattcatggctacacaaaggaggtaatcttcctgctcttaaatctccagaactgttttatctgttagtaaaccgtgtaattgcaatgaaaccaaacgaataaatatattattgaatatggatatcaattgaagcaatttcgagctgagagtaatctatttactgggtggttttcaaattcatgacttgatggaaaactttttctacagcatactcatgtagtatggagttgtgtttagacactgatgggaagaagaagctgaggtacattgattactttatgcatagagtcaaccttcttcaacactatgagatcattcctgtcgttgttctcgatggtggtaatatgccctgcaaggctgccactggtgatgaacgtcataggcaagtctctctagtttgatttgatcttatttggttcatcctcctttatgaattttttcttttaactaagcttttggtattttgttttgattatcaggaagcgaaaggctaactttgacgctgcaatggtgaagctgaaggaagggaatgtcgcagcagctactgagctttttcaggtgcttacttcttatttcagtggcttcggtctataaaatgtataatagtaactatcactgttaattagcagctacagagcattttcaggtgcttagttcttttcatttcaatggcttagatctttaagttgtgtaagtatttgcctattgagtttctatagctccaggactagtctgtgtttagaaagacattattacacgctgcttttttctgtatgtctttcgtgtcaattttaaaccagttcccaagatccttcagagataatatgttcctcttgaatcttatgtctagtttggcagtcctggtgtgttggtttgtgagtttcgttagtaatttttatcatgtactctgctttattagattttggtcgagactatgatattgtgtgagctcatgcctattttcatcacgattgcagagagcagttagtgtaacatcatccatggctcatcaattgattcaggtataaaattgtttattaaatgagtaccttttcttagggaaatatgaatcatctctagggccctaacaacttctcaggttctgaaatcagaaaacgtcgaatttattgtagctccctatgaggctgatgctcagctagcatacctatccagcctcgaactggaacaaggcgggattgctgctgttataaccgaagacagcgatttacttgcatatggctgcaaagctgtaagatattgttttctcacacaaataaaaaccaagttcatgattagtgttttaagagcattgtatgatatgtttccccaacttctgtatggaaaaaggttatctttaagatggaccgctatggtaaaggagaggaactagttctagataatgtttttcaagctgttgatcaaaagccttccttccagaattttgatcaagagctattcactggttagtatcatagtattgttgaattctcccaaattacagtgatacatttgtgttgctgattgttcttggtttggccttttttcagcaatgtgcgtattggcgggctgtgattttctcccctcggttcctggtgttggtatttcaagagctcatgcattcatctccaagtaccagagtgtagaactcgtaagcatttactttgacaaacccttgtttctcccatcgctaaaagaaaagcctaagacattcaaatgttggaatgatactataggttttgtcatttctcaagacaaaaaaaggcaaactagttcctgatgattattccagctctttcacggaagcagtttcagtttttcagcacgcacgtgtgtaagtaactttggtctcagtcaggtgttgctagactccatggttcgtttcttactttttccctttaattgaatctgttgcagatatgactttgacgctaagaagctcaagcacttgaaacccctctcccacaacctcctgaatttaccagttgaacaacttgagttcctgggaccgtatcctttttcatattctccctcaaatatttcaatcttctcttaataggcaaaagcagagcattcaaccattctaatcacataataagaccagaaaaaaaaaaaaaaaagaactatcacataaaagtccacttgattattttgcagttctgttctctttgacacattaaacttatcagagatctgtcgccatctgttgctgttgcaattgctgaaggtaatgttgatcccataaccatgaaagcttttaaccacttctcggtttctaggaaaccgttgaagacgcctgttcgatcattcaaggaacaggaaaagggaagctcctttttggtatgttctttgtctaaaagtgaggaaataatagagctcaaaaggactgcagatgaagctatgattgatccagaagctattgtgaagaagaagatgtactctaaacaagattcagatctatacaaactgcttgcgcagcctaacagggatcaagtggttacccgacccagcaatccctcacttattccggacaacaacccgttcaagattagaaaaaccgatgaaatcaatctggaaatcgcagaatacggtgtgcaagaactcgctgattcgtttgtgaccaaaagcaaagcagtggacgtggcttcttcttcaccaaactctcacgaacacgaggatcaaaaagagtgtgttacaatcgatctgtccaaacttgatgccgctggaatcaaacaggacagtgagaagaacagagtgaaagaaacatttgaaacaacagaagtagatctagctgaagttcaagatcatgtgaacatgacgacaaagagagtgcgtggaacaaaacctagaaccgagaatttcaaagtgaaaacaagctgtaaaagttcagagaacaacaagactataatcaagaagaaacacagtatattagatttcttccagcgattgtaatctctttaattttggtatgtaatcttttcttagcttctttataactcttaatttatgattatttggagaatatagagacgaacaccatatattattacaaacaactccatatcaaaaagacataaaaaagatacacatatttgtaagccatatagatagagctacatagatagatttagctataaccggactaatagataatgtggtttgatatataataccacattttttgtccgctttggttttttataggtaaaggttcctttcggttttcaaaccaaaaagttccggatttttggcttatttgtagatggtatttgtttactttttgtactagcgtctgcgtgaagcaggttccttttgggcgttgaaatagacagtggccacaggtagaccaagatcgaaatgtccagcgaacattcgtgtgctgaaattggctcgtgatggaggctgctgcaccatcagacccaccggtgagttttgccggaaaagtaccaatatgtaacggtgaatccccactggtggccttggttccatgtatggaagtatctcttttcctgaattttaaaacatggaatatttctcatcgtatactaatataaaataaattaagcaataactgttttcactaggaaacatgtactagtatttttcgtatcgtacaaaactgctatattttttcattgtgctgtttaaggtttcttataatatgacatgtgtaagctatttagttgatatacagcaatgcacacgcacggacacacatgagatgttcggtttcagaagacaccacatgtcgtaagtataagacatagcttgaaacataggaaaattaaatagtgactctaattctatattccttatgtataaatatagtagttaagaactgatctaaactactcggattcatgtttcttaataataatggaatttgttgaattatgtctcgttttataaattttagtgtaggaaagtacttggatatggccagctaaaaaaatataacagaagcagcctattagagagtttaggtatatggtttcggacctgaaatgttctctaagcaagtaatgtttattcttataatattgatttcatcatatctaaccgaaagcaccatgtccaaagataatatgtttaaatgaataattaaaattagtgtatcggatttgtcaattagatctaaacacgtcatgatgggcataattaactattactatattttcttaatgcctttcacactaacgtcactttatttataaattataatgcattaatatacaaagcaataaatctgtttaccgtcgtcaaaaaatatagtaaagagccaaagacaatcctaaagtaaagtcaagtaattgtattcaaaatcgaaaacttagctttaatctttagtattcaattcatacctcttgagggatttgtgcctccgggaatatccacgacaatcctgaaaataagaaatataattaatagtgttttattgcacctttatttatacgttaaattgtttacgttggtgtacaattgcttcactaaaaaaaaaaaaaaaaagagtgcgtaacttggtacgcaccagtggacccattctctcatgttcggctcgcttgggctaggtgcgtccgggtcagtcatcacctgcatgcatcgaaatatttgcattcacatacggccaatgaaattgcaacacatgcaacacgtcggttagctcagataactaattaaacgttatttttgtaatcaaaatttcagctaaaccgtgactaacacatttaattatgtgttagaaactcattgatatttatctatctattttaatataaaaattacgtcaacatctatgtgagtgtaccagtaaatatgtgtaaatagtgcagcacgtctcaaaattcatggaagtctctgcaaagtttggtttttagtatatctaaatgtattaagaaaatagatgttaaattaatagatgcttcaatgtaataatatatatacatgtttaaatttaaacatttcttgaatagagattgtgttcgactgcattgaacctcttagaaatggttttgaagtaatgtatgcatgcatgtttctactataatgatgacggtaaatcatgatgacgaggaagcatgtaaggtatgtgcatatatacacatatatgtttataaatgcataaatggatatagatgtgagaagatgaatatacgagagtgtaaagctcatcggaatggcccgagatgttgacttttggaggattgactgcggtggagggtttgatctcgcagccgttagtgatgtgtttggggccaaagtagacagacatattggcggttgggatgaacatgtccaacacatctccgatcactcttccgaccaccaaaggatcaacagaagccgccatcgatcagcggggagggagatatatatagagagagagagaaacagagaggttcttattttaaaagaatcgttgttttgttttgtcgcatgtccgaattcggatgggcatctatgtcatggtttatataggaaataatttccttacatcaagttttttttttttctgtcgtacatcaagaaatatttaataatagcatcgacaaatacaatgaatttgaagcacgttggcgataatttcctctttcttcgctattcactatttatttccacgttaattattttaatgtttttttcgaattaattattttagtttatgtaaaaataacaataatttagttttcaaacgaaatatctattgcagctgtaaaatgtataagttattaagaagaaatatatatcttcgaaatgtatttcatatatttattttaaataacatgttaatattttttatattagcaataatataaaaaagaaaagataaacgaactattacgatgcgttattttgtcatatataattatatattgtttgctttactgcaaaaattattttgtataaaattttaaatgaataagttcttaaaaataaaaatatatcttcaaaattcattttgtatatagtacatgttagtattttttatagtaacaacaatataaaaagaaaaagataaacaaactattatgatgtgttattttgtcgtatatagtcacgtgttgcatgattagcccgcaaaatttgttttgtataattaaactaaaatcttataagaaaaatattaaagaaaactatgtataatataattataaaattcaaatatttataataaaaaatacataaaaaacaaactattatgtgcgttattttgtcgttaatagtaaaaatttatattcgtgtcgtatgatttatggtcggtcgcatattcatcgtaaagaataagaagcgttataaaataaagtattaaaatattaaagatacttttttttgttgatacattacaatgaaagaatcaaaactaatttttgctttatgttaaaaaaaatgtttaaaacaacagaagaacatgttaagttgcagtcacacctctttttaagcaatttatccggaaaaaaactttaaaattgtcatcgcttcgtctaatttctttagcttcaatgatttgattgaatagatagaccaaaaattatacactacaatgtatcttttatatttgtaacattcatttatcatagaaccatttgtataggttttaaatttaacactgtaaacatgaaatatttatcttcttagaagaagaaaaaagatgccttaagtattatacccatttatagaaaaattaatgttttcggggccatttacaatatagttttggcttggttgtaatgagcgagaggaagaagaaacaaaaggaaaaggttaaaagaaactttggtcggattagtgtaacctataggccatgcataggccatttgaaactcctttgcattcacaattatgatacgtgtcgtgtcttcgtctcagctgttacccacgatcccttttgttcctcgtgccacgtgacatcatttctgccgtcggttaggaggatcatcccttccacgtggactatccttgtggtactcgatcgattggtaaactaattcttactggtggtaactcttgtaaacttttataagttttttttttggaactcatgtacacgtcacatgtgagtataaactttattattatttgcataaaactcaaaaggaaaccgtgaatttcatgccaatttggtttgtttaggttcggatctcaaacaaagtaaataatttgcaacgtccaatcgcgtagaataatcaggaggaacaaaacacgagacgtgagtttccttattaaaagcctaatcaaaggcgtcgaatattttcatctcttcaacaacaatgtatagagtatataagaacaacaagttcattctcatctccatccctcgcataactaataagctatggcaaaaaaactgtaatttggtcattcttctaggggtattattggtattaaccctcttccatgatccgatcattgtcgctgccctcggcggtgagagtaatccggcggtaggactgttcacttttggagactcttactttgacggtggaaacaaaatgtttaatttgtaagcaaatttcaacatcctccccaaagcttttggccgtacgggaaatcccgcgatgaccccaacggcaagttttctgacggccgcatagtccctgactttatcggtacgttacagttacatatttgtacattcctacgtacttatacttttttccaacttattatgcgttctcttctaaaatctactatgcatatcgaccgatccacgatataaaattcaaattggaaacggtagtttatgattgattactaacaatcgttttattgcaaatttattattttgtgatccatgataaagctgaattcatgggcattccggaagagatcccaccagtatttaaaacagccgttgatgttttacgtggagccagttttggcgtcgccgatgcttctattcttggctatccggcaacatccgtacgtaagccagccatcgtccaatttatttcctgtcgattttttgtattagtattttaatcacaaatcgtatatgtatgtagatgacactaaatcagcaagtcgataattttagaagtatgaaatcaaattggatcgacgatttcattggaaggtcactgtttatgatttacattggtaccgaagataaattaaactttaccaagaacaaaccaaatgcagcaagcatttgtcatttccgctattaatcaattgaagtccgacatcaacgtacgttgctgataaatatatatatatatatatatacgataacattagttacataacacgttaattaacaaaacaataccgaaaatttgcttatttttttggacgaaaatttgtttaaaatatttaagctaaaaattaaatttgaattcataattttttttccaactaattctgagataaaaaaaaaattatttaatctatatattaaaatttaatgaaataatatttctaaatatttctaaaaaaatctatcacttaataaagtttaatttttactttttggacaacattttgtttaaaaatatttaagataataattatctttaaaattattagttacatcaaattttaatttatgactttttttgttttaagtttaattttgtttttagttattcttaaattttaatgaggctattttaatacttttatatattaaaattaattgtttaaaaaaagaaaaaaggatagagtatttttcaaatgaaaacccaaaaagaaggaatttttcaaaatttactcttatataattcactatacatatacatactaacatttttaaatttgcagttgttacactctttaaaagcgagtaaattcgcgattcaattgctagctcgttgggttgcttaccaatatcgagacaagaatacaagacagggcaacgagtgttacgagccactcaacgatttagtcaaacaacacaacgagaagattggtccaatgttgaacgaccttgctaaaacaaatcccggacggacgtcacaacactgagaaggcacaatgctcatcttttctttggagctgacgctaacgtcgttcagccaatgacccttcgtgagcttattgtctatcctattaatgagcctatgcgtgagtattggcaaccaatcggctccaccatcacaactgatgggtaaagacgtacgactatactaattataatgttttctcttcttgttctcttgtcttttatttataaataactagataagacccgcctaaataggcgggtgtaagatgtaaatgtaatttttatcgataatatttaaattttgaatagtaaaataatagtcgatacattgttcttataattttgaatagtaaaatagtagtcttatgcattttattttgttatacccattcagtcttattgatgatatttgaagtctaaatagtaacctacacacttttttatattataatttagtatttagaagaaaaaataaatttttatcttatacattcaattttgtaatacaatttaactatctatttcataaaaaactcgattttaattctacacacttcatcttacttgataatgatttcatgtcaaaataatatatatatatatatatatatgagatcaaatctatatcttagttaatattaaaattattaacaattaacaaaacataattcataataataaaacatttgctaataccatatatattaaaaatttgaccaataacatatataattttttttttttgttaattttccttttggttaagaaaaataaaatgtaatattttttagatatagacatatgaattagtatatgttaataatgatttattttttagttttctatttctttaagaagaaaaaagttaattgatttctttttaagtatttctatttctttaagaagaaaaaagttaattattttcttacacatgtcaacatctgattgatagatttgacacgtggcaaaatcgtatgagttagtaactttgaaaaccatactttatataataagatattaaaaattattaacaattaacaaaacataattcataataataaaacatttgttaataccatatatattaaaaatttgaccaataacatatataatttttttttttgttaattttccttttggttaagaaaaataaaatgtaagattttttagatatagaaatatgaattagtatatgttaataatgatttattttttagttttctatttctttaagaagaaaaaagttaattgatttcttttttagtatttctatttctttaagaagaaaaaagttaattattttcttacacatgtcaacatctgatcgatagacttgacatgtggcataatcttatgagttagtaactttgaaaaccatacttcatataataagatttgtcgtttacaataatataagatgcatgcttgttgacaaaagaaagcaagttcgaaatatgttagaatagagctattttaaaggtttcttctggatcgtttgaaatatacaagatcgttcgaaggcacaatgctcatcttttctgtagagatatatcgtttgcaatatacaagattgttaacctaattaagctcatatttgataagttgaagtgttcgacaatcttctttattgtttccattcttgtcttttcttcctttattttattattattttttctatagtgtctaatcttttttctttctttacaacaattctgttccattttattttaggggtttaattagaaaatttggtattttaataattattttttagttgaaatattttaataatgaattaaatgagtactattttataaaatgttgaaaaaataccttagatatatttcccaatatgtatagatataattatatctttatgttctttttggggcaaaaaatctacattttctatactaatcgtttattgctttaattataataaactataaatggttgttatgaaatagtaataacttgttagtttcataataatttaaagttaatatattaaaatatcaaaaattcctatttgttgggaaaaaagacacccccatggcccatagtacgcttcaaaattaaaaacaaggtctccctccctgaaactccaaagtccgaaactaaaacctatcgacgtccgtctcacaactttttacaaatttctcatcgtcttcgttctctgctgctccaccaatgtcgaagaatcatcccgatgaggatgaaacaaacctatcctctgccgtgaacctcaatttataggatgtatctttgaaaaaacattcagaattttttgggcccttttcaatagcattttttttgacaaagcgcaatgttaaatacgaggattggggctaaccttcaccagtttgacgagcttgtgtggattacgtaagcgtacctcgcggtttatgtcgaagaatagttccttagtcacatacatcccttatttggcgtttgcgagtttcttgcaatagtaaattaccgtctcaacggcagagccggtctgtcatgcaaaaatgccttatgaaaataaacaaattgtgtcttttatttgtttgcataatcacaaataataataatatataaaagttatactaaaactttatagaacattttttataacattttataagcgttttgtaagtaaaaaagagggaaaaaaacaaaattatatttttaaatatagctctatttagatttttgcctacaaaactattcatcaaattcacgtaatcgagtttttcaaacattgttgtcttaatggataataaagtcaattcatttctttgattaatcaaaacaattttttttgttatgtaaacaaagttcaaccactttacattagaaagttgaaaaattctttctaatgcccttttcataatgccccttttcaactctacccttttgttttatccattttcatttataccctctttaaatttttaatgaccattttacccctatttaaaaattattttaggttaacaaaataaaatattaatattttttcgtctaaaatattctaaaataaatttcccgccaaaattttcccgcaaaactttttcgaaaaaaaaattcccgccaaatttttttttcaaaaatttctttcccgcatttttttttttggcgggaaatagatttacaagggattttaaaagggttttaaaagatttacaagggattttaaaaggagttttaaaagatttacaagagattttaaaagatttacaagggattttaaaaggtttttaacagatttacaagggattttaaaaggtttttaacagatttacaagggattttaaaagggttttaaaatatttaaaaggaattttaaagggctttaaaagattaacaaaggtttttttaaaatttttaaagggtttaaagtgttttaaaagatttataagggattttaaaaaatttacaaaggttttttaaagggtttaaaagtgttttaaaagatttataaggaattttaaaagatttacaagatatttttaaagggtttaaatgagttttaaaagatgtacaagggtttttaaaagattttcaaagaatttacaagaagatcctttaaaatccattgtaaatcttttaaaaccttttttaaatcccttgtaaatcttttaaaacccttttaaaatatcttgtaaatcttttaaaacccttttaaaatcccttgtaaatttatttctagccaaaaaaaatttacaaggatttttaaaagcattttttcggctgagaaaatatttgttacgaaaaaaaatttggtgggaattttttttttagcgggaaaaaagtttggcggaaatatttttttggcggaaaaaaaaatttttggcgccaaaaaatcggcgggaaaaataattttggcgccaaaaatcggcgggaaaaataaattttggcgccaaaaaattggcggaaaaaattcagtttccaattacatgttcctattagatgagggtaatataatcattttgttcaagggaagggatatttttaaaaatgaacaacataatagggtattgttacaaaatggtagtaaataaatggtagttttacaaatctcccaattttttatttttaatcaaagttttagaatttaacgttttatttttcttaaataaactaaactaaattcattaagaaaacattttattaatttaaagatgttaaagaaagatagtgaatgaaaagcttaacaaaagtaaatatatagaaaatgcctatatttgtttttatttaaaacataaaagaaagtgcctatattccagtgtgctactatacaggtttggctcccaaactcttttttttttttttttttctattccctgcatttctcttggcagtttatttagtgtgtcgtttctgctgttgcctaatatcaggttgattttcaccttcgtgatcgcttcaaactagaatattcagctgagaatgaaactatgatagagagatctgtgctgatacatagagcggtgttgagctctgttgagcgtctttttgccatattgttggaacagtacaaaggaaaattccccttctggcttagtccccgccaggccatagtttgctctgtttcagaggattatcgttcctacgcagacaaggttatacattcatgactgtactcttaacgagtttacttgcagagtcttattatatctctcttcctaatttcctttgtttgcgtatattcaaacaggtgagagatcaaattcacgaagctggctactatgttgatgttgacacaacggatagaaacgtcagtgacaaggtaactgttacaaggtccctgagcacaaaccattgaggtttatgttcccgtatacattttgaatgatgattgtggttgtgagtaggtgcaagaagctcaggttgcacactacaactacatactagtcgtgggtgatgaagaggctagaacgggacaggttagaatccagttttgctcattccattaaatgtctgtgcatcaagcctctctcacaaacatggtttttgttgtcaggtgactgtttggcttagagacgaaatgatgagcatcgagactctgtcggatgaattcaaattgaagacggccaactttctttgagacccttttatttgtgtctagtgatcataagaacgtggatatttggaaaatatgtttctattaagaattcacaaaccattttgacaattaaaaccaaaaaagacaatctatatttatatttaaacactcttaattagcgaaaccaaaaccctaacaaaaccaggtaataataatagaagacattttttaacactgaggaagatcatgaggaggaggaagcagagtttgtgaaggaagaggtccatctttgacgataaaccccattgctaaaccccacgaagtatgttgttctagatgacagtgaataaaccaaactcctggattatccgcatttatcctaatcgccgcccatcctcccgtcggcactgcaaaagtattcctctccggcggatccaccaagttgtaccttttcggatccttctccgggtcaaaattcccaaatcctcttcccactacgaagaaattgtgtccgtgtacatgtaaaggatgattctcgatgtttaagaaactcgttccctgaaacacgatctctaatctcgatccgaattcgacttcgaaaagcttcgtaccgaattctgtgttcatgttttccgataccggatctactcccgtgaaatcgaatctgttcggtggtttctctgggaaatcgagtgagaaaactcctttgctctgtttcttatagtagctttcgaggatcgatatcggaggtctgacaaatgagatgttgttcattgatgcgaagaatctcttccctgcgtaaccgtcgcaggtctgatttaacggacaatcctggagattgagacttatcgtggtgatcactcgcttgtctatcttcgtcgggactttacatggatacttcgctgatcccagacttttgatgctatcggagaatttcgtcgcgaatttcgtatccagcatattcgggagagctacgactgtcgacattgccgttaatcgccgtctccgccgtgtgtttacggaattttccggtttggttttaccggtgtaacggatgaatcctacggtggttgagttgttgaaaggaaagacggaagtgacgtaaggagttgcggcgatgagaaattcaccgccggagagttggtcggcgcggagaagaagggtggtggtttgaccgggagcgatcatgattgctttggtatgaaccggtttggtgtaaaccgcgtcgacttcgactacagttagcgtgtgattcgctacagcgacgaagagctcgttgtttagagctgcattgattatgcggaggatgtaggtttttccggcgtctacggtcgccgtgaaagtatctgcagacgatcataatcagtgagaaacgaaccaaattgggccggaattgaatcgatccggtttggaacttaaatcatcggttaagcgaaataaactggacctttggtagaacatggataaagtgggccgggaagcccgttaagggtgtaagcgtcggaaactttagccccagctccggtcttcatcatcgctttctcaacattgtccacgtcatcattccaccattcacctacataatccaatttcacatattctattcaatctacatcgtgcaattaaaactagttaaaaatgatataagcactttttgtcactggcttggtgtttttttacatatggaggagttgaaccagcttagttttaagatcgcataatcgtgattctaaatttcgtatacatatatgtttgaagggaaatgaaaaaaaaaagaaaagaaagaaaagaagttatattttttaccaagtataatgggaatttcggattggatatggctgccggaaaagggataaggctgccgcggatagatgatgaaagcgccgtagacggaggctcgttgccatgagtgatgagcatgccaaaggagtgtgcctctttgatcctccactttgaatctatatgtatatgattgtttcgatcttatcggacattgcgttatgtaagccggtccatcagcccaaccggtccggtattgccttaacccatgcctgctcacaaacccccaaaaatataaaaacgataaataaactcacagaaagaactaaaacaagatgttaaaagtggttgaattatgcatgcacgagtgttaccaatgaatagttgtattgtgagcaatccggttagtcactttgatttctacgatgtcaccttcgtgtactgccacggtcggtcctggatattgtccgttcaccgttagaagttgtttggtgtggcacaatcgagttaccttcttccattcgacctaaaaccccaagaaacaaaaaaacgtttactatatatcacattgatgaaaatgttactattacatgagcgtaatataactaccacgttaagaaactgtatgtactataattgataaagatgttcttttataagcgatacaaatcttgaataaatgctgtatgagttttccaaatctttagtataatcatatcagtaacatgaaattgaatctgcctaaatttgcttacattaaagtgaaatcgacgagtggttgaagccgaagaataagggagaagagttgtaaatagaagcaaaaaggtcgaaattattagaaaccctaaattttccatttctttatagaagactgatatcttctttcttttacttagctatgattattgatcaagtttgatattgtgaaggctcctttatatagcatcatcatgggtttcatttctagtttaaactttattattatacataattctgttaaagtacctatattatttaaagttttaagaaaccccattgagatgatcccaaaaaaatgtcctgcaagaaaagaaaaaaaaggagacaaattattactggtgagttttcttacataattggattggtaggtgagtgtaccacgtacgaaaaagtgagttattttgaagatttcaaatctctcatatatatatatactcatgatctcaaatggatacaatcagcatgcttctaaattatatagcatcactaaaatggttacctgctagtatatgtcattgagtactcataactcattaactaagtactcaattttatttaactaagtaactcgtaactcataactttaaataataataataaattactcgattttttgtatttattaaatttgaacatctgtagtttttttttcgtttcgtctatatcaacatctttcgttttatatgaatctatatatctgctacggcctacgatttagttatttcccccatgatccctagctaaaaccacgtgacttcctgaaacatcaccaattgctcatacagtatgagtcatactcatcatatatacaaaagctaaatcccctcttgttttttttttatatatgtatactttctttctataattctatcttccagttctcttctctacctatctcatatctcatctacttcagcttttcatccagtcaatatctcttttcaccaaacttcccccgatttaaatgtatccctctcgtatcaaacaacttgctcatttatatatatatatatatatataaacacctcaattcctccttttgttatttgagtctgtttgatagttgattaagatgactttatataaggtttgatatcttagttatggtcttcgacgaaatatgtatttgttctaatgaaaatgtatagcactaacaaatcaaatacaaaatgtatatatattcaatcaccaactatataattcgatatttctcggttaattaagaaaatttgaatagaattaaaattaaattaaaaatgaattgaatagaactgaggataatttagttcatgttccaacattgtaattctcaactatgaactcttgaatggttaaaaagtaatatcatttttcgatatatgtatttgtttaacaataagtggaacatgatctaattattcacggttgataatccttctgaaaaagaaacacatgcatgtaaaattggttacgtaaaaagttatgtgtactttagtagatatttattcaggatttgtggggtaaatttaactttcacatgaaaaacgtgtatgatatatatgtccaaattaatgtccttttcttttttaacgttttctgttgtgattaagaagtgtttacaaagtcggaaaataaacccaaaattcccttatattataattgggttcaagcgtcatctgcaaacaattttttattaaaagaatttgttagagtttccgtttggtgcattatggttaccatatatataaaaaattcacattatctgtttctgtaacaataaagtatgggacgaaagtatataatctcttcttaaaccagagatcaaaacatgttgtttatataaatggaattataggctttgtagttaattccgcttattaaatcttcgtactgataatatggaaatttgaagtccacattagtgatatatagatgtatgatggaatacttttaaaaagtcttatattaggaaaatcattgaaactttatggtcgataaagtgatgtgatctgtgcatgggttggtgcgagccatcgaagagaacaaataataggacgaaattgcaaactgttttaaacctgataaaaaatatatgaattacatactacaaatgcaagtctcctttttcattcgtaaatagaacacaactcataaactgatgctttgcaaaaatttaacatggatttaaaatgcaaaatgattcctatgaaaacaaaaagaaaatgtgtgagctccaatgatatagaggagtcgaaaataaaactataaatggatgtgaatcttcagcatgtttaagaccacaaaccgttttatgagaacaaaaaatatgtagtttgaaccgattttcttttcactggcgattagaaaagacttgtaatataacttttcttcggacattttaacttccaattttattagtcaagagttttgtgacaatcttcctttacgatcctatagtttacatgaaaccaactttttctttaatttatatttgtagtggtcataatttgaagtcaaattccaaagtttggcggcatgatccattagtataatgttagttttttttcacttttaaacatgcacaaattcaattagtatttctactaaataatgtaaaaacagtgtagcctaattgctttaaccaatctggcgtctgtggactttgttcgccatatatacatcaactttttgcagtttctttttcttatcgagactgtagtttggagttggtgagtaagctccctggagctcactttactcgaccataccattatttctgacctctttttcaaaaacccgattttgttcattttttttcttcttctttttgtcgttttatttattttattttgtcgttatgagattagtccaagaatggtatcaattcagatggaccatggaatataaataatagatattaggttagtcttcgtcattaaaaagccaactaacacagcattattattatgtgtgctaattttttagtcttatcttttttacttttaagaagtcgagtatgttcttcaggttaatataatttattatataagacccaatatcccggtttgacctggaccggatcataccaatcacacaaactctcccaaagtactgaagcaaagtgaatactgaatagtatataaataatttcaaaatatgagtgtttaaagaaaagagagaaacaaaaaaattacatggagatcgatgtttttatttaaagtttcatcaaacccccaaaactattaaatacaacaaatcaaacccaaccacgaagatagatgtggatgaatggagaaaccaatttcttttcaccagaaaactttcgtgaaaaaagaaaagaaaagaaaaaaaataactaaatcatttttaagaattgtgaagagaagcaactttatcagtaagctctgcaactgtttcattatcttcttcctcagctatggtatcctgcaaacaaagagaaaagaacaacagtaagcaaacttcatcgtcatgttccttttcaagatcttctgtttttctttctttctttctttactaactaacctctttgtcagttttagattggacaccaatgcatttagaaccgctgatgcttgcactcttcatgaggttacgagcactgtaacctcctccattgtctgcttcctcggattccaaggttgaagccacagcagctgctgctcttctctcaacatcactgctttcttctgcagtttcaccatttggagcaggaactctctctctgcaacatcatcatagagaagcacaatgctctcagagggagattgagaagagaagagaagagatagagagattctgtgaaagacattaccttggcaaggaagcatgatgtctgtgaagtgcagtacttcttcctcctcctgctgctcctggtttaccttgattttcttcaagatgagcaaattgccttttaaatcggtctaccccactgcgcgtaaacaacaaaaagatttatcgagttcataactttctgttttcaagacttatagtttctgttaactgttaattagctaaccttgggtacataaagctaagctgatcaccaccacgaaggtattcctccaacatctgaggatgatattccaatatctgatatttacaaaatccaaagaaaagtgattgttaggatcaatgaataacattgaaacaaattcagattaaagaaaaggatatatgtagaaggcttttgtgtttgtttgttacctctcggtaaattaattctctgacatcatctttaactaacttctttctctcaaagtcaaattcaagctttgaaattggctgtgttgttggttcacgctctgaatttgacaaaccactgaaatatggatcagctagtgcctgtaatatgaaaatcaaaaacgacgaatataagagtttcgttctgtataaaacaaaagggaaaagtaaagcaaatttacttctcacttacatcttcagctgatgcacgatctttcggatcaaaggcaagcaggcgttccagaaggcggagagccaaaggatcagctttagggaatttatgagagaaagggactggttgttttttcctcatgctgctaagatatctcctcgccttttcatttctaatctgtagaagtccaagattgcaaagctcattacaaggattaaattactctcaatgatgtatggaacattaaatttgctacagaaaatatgaacaagtgttttgagtgactaacccttgatattgactcaggaggtggagtaccaagaaagtcagtcattagatccaattggtgcacaacgtttttcccgggaaacaaaggcttacccaaaagcatttccgcaaaaatgcaaccgacactccagatatcaatcgcaggggtatactgaaatataacaagagtagacttagcttgagatggctggtcttctcaacaacactatagaaccacacaacaatattctacaaaatagaaaactagaagcattttcctggtagggagaaatagcaagagtagttgggtttggtgaaaaagaatcttactttggagaaaaacgatccacagagttcaggggcacgataccaccgagtagctacataatcctacaaaatccatataaacgaaatgagctcacaagcatttgaaaatagttaagaggaagcctaatgaacagttttgctttcacattgagttagatgactcacagtccaaaatatagcggttggggcatcgttaaaagaaacgcgagccagcccaaaatcacagatcttcaatttgcaatcagcattagctagaatgttcttcggtttcaaatcccgatgaaacacattagctgaaaacagagaacccttaagtgtttcaatattatctataacaaaaatcatgaggatcgaaagagaccaatgtgtaaaaccagaaactaacctgcgtgaacatatttcagaccacgaagaagctggtacaagaaaaactgataatgctcaggagtcaaatcatcattcgccttgatcacttgatgaagatcagattccatcaactcaaagacaacataaatatcgcggaattctctgcgagaaggaggtaacatgatgtgtttaatctccacaacatcaggatgacgaagcaaccgaagcaatttgatctctctgagaatcctagtagcatcggagacatgctcaaacacatcgttgatcttcttgatcgcaactctctctccagtgtgtgagtcaacagcagaagccacaacaccataacttcctttgccaacaacctcttgaatctgatacctgttagcttctccatactccgtgaagaattcagtttcaccctgaagaattttattcatgattcatacttaaaattgaccaaaatgatggatcaagacaataagatcaatcaaacgaaacacaaaactgaaactttatccttttgtggaagcaaatgcaataacacagaacattaagagaacaaaacaagtctcttcaatctcaatcaaaagacaacatctaagagcaaatagcataaaagggtagagaaggagaagaagaaaggtaccttcttgtgaggatccataggtaaatgattacgtttaggaacgttaataagcgttagaccagagaaatcgagatcttcttcaataataagctctccagagttagcggaatgattggggttagaggaagaagagaaagaagaagaattgaaaatgggttgttcgtgattattattattattgttggaagaagaagaagaagaagaagaagaaggtcgctgaaaaagccatcgacgaacaccgtcgacgagattcccaccaccacccatagaccactactagattagaaaagaaaaagattagtaatttacaaaattgggtatccgaaattccttgagagccaaacaattaccgtcaagtcaccgtctttctcgccgcgtctctcggttttgtccttcggagttggagaccatgttcttctcctattttttcattttttttttaattttctttttatgtttttttcattatttatgctcagatatttatttttttcccctgcttgattattagagagagtgagtggagggagaagaacaaaatatttaaacctttggaatatttcgacgacccggtttgtctataccggttaatgataacctgattcgggcatatgcatttattgagtatatgggcctacaaagcggcccatacaataaatgtattttcgttcaatcactaaacggattaaactcaaccggacaaggttcgaaattaagaagatgttagatgttacattacaaaccggaattaaaagtctaattatgaatctgagacacaaaaaaagagagagtaaaaacgccttgctcgttcggtcgcgttgatgatatgaacatatatttcatcatgagctgagcaggtccaggagtctgttgcggttcgagcacatcatagttattgggtcataaatgaatccgacagtagcgtaatctaagcattttttagtgaataatacgcttgatgatatatgtgatatgtcatgggaggataatgcataaggtggtgagcgaagcattttttcagccaaaaagacaaaattttatttgaataaatgatatcaaacaaatccagatacgcgaaggaatattgaatatggaaagcacgatcgtaaacaattctgcgatttatcatttcttattttttttaacaaaatgtacggttttgcatgatatatttgcattaaaaatgaattggtaagtttttaaatagctctatatttgcattaagctttgactgattgtacaaaaaatagagtaattttttaattacagtagcaaaaaaaagcaaaacaaaattcaattctctccagctcaaaaatccactcttcatcctctactatactcgtatctatctatctactctactctgttttacgtaagttttttttagttgattttcttttgtcggactttaagagagagaaagtggcgtctttgtggactttctcaattcaggagagagtcaaagagaaggaagaggcttcgcttacttgctgagaaaaaagctccaaactttctcttattgggtttttgatcagctccggagataaaaaaaaaaagtattttcttgaaatcgaaatctgatctccattgagagtcttgctacttgatttggattccgatttaaggttttctcgagaattcttttgctgcagttattagattttgacgagccgttgatctggacggagttccagatctccgggtcgtggtaccaaggaattagggttttagcacaaagttctcgtttttctgtgtattcgagggatgaaggagttttcgggtcgatgttcgctgctctaacatttggagtatgaagatgaacatgaagaaatttctcaaaaagcttcgtatcacgcccaatcaacgagacgatggtgaaggttcagtctctaacagaagcaataagtctagtgatgcagaaccatctccttctgattcattgaggtctcaagataactctgaattcaaaccctttttgggtttatcaaattggttaagctctgttactcacaggaaaagcccttcttcttccaatgccaccaatagcaaagaggatgacactaccatggaacatggtggtcccgttgggtcggaatctgggatgcagggtttgggttctagtagtaattccaaggatccagaagttgaagaagaatatcagatacagttggctctagagttaagtgctagggaggatcctgaagctgctcagattgaggctatgaagcagttcagcttaggttctcgtccttctgctcccgagaatactccagctgaactcatggcatatagatattgggtgagtttttaactcattgctagacatagaaacaaatttccaattcacttaagcgacaatagactatgcttgaaacaaaatgtgttaagttgattataagtttataactcttttctgtctcttctaaccaattttacatcatctggaattttgcagaattataactgtcttggctatgatgacaagattgtggatggtttctatgacctgtgtggagtaatgaatgaatcttccttaaaaagaatacctcccttagttgatcttcaggggacacttgtgtcagatggtgtaacttgggatgctgttctagtgaacagcagcaaagattctaatctgttgagacttgaacaaatggctcttgatattgcagcaaaatcaaagtcagcgtcttcttcagggtttgtgaacagtgaattggtaaggcaactggcagttttagttgctgattacatgggtggaccagttttggatccagatagcacgttaagagcttggtggagtctgagctacagcttgaaagcaaccctccgtagcatggttctgcccctgggttctctaactattggattggctcgtcatcgtgccttgttattcaaagtatgtaccatgccctcattcacttttgctttctgtgaaaattagcataagaggggtattttttgtgatcgcatgactgttaaagcttcttgcagtttggtgaatgtttgaaattgtgttcaaaattgcccctgtttctctgactatatttattacatacaaagcgtatggcacctctaaacgctttgtggtgttttgtttcttctttcttatgagactttgtaggttttgtgtgatagtgtcggcgttccttgtcgaatagtcaaaggacagcaatataccggttcagatgatgtggcaatgaactccattaagactgatgatggcaggtgactttcaaattaaattcaatcgctgtgtaattttaacaatttctctatcatttggagagaaaatatatatatatattgtcaccaaatgtgtgcgtgtaaaaaatgaaactatgtgcatatggacttggggtgtgtgtgctatttatagctaactcacatctctgaaaaggttagagcaaatactgaggcttgataaaagtgtaactttctttggtctaagcaacaatactctttagaaatgaaagtacgattaagcatgtttcatgctttgtacagtggttctttctattgttattgcagtctgcagttgcaaattattttccttaacgaatccaaatgtgaatttcagggagtacattgttgatctcatgggagatccaggcacgcttatccccgctgatgcagctggactacaaatggactttgatgattctgtctactctgccagtcccagagatgttgattcatctcatgtagcttcttccagcagtggggtcgagagctcaattgaagaacacacagaatcttggtcagcggaacatcgttctaggaccaagggttcccgggaggaaaaccaatctgcaggtggaggggatctcatgattccaaatattagggaagctgtgggaagtcaaaaggctcctgttcaacatctttccagcaagcctactcattctttcactcatgccagatcaccttcgtggactgaaggtgttagctctccagctggacgcaggatgaaagtcaaagatgtttcacaatatatgattgatgctgccaaagagaatccacaactagctcagaagcttcatgatgtgttacttgaaagtggagttgtagctcctcgaaatttattttcggaagtctattcagagtcaatggaggcaacaggtgaaatcaaatctgtggctgaatccaatgatgagaaagggaaagattttggaacaatccagcaaggaagaaaccagagcaaccttggccctgtgaggtttttgcctcctcttccaagaccgcaatctaaagcaattacccatgacctacgtgaacattcaggatctggactcggtcatttgtctgaacattgcaatattgatggtcactctgattcctcacattctgaaacatctactgactatcccagaaatgttcctgttgccgtagctgcagcggctgttgttgcgtcttccatggttgttgctgccgccaagtcagcaaactcggattcctccactttagaactttctgctgcagctgctgctgcagttatggcgacagctgcagcagtgagcaggcagtttgaactagattcacttagcaacggggatgctggttctggtgggcttcatggggtagattcaggaggagaacgaatatccgacagatctattggcaatgaaagttcaaaatctgatgctgcaattgatgatgtagctgaatgcgagattttgtgggaggaaattactgtggctgagcgtatcggactgggtatatgctctactatatgctttagtgtaactagtgccacaacagtaagtactttatatttatgtcttttgatgcaggatcatacggagaggtatataggggagattggcatggaactgtgagtatctcatatttctttagcttttactaattagctgacgacaagagaaacaatgtaaatttggttattattttcaatatcaatgaaactcttgatttggtaggcagtggctgtcaagaagttcattgaccaagatattactggagaggcactggaggaattcagaagtgaggtataagcctttcattctctggaaattcttgtaccctttcaagtttcacaattcgtaacatctcatttcaatttgatgcaaggtccggatgatgagaaggctcagacaccctaatattgttctcttcatgggagctgtaacccgcccaccaaatctctcaattgttacagaatttcttcctcggtatgctatgatccttttcatgatttaattgttttgacgctctatatgatttgcatatctttgatgataactaccatccattatatgattttcacgctaaacgctttatgttccatccattagtgagcagagctcagactcgtcagtctcatttctgtgtttattaacctttttttttttgcttgcgcagaggtagcttgtataggttaattcacaggcctaataaccaattagatgagcgaaagcgtctgaggatggctcttgatgctgtactattactcttttctctttcgctccttctttacctctactacgtatttgtatcttctagattgtttcttacaaaaaaaaattcaaccgttgtaggctcgtggaatgaattatttacacagctgtaatccggtaattgtccatcgtgatcttaaatctccaaaccttctagttgacaaaaattgggttgtcaaggtcagtaattcttccactcggatttcattttctctcctatgatatctctaatggcttacatatttctcaggtgtgcgattttgggttgtctagaatgaaagtaagcacatacctctcttcaaagtcaacagcaggcacggtaagctactagaagaaattcactgttctccactaggacagttaatgtcaactaaaacaatcctgtagattccagatttactttcctctcgtaatttcatcataattacaccgtcaattatcatcagaaactacctcatatcttactttccagttgattgatctaagcatgagacttgattttgtgtttgctcatttcaggctgaatggatggctccagaagtgcttagaaacgaacccgcagatgagaagtatggtttttctaaagaaaaatagttttatcgtattatattttcccatgtaacgttcccttttaagaacgaggtacataatgtgaaaacaggtgtgatgtgtacagctacggggtcattctctgggaactctttacgttacagcaaccatggggaaaaatgaacccaatgcaagtggttggcgcggttggttttcaacatcgacgacttgatatccctgaatttgtggatcctggaattgcagatatcatcaggaaatgttggcagacgtaagtttgaaaagtcacttaattgttgtatgatgaatctagctctattgttttgttcatgaattaggtgcggttatttggtagggatccaaggttaagaccaagttttggagagatcatggattctttaaagcagctacagaaacctatccagagagcagcagttcccagttcttctgcattgaccactgatgagcaggaacaataacatcatgcttgatgaagaagatgactaaatgatgatgaaggtggggatcattctttacatattaatgttctgtggtgtgctgtccatgtgtattcaccatgttttgtttacaaattgtaaaaaaagatgaatgcaaaacaaaacaaacaaagaaaaaaagaaaaaagaagttattttgtcaatggtaaaaaaatcattgagaattgaaatttcatatctcttatatacgaaattcaaagtaaattgttcatataccctcaataactaattcactgtttatctattttatcttggcgcgagtttatcatttctgttaattatgattatttcgttactaacaataaccaaatactgtaaatcgaataaattcgttcgccttctttcttgaaacatgatcatcactcgatcaggatagcgtttaaaaaggaaccaaaaataataattagagcctgaaaatggcgaatctgttcactgctacggctcctttcctctcactctcgaagccattcaccaaaacggcatcgtaccaccagtgttacgcctcttcttccaatccgccggagcctgagtcttcttctcctcctcctcctccgcctccgcctcaaccgctggcatcgcaacagaagaggaagaagaacgttgagacgacggattgggtcgcttcttccttgacccggcggtttggaatcggcgcgggtcttgcctgggcgggctttctggctttcggtgtaatctccgagcagatcaagactcggattgaggtttctcaggaagtagctaacaccaggttttaatatttcacatgtcgttacaaaatttcgcatttttgaagaactttcaataccgaataggcgattacaaagaaatagtttttggatttcataatcataagttatctgaagactagagttgattattttgttgggtttgcagagatgtagaagaagagaaagagattgtgttgcccaacggcataaggtacaatttccccattaacactagagcacaaatgttgaatgatttcatccgtggataaagtttaattacctgcttactagttctttaaacaaagctctgttactgaaaaatgagatatgagcctgcttcatccataataattagttaattaccacgtatgttttctctgtggccatttttagtatatgagcttattaagccattgaaactattgatgtagcaatgtgtctcctttcctatgatgtactgaagaaagaatatccgacattgataacaaaacagacagctcttgcatcagtaactgatgcatggaatcggaccgtgcaggtactatgatcaacgggttggaggaggagcaacaccaagagcaggagacttggtagtgattgatctaaaggggcaagtgcaaggaaccggacaagtattcgtggatacatttggaaccaaagacaagaagaagatgaagccattggcacttgtggtgggttcaaaaccatatagcaaaggattatgtgaaggcatagattatgtactaaggtccatgaaggctggaggtaaacgcagagtgattgttccaccatcgttaggatttggtgtagacggtgctgaattggaatcgggtttgcagattcctcctaatgcttcgttggaatatatagttgagattgatagagtctcaattgcaccagcttgagttgttgtacgtacagctttggtttcattcccaaatccttcaaatatttggttgtataagtatgagtggaaaacaaagtgtaaatttttgtttcttttggggtcgatgtgattgaaccgagataaaccggatcaaaatcttcggtttgatttatttatttatttaaatagatataaaattacgtaaatgtatttctgtggttatacgtactgtatttactatttacgactttgatgaagtcttagccaaaattgcgaagataattattttattcgctggatctctctgtgaacgaggaaaggatcacgacacttgtcaattaacattgtttattctttttttccggcggaagcgaattgttggttgctgtagagagaattgattggccggagagaatggtgaaagtaatcgattcccattacctagccatcaccgccattgtcaccgtaagtctgtcttttctggtgcaatcgtttcgttttgtgtttctcgaaaaatcacgagttgggtcttttctgatttagcgtttttttttgtgtgtgtaggtgggttatcaattcatattcttcgtaatcacagctcttttcaaatttgatcaagttactgactttgccggtacgttgatctatctaatttggaaatgctaatgttaatccttttgagtgattcgttattcttctttcgattgcgatcacaaatgttatagacttttcatttctgctaacatgcatgtgactaaaaatgttggcaggaagtacaaatttcgtgatacttgctgtattgactctgcttctcaaagggacatggcattatcgtcaggtaataagatctctctctctcaatgagtttctctgtgtgattctgtataattgactcagctctttaacctcccagatagtcttgactgtgctagtagtcgtatggggacttcgtctgggactgttcctccttatgaggtttgcaccatgacaccgcttcaaatcgatatgcatttgcaaaagttaatgattttctggtcatgtctgatgtattttttgcatcctaactttgagtaggatcttgcaatggggtgaagatcgacgctttgatgacatgcgtgaaaatattgggaaactagtagtcttttggatttttcaggttagctacaaactttatattttcatctttagaagagagagaaggaagtagctcagctaagttggattcttgtgatctaacaccatgtgggttcttgttctttttttccctatcaggccgtgtgggtttggactgttagtttacctgttacctttgttaatgcaagcaacggtggaagattgtttcagcccgcagatgttatcggttggacaatgtgggttgcagggttcttgattgaagctacagctgatcaacaaaagctttcgttcaagaagtgtccagaaaacaaaggaaaatggtgtgatgttggtgtatggaagtattcacgccatccaaactactttggtgaggttagtatcgctacgagaaacttttgtcgatatacatattgggtttgttgtatgaactagaagaagctcccaaagaaaacaaattgatgggcgtgattatgaattcagatgttactctggtggggcttatatgtggcttcattgcctgtgcttaaaggtctcgagtaccttgtcataattggaccagtctttctcactttgctacttctcttcgttagcggcataccattactcgaggttctctctatctctcctctctgtttccgctcttgtatattataaatcacacagcagaaacaacattcttgttgtgtataaatgcaggaatctgcggacaaaaagtatggtaacttgggagcttatcgacactacaagaagacaactaggtatgatacaaagctctttgaacaccgttattggccctcgagatgtgtaataagggctaagtgtttccctcttgtcaattggatattggtttacagtcctctgattctcttaccgcgaggagtgtatgggtacttaccaatatggtgcaaatcagtctttctctttgagtttccattgtacagccgtaatcttcctcaagagactacagcttggtgagccttctgtataatgcatcatttatttggcttcaatctctttgtaaatcgcacaatgtttttgttacgataacttatgagttatttctacgtgcaagggatagacgaaactcgaagaagagccagagaagcattgactgagagagagaaagagagtagattgtcactgattttgcaaacccgtctcctagttcttccttaatattcaaactctctttttgtatagattcttgtttgtctttgggtacttgttaaagataattgctacattgattgagaatacaataagattcaaaccaagcttcaaaaaaaatgttggaaggaaaattacatatgaatcaaaagaaacattctctaaggaaaaggctattgaagtgaactgttactgaagttctctaaggaaatcactgcacctgatctaagttcacctgaagaagaagcatcggaatgagagagtaggatgtataatacccatagatgaaggcaaaccagatagaccacagcccatatcttggcagtcgggtttctacgcaagaagacggttcccgagatgaatatagcgtttagttgcatcacaagccatcccaaatgtttcttgcctgaccggattttatcttggaaagctggtttaaactttgatcccgagagttcccaatctcctgcttcaagatcttgggatgaggcttcagttgcagacatacctttgttttcttctataagccttgacacggcctggcaaataaatcaaaattggattgtgtgtatgtgaagaacatatttttgttttgggagcaggttggtgggatccatcaacgtacctcgattctaaacaatatggttgctttctctgaggaaagcgcctcgacctggtaaatttggcaagaaaattcggaacttattctagcaaccatatcgtttagatgtctaaatgtctctatcgcaagtgttgatctacctgggattgtttttgaataagatggtcagttagctggttcagtcttcgtttcagttcaatttccacttcagttggttcttcgagttcctttctcatcatttctatgtctgcttccagtttagttgcctgaaatttcacaaggaatcaaacaaaaaatggaatcttgaagaaaagacaatagcataagtcaaccagataggaacaatcattccataagggaacctgaagcataattcaaccagacaactatgttagctaaccttatcttgtaaccgcccgattttatcagtcagcaaagaaatctctgcttcaagcatctggtgttcgaatttgtctcctctagaagtatctaactatacagcccacatatcagcagcatgattctcagaccaaatagacaaagatttccacattgagattgaagaaaaagaaacagaaagaaaagaagacccaagtcacctgttttaaagttgttccccttcccccaatattaaaagtatttcgcttcagttctacatgatgaagacaacttcttcagcaaaatagagaagtgattatccccaaatgactatttgcagtaaaaaaagtcatttgaattaatgtttttaagctctgtataatttctcaaagaaggaacctataccttccagagtagactctttaagctcaacttgttgtttgagtactgctacttgatctatctggtcacatcagaaagatagaaattagtacgcaaatgcagatatagaagttggttctaaaaccttgactcagcaacattaattaggtattgatcaaaacatccttagactcagaagatctacatctttcagtaagaacaatggtcattaacttttaccttcattatttccagctaatttaaacaaaccaagaaacaaaataaatagattatgtgatctttatacctgagtctcaagtttcttctgcccagcggcaagtgatcttgtaagttcagcgttttcagcctaaaacattcaatttttatgtttacatcaaaaaatcatatcatcttgctccaatgtaaggtaataataagagcaatttgaactgtcggcaaacaaattaaacggttaatacctctaatccggccaagcgtgtgagaacttccattcttgtattgttatgtttctgcttttcaaggtcagcagcttccagtgtttccatcatgtttgtttgcaactccgcagcctaaaggaatgaggacaaacccagattatatagttcatctagcttgagtaatacatatataaaatgatataataggtgtttgcaacagcttctacaacttggacatattgctacctcttgtgcttgttgtttagctcgttcttcgactattttctctaaactcaatttctcaccctcaagtcttgctaccatattctctcgctctttgatgaccgctacagcttttgttgcaactttttcagcaaaaactctctctcttctcctcctacgctcctccctctgacgctctctctcagagtcagtgctcgaatcagactcataatcggattcagattcatcacttgacaaggaagattccttcctcgttagaccatcagaaacattgctctgtgagacttcttccctcacctgctttccccatacagaacttcttctggactcacgaccatccctttttcctacacttggtgatgtttccctagggagagtctcattagccgatcttctggagtcatccaggggaggtgtcttaccactgacatccttctcactctctttatgagttgagttcacaaatatatcccgaggagcattcctatttttcatgtcagcatcagaagggctagacacttccttgtcgcttggttccttattcgtctgtttttgtggcctccctctggaattaaccacattactactactactcttctttccatcagataccaaaggatttttccccaaattcccatgtctttttccatccttcttcaatccccgaatcgcagatgttccaccaggactacgagacgtagaagtgctggtcctctgatttggagtactcagaagttctgtccaatcattgtcagtgagtttagtattatcttgtgtcaaactttgtgacggtgcacttgtcctttcgtgtgattgatctggtttgcgtacttttttgctgctacttaagtagctaggcttttgctctgttgagtttctctgagatccactaccagagtcactaccttcatatgtcttcttcctcaactgatctttcaaagaaacaggactacttccagattttggagaggtctcaaacacctcgtcatgggtctctgacttctcatctttccgaagagaatctgctgcctgctgatcaagctgaaaagcaaagtttacataatccccaattagcacaaattttgtggtacgagctcaactacaaattcgacaagaacacaagactctgaaatagttagtataagcagaaatcagtgcaatgcaatgacccagatggtgtaacaataacattgccaaatgatttagattagtccaagcttgaatcacatcacatcaatttcccggaaactaagacaccaatccggtgatcaacggaggaattaagagtcccaaagcaaaccatggaggtcgaaattaagctagagcccagcgaattccaaatccagtatttttcatccgttttcgatgcaaacaaaaatgagattcgacatctctcttacctgttgaagaattgtttcggcggctttgagcttcgacgagatccaattcgccattttgcttcactgctctttaggaaagtgatgagactaaagaaccatacgacaccgttttttatcacccagagtgatttctgaattgcactcgcatcagaaaaaaacgaagaagacgaagatgaatcaattgttacagtgacgtgttggtgtcgtagtttatttagcaaacgccgaaagagactccacaactaactcagccgaatccggttttatttttcggtttacatattcatttgtctttggttcattacatattcaataatccaaaccaaaaccaaaaacttggattaaaacacttttttttttcaaccgatataaactagaactcaaatgagccaatcccgtggattaaaacactttatagtttaccatttgtgatttttgtaagtaaatgcagtgccgacttaaatataaggataaatagtacgatagccttatatttgggtaattttttttttgtatatataaaggaagcataattttttttttggcgtttttttatatataaaagagacaggaaaaatgatatatacaaaattatatatgcaaaagagccctacaagaaattttaaaaataccacttgtgattatttatttttaaaatttatcgtagggcacaagaaatatatgagcaggaacatataagacaaatccagaaaagccaacagttacaaaattacatcatcgcagaattcaaaatataaaaaaatagatgatcatcaaattatttacttgtagcaacaagtggacaaagaagtactcaacggtcgagtgcggtaacttcatgaatattcacaatctctttgccggcgggaatgactgcatcgttcctttcattattaccgtcaccgttgattctaaagatcttctgagtcaaaacctcatgtatccgtccgatcatgcttagaaacgcttcctcgacgttttggttctctaaagccgacgtttcgagaaaatagagaccttctgatctgatagagtcttaaactcttcgtcttcaattttatttgtgggaagaccctctcttatgatgtgggatggagaattggagatggcctaagggctccacagtaaaatgaactcgtaactcgttattgctctaaatcttatttcctcccatgcaaaaatacaacagtattaatttattatttaagataagtaaaatggcataaactattaaagaatttcacaattctaaatgtataatgcatttaaagaaaagaaaagtccgaggagctacgtgactgagtgattaagaaagaaatgtgtctcaacgatgaaaagtccgaggggtgaacaagatgccttctccgttggcagtggtgtggtttttctctccttcgatgtagttgtggatccgatgtgttggaagtagagagttgctacgattcccttcggttgtggacgccggttggtgtagcgatttcttctcgtggctcagccgtcgtgtcggcctctgcaactacggcggaagtcgatcgagagaaggtgggtagtgccaattcgccatggaggttaacggtggatcttcctagatttgttggctgtcgcggattcagtgtgtttgggtgtttcgcttgagccttgggcctcaaacaccaccgtgacttgcttcctcttggccggttgaaggttttttgttcggtaaatcggagattcgttggattgggaaagaggggttatgtttgattgtcggcttgctaggtacgggagctgacaacgacgtgccgtgatgtcggagggttgaccatgccgagagatttgtggtggaaacggttggtcgcgggaaaaggaatagtagcggaagtcggatgcttcctctctgtttactagatacttcgatctgctgcaaagctgtggttctcgcatccgtcggtgctaatggtcggcttctctgcgtcacggtgtcactagggcaagatcctcttttccggtcccgacaaattttttcgtttttcctttgtctctggttttctttgtaaaccaaagcccaacccaattttgtaggttctataattaataaaaggccgtttaaaaaaaaataaaaataaaaaaaataaaaaatgtgtctcaacgcgaccaacgcgaccgggacacgctccttttacgcggcgtgattgttttagtagtagcactctttttttaattatcggtgtttttttttggaaatttggtagcactcactgctgtggcgatgatgcctaaatcacatctacttttctagaaactaaatgaaaactaaaatacaagtctagaccaacaatattttatcaaaacaaattattaaacgttgtttgtcaatttttcttaaaatggcattagagcctttacaaacccaaaaaataactttgcatgccttttattgctcatattgaagaaagtgatatcacggcttcagtaaaccaaatactttcttgattgtttctctgtactgatgaaattgagcttgcttgcgcaacaagcaaattaaatattataacatttgaccacataaaaggggactcaatatttatacagagagaatagtggcctttaaaagcacagaaacttcatgattaacaaggtaagcaaagaatgatatgggctatctatggaggctgataacagacgtgaagttgtatcatgtttcatccctgccccctacaaatgagaaacacgacatatatcaatcaagcagaaccttgttgtttatcaaaccgaaatgggaaaagaaatgttagtgtatcttaagcaaatgtgcaacaacaaagatgtaaactttaagttcagcttgtatcttaggaatcattccctaattaagcacaaattggcagatcaactagggaagaaattgcgaccaatcttataagttagtaatctaactaattataacgtaaccttttctgctccgaagaaaaatttatacccaaatccaagaataattaccaaaatccattagcttgctcagtcgcagcctcctcttcggataagaccccttccgatacggcaaaggctaagatatccttcaacagcagatcttcagaagctttcttaagatccagaatcggctgatagtagtcagagtgagcatgcatacacttgatcagcctaggccagagtttatgacactcatcagtttatttttgagcttcatcaacgcaatttttcaaagctgtaaatgattctttgcaagcaccctcattcataaactcgcaaaaccgcaattctgtttcctcatccctctttgttgggtcaatttcatttggtggatcagctgacgacgtatctccgagtttcggagggaataaggcgtcgagctccctggctatcagatctatagtagcattcactatcgcttcttcatgagctctccgtctctccgccgggagttggtagtatgaagaactggacttcgaatcccccgatttaaaaatcgtggatgacgcgatgatccccatagccgtgaaaccggatcttatagaaatcggcgattcagcctgtcaataaatttcagagtggagacgattagggaggttaaaaaaagacaagtatatatcgaagaaaacaggggaaatatatgctagggctttgatcgatttggcttctatgggaaaatcttgatattccaagagattagtataaaactagataattgttttcttttcttttttttttaaactagataatttgcccgtgattcgcggatatattttggcaattttttttatgccaaatattatcaatcttttgttttggttgattgttgattttaccaaatataatgatgcttaatcatacttgcattaagcatcattatcaaaatttcaagcattagaatcatataaaaattaatatttatttacatattagtttgtaaggtttcaaatgcattcgtctcacccaaaaatgtaattaaattatacgagaataaaataagacaaaaatcccaggccaagccaacattttcaacaattataaaactacattatcgaatatttcataacaatttaaaaatagatgaacaatttatttacttgtagcaacaattataaaactctacattatcgaatatatcatataacaatataaaaatagatgatcatcagtttatttacttgtagcaacaattggacaaagaagtactcaacggtcgagtggcggtaacttcatgaatattcacaatctctttaccgggcggaacgacagcaccgttactttcgttgttaccgtcaccgttgagtctattgtctaaaacgattttctgagtcaaaacctcatgtatccgtccgatcatgcttagaaacgcttcttcaacgttttggttctctaaagccgatgtttcgagaaaatagagaccttctgattctgctagagtcttaccctcttcttcttcaacttctctagactgcccgagatcggatttgttaccgacgagaacaacgacagtctcgggactggagaagcctctgagctccgacaaccatttctcaatgtttttgaaagtgattcgtcttgtgatgtcgtagattagtaaagctcccaaggctccacggtaatacgaactcgttattgctctaaatcttttttcctcccatgcaaaaataaaaaataaaacagtattatatttaagataagtaaaaacacataaattattaaagaaattcacaattctaaatgaaagataaaatttgtcgaaataaatataattttagtaagaaaaacaaaaagaagaaatggtcgtgacatttaacaaagattaggtccgtgtgacatcgattgcttataaagattttcttctgcgcgtgatctattttcctaatcatcattccaatcccaaatttcattcattatttttttgttatttatctagcatatttaccttaacatttagacacaaaaataactatcgaaaatttaacaagtttgacgtcttggtttgttacgttagaaattatacaaataaaaaaactcttacaaaacaagcatttttgttcatggtcaatgaaaaatcaattaatggaagtgagttcatttatttacgttttctttttctgtgcaaaaatattagtccaacgttaaatacagaaattttgatcatgtcttcatcatcaagtccgttatagtagtatcatacctttcttggccggcggtgtcccatatctgagcctttatagtcttatcgcccacgcgaacattccggtaagcaaagtctactccgatggtcggtttagagtctaaccgaaactcatctctcgagaacctcgaaaggaggtttgattttccgacggcggagtctcctatcagcaccgccttgaataggtagtcgcactcttcgtcgtacgattcctccgccatgctctatggtgttcaagtttgataagatattatattagtaaatcgaagcaaaaggaagttgagaaggatcaatggatgatcgaaatccgaagaggaaagggtttgttttatgtaagaacctctcaggaaagtctttccactaagtatatatggctccatttattgaaaacatggataattatgcatataactaatgtcatatgattgcgacaagatatatgaaatgaattagtattgttttttttcttttcttggaagagttaaaatgaggacgatataatttttgagaaaaggtatagtatataatatagaaaatgaaacgagcaggacaaggataaaagaggcgtgacagagattgtacataataccatccaagatatttgttatatattgtatatagtctgtatttctattttgtcaacgaattaaaatagtgtgacctcttatctatcttaacttttgacttcttgttatgtttctagcttaggaaaaaataagaagttgtgatgttttgattgtctagatcttattaggatctcaagcgtcaagtcataaagctcaatcatgcatgtttctctgtagtctctgtacgtttgagttttgacattttaccaaattcactcactgactcacggttaggttttgacttgtaaagagttggctacttgggcctaagatgggctttatcaggtcggatttttcacaaaaaaagtcaaaaaaaaaaattcttaaaaatgggtgagcaaatgaaaagcctttgaccgattcctttactcgaagaggaagagtagaatacgattcgtagacgtcgacgtctttctttaatccatcggacggattccatctctttttttttttggcaagatgggtacacttttcaacgaggactagttgccttatttaataatcacatttgtttctacatccgaaaatagcttaataggacaagcaaacgaatgaatatatcaatttacgcgtcaatccagccctttaatttcagcattcatgacgttgcttcgtagtaagagagtgtatattagttaatttgaaaccagatcctctgctaaaaaatttttagcgttggttcatcacaaagaccttaatttaaaaatatgaatgttaatatgttaccatggtccccaaaaaaataaatactacttgaatgttacaccttacatttgaatcagccatcttttatttttttttctatcaagagaacgcctccgttgaccattttgaatacggttttattacttcctaatccaatatcaaagtcttaaaaatttgtcatgtgattgattcatagagaaagctacgattgattttttttccataagcagagaatctggtttttgtttctatgcaaatatagttcgaaactgatacataactcgagaatgcagaataagaaattagaaaccaaatttgttttgaacaaggagagcaaacgatatatatccatattcagatctaaatctcaaccatgtatgaatgaaaagagatccgattgaagttagactgatgatgattgatcacatttaagaagaaaagagtacctaatttccatagttattcttattcccgaaatccagatctgaaatctggaaaactccctaggtcgaaggaggagcggcggatccattgctgttgaggagagaagacgacgtcatcatcttctgaaactcttcgaaattaacattcccatcgccgtcagcatccacaggtccgatcatacgagtacagtcttcaacagagcaagacatcccgagacggttaagcacctggtgaagctcagaggcggagatcagtccgtttttgtcctgatcgtagagatcgaaagcgtcacggatctctgcggcggaggaagacgagcgacagagagttgagaattcgtcgaggttgatgtaaccgtcgcgatctgtatcgacttcttcgagcacgcggttgagttccgtctctgtgtaggaagtccccatagccttaaacacaccgccgagttcgaggactgagatcttgccgtcgccgttggagtcaaactggtcgaaaactttcttaagctcctctggattagccatgtccaccgttgcaggcgtgggtttggcggtttctggattcgcgcttgccattttttttttgttaaaggtaaagttggagagagagataaagagcaattagaagatgatgagtttgacctttttatagaccttttcgctagatgtcactatttacaagtttggaatcgaatcttgtgtatttaatttccgttataatacgtatctggtttgggaatactgtatttggttgaaatatgaatgttttgatctgttatttaaaatccttttttctaattaaagagaagtaatgttatatggttattatatacactctcaaacatggtattctctttttataaatactacttttgctaggaaaaaggaaaactaaaatactactttcaatattcacaatgaaaaagaattatatatggaacgttttaggatattaatgttactctcagtctttccacatggcttaacgaagacggcaaggcaagattatgtcacgtgccttgataatttgttttttcggctgtaaatgttaaaatgaaagttacatttgtttaagacgaaataacaatcctgaaacagagaattcttcttttaatccattacttggttcagtcttaaactatgttttgataatatatcgtagggactattatattacaagtgttactattttgatgataccattgctttattttagtattttgttatgcatttaaagaaaataaaagttggaggggctaacgtgactgagtgaatcagaaatgtgtctcaatctaacgcggccaacacgaccggtacacactccttttacgcggtgtgattgttttacaagtagtagtggggtcttttttgaattatcggtgtttttttttctagtacttgaccctgaagaggcctctgcaaattactactaaatctcaaactttagctgtatttcacattcaaacccctatatgcaaagtaggcttcttcttgttggtcatgaccttaggcatgatttgaataacctcaagctccaatatcctaagcatttgatgaagtacatgacccttaccaaactggtgaatttccttgtccatttttggttgtatgggtaattggattgctatataatacattgactcgacggccactgtcttttgatttttttacttcagatttatctttcccgctttgtcactgatatgggtttggtattaattcccatgtaaaaccggttgcagcgaatatgtatcacattatggttagtaaggcggtaaaaaaatctctatgaggttatggcattaggcctgattttcttaccgccttactaactctaactctcagagcttatagaaaatatttcatgctcttcgaatctacaagcttcagcgattcgagattccaaaatgctatattagattgattctccacactctccatctccatttcttcttcttctctatcaaactcgcgagagaacagacagcggcaattagggttttagagaagtagatgactacttctcctttgataaaccctcagagacacatcaaaatatgtgtattatgaaaacaaattttataagccaatcactgaggtatctcacacaaacatatttagttaactgtcctttgactttagtttttctttcatgatgaaagcttgtaaaaatattatatgtactaacaagttggctccaagagaaatgatataaacgaattccggaaatgaaatggaattggagatggtaaagagctcatttagacttccagcagacaggttacaagatacaggactaacaacttacggctgcagcaaaaccacgaaaatatgtgaagatacaggactaacaacttacggctgtttcactcagtatatactgagatatgttaatattgcttaaaggggtcgtgtatctacaaaatatttagtagcattgatgatattagcaaaggttaacacgcgacataaagcaacccgattttgcacacaaaaaagagaaaagataaacaaccggcctctataaaatctgacgtacaagtatcccttgaattcgaatccctgtcatggtcgattaggactaaagaaaactttgttcatatttgtctgcaatgtacttgctacttagatcatctaaagtgtggtcctaaaatacaactagcctaaatatactaacagcagaacagcaagctgagttccgtagcaagaaacaaggccaaagagaggtttttcctcaataatttagtatattgcaaaaatgcccatgagagggaaggaaaggtagaagaagcttttatattagcagtcatgtaatcagtaacatgtttcaaccatgaattatgatcacagaagtggtattcacgtctttttttacttaatgtatatcgttggctttttttatgtatcaaatgcttaaaacataaggttcgatcgctagtggtaaaccctgtaaagaacatacaattaatataaatagactacgaccctagttgcaactaaagaaacgttgaaagctaagaaaagtttgtcatatagatcagtctgttttcataacatatactaacaagataaaatttgagattccggtaaccagaaaattatgcagaggcaatgctggcctttgattagtcattcgaaaagcaaagaaacttcatgattaaacaaggtaagcaaagaattatatgggccaaaggctgttgtgtatcgtaagcacaaagtgaagcaacaaagatgtaaacttttcaactgaatgttcagaggaactagtaaatgttcactaaataaaggtcagactgtatctgttccagaagacacaaatcacattcaagtgaggcattagcaaagcaaaccacaaagacgacaagatttctttaatgaaacattcatgggcgtcaacatattgatgaacttttgagaaaatgatctcacgaatcatataaaaagaagaaatccgaccaattttataagtcaggaatctaagaaacgaaactttttccaatttattcccaaatctagtattgattattcccgtaaacaagaaaaattaccgaaatcctctcaatcatccctcgcaggctgttccttttccgagatgacaacttctatgaagtccttggccaactgttccatcgaagattcagccagcgtgataacaggcttatagtaattagagtgggcatctacacactttatcttatacacttaacaagaccaccagtttccttcgcgcaatcttccaaagccttaaatgattctttgcaatcacctcctttcatgaagtcgcacaaccgcttaacaagtagttcgtcgtccctctctgtatatccttcctttggttgatcagttgatgactctcccactttcggcgggaataaagagtagagctccttccacaccccgtctacagacgcttccaccatcgctcgtacgtgagcactctctttcttcggcttgtcttcctgattcgtgtagtcaaacatctcccacgggaattggtcgcttcgaagactaagctcggcggggatccccttggatgacgatggggatgacaatgagggtgacgaggacgtcccatttttctcaaccgagagatcggatcttatggaaatcggcgatactaaagtgactagagagttcgaaagagacgaaccaatttgctagggtttcgatactaagaaatttaaaacttaatcgtttgggaaatcttatcttctgatattccaaaagattagtatataagagcatgtccattaaagagtcctaataatggaatccttacatttttatactaataaattttgaaattttttatgtttagagtttttgttaaatcctaaacatttttcttgtccaatggtgagtccttaaatgggtttaaaaaaaaaaaaaatataatagttattagaaatatgaatgaaaaacttgaaaaaacttgaaaacacataaaatgaagtttataagtaaaactttcccgaattttagatttctagcacaaagtgtcactaggagaccctttcttactatttctctatctatcaaaaatgatacgtgcatagagttgagattgatgacaagctcctttattatggcaagctcccataatactactccaaagctgtaaatgtcagacctgtatcaacgaattagaagagctaattaacgtttaaggaaaagaagaacaattaatcaagggaacttaacaaaacagaatacaagaatatacttcttatcagcagatatgtttcatgcttgatacgcgagaggccaaagtcagctacctgtaatggatatccaaaggtagctcatacttagaacattgtccacatgcaattgccaaagtcaagtgaatgtgtaactaacacttaattacaatgtcaaaggccatatggatacgccgcctccaatccagttttgacgtgctcttctgtagtagagggaagagacttcaactgaaaatagcatttgaaatgattaggtgcatagatcagagctatggcatgaggtccaaaaaaaaagaaaaacgaaagtgagagtagtaaccaaaagagatgagaccgacataaataatttggaattagctgtctcagaaatgattcgtcttcagtaagatgcagtttttaagtgaatatgcttcagtacagaaaattgttgtcgttgaagaagcaatctgactactaagagatgaaagacataatcaatatttttgaattcccatttcacgataccctaattttgattacatctaccaacccaaattaatcacgatctacacaagcttaaagatagaatcataccttcagcatgtgattggactagaagtgtcaattgggctgtccaaagcccattggtcatgtccacttggaccatttttttcatgggttttattggttggtctttaatggacaatggtcttaaaatttgtccaagaccattaaagaccattgtccaatggtcagcccatggccagcccatacaatgatgtttatatacaatgcattttcacacaatctcgtcaaaagctctatttataaaaccataacatcaacatgaaatcaaacatgcatgtacctgttcttcccagtcttgtaatcaaccgtgacaactcaaacacgcatctaagactctctatatgcacctacaagtaaagaaaaaagcctacaatggctacatggagaatgatttaacagagaaacccatttcaatactactccaacatctagaaattggaaaccagaagtggccatcttcaataagcttaggtaaaacaataagcttaaacaacatttccacaatgtaatcaatcacaaatgattataagtaagagacaaaatccagaatcaattccaaaccaaaatctgtcatccaagttgcaaccttagaccggataccatcacaacctatagcaatctgtcaaagacatacatcatcaaatcagccatgtactgagaataataaacacataaccataggctcagagcttaagagaacagccatgtacctgtttcttcccagtcttgaaacgttcatgcaagggtggtgtttgtgtcctcttgaccttggatctcatcagtttcttcaataagaaaaaccgagctattaatctaaaagctgcagtctaaaagccatataagtttactattataaacgagttcaagatgtgaatattaccaacttcttgaaatccacgaaaccagtttctagtacataggagggcttgcacattagtaggtaaaaggcagcttctatatttgttaagcacacgactacctatactaaaagctgattccgatgccacggtagtgatcggaatgcttaagatatcacatgccatcgatgacaattctttaaaacgcgagacattgttttccaatatgcaataacatccatatctctaaaagagaccatatctaacacaggctcttccaagtacatatctaatggtgattttccagttccatttctttcagaaaagtaagagtaaaacccctgaaatatgaccaacaaaacaaaattctcactaagtataagaatgcattttcagaagcattatgctttaaaatgctttgcatagtatcatttgcagaagcattatctacagttaaagtaaaaactttcttctcaattccccaatctttcaacagctcattaagcttcattgctatagctactccagaatgtggaggcgggaaagcacagaaagataagatcttcgttttcagaacaccatcaacatctacataatgagctgttaagcaaatataactttcaacagttaaagctctccacaaatctgttgttaagcatattctacccgggattatagctaacttttccttaagctt

SEQ ID NO: 1131 - DNA, 92948 bp, Arabidopsis thaliana
aagcttaagctgtccatcaactcctattaacaagttatttggcttcatatccctgaactcaagccacacataatcagtgcccaaaccaagcaacattacagagacaataagcaagttgttaaggataaacaaatgtacctgtgcaaaacccatttatcgtggcaataagcaagtcctttaaatgtcattaggaggtaggatttaatgtcggcgggtgagaggaaaatgttagaatcgcgaataactgcttcgaggtcagtctccatgaactcaaagacaagatgcaagttttccttgtgaggaaatgcatcaatgagcagaataatatgaggatgctttagctctttgagcattttgatttctctgagagctgtaatatttacaccttctctttgtttaccaagccttatcttcttaattgctacagtttgttccgtctgcaaaattacaccccacaattacttccccttgatccaacaaaaacttcaatcaaaatccggaaccaaaaaagaaggagaaattaggaattgccgacagatcctaaaccctaattttgcaaacaaaaatcagcaaagatatgaccttagtatcagtggctttgaagacgactccataggtaccttgcccaagaacctcttgcttgagatacctatcagcaactttctttggctgctccggcattttcgggtttttcagaacccactcaataatcgcgcctctctctttcttcttaattcacgtcgctagaattcgattgctttccgatttttattctaaattgagtaaaatcgacgatgaggaagataccgggaaaatttagggtttcagctttgagagctccggctccggagaaaaagtagccgttggcgcgtttgcagacgcaatcggctaatcgagggaaacaacaaataaagagaaacgcccaattatttacttttctagttttttatacatttaatatccaaacattttcgatttataaaagagaaaaatattatttaatatctaaacttttaaacaatagctaaattaatcgtgaatttttgattttttgaaatgactgttttatacctcaacaaatttaacctataacctataaagcatattagcaatccacgtgtttttgctagagtttagctgatttcttaagagctatcgttgctgtttctcgtccatatccccttccttgatagtttcaagctctttgccagtaatccattcagggagtatagctgcatacttgcgaggtggtggaggcggatacttcattgtcggcttctggtcactagcaaagcccggaggaggttttggaatctgaagcggtggttcccttaccctcaccctcaatggaacatcaggtatcccataatcactaagtttgatctcaggtccctcatgtaattctgcgcacggtatccagcaagctttttctggtaataagcatgataacgatctgagctccagaagaaggagtactttgggtttcccgcatagcttgtcatcatctttctctccatctcaggcccctccatgaaaaccaaacgggctgagctatccgcataatatctagtcctcggaggtacatctgccggagttcgattgcaaatcactcgacatctcttttctatacaaagagaaacacaaaataatagataaagttaacccttgatgacaagagatgcaaagagatcgattgaatgtgttgattatcacttgaccctgagctctatatgactatatttatacaaggggtaaactaccaagaaaacgaattatcttcctaaacgtaaatataagaaaaggcaaagatacatatccaaggactacttagggtttcggagagagataacaagtaccgtacctcacccaccggaaagtaacagccacgccgcgagagccacagtgacgtcgtgaacgaacgaactctagttctgaagcttggaaattgacaattgcaaatcaacggagaatatcctcttagaacaaatccacggagccctatgcgtagcctagcacttatagacgagaaacttgtgctccaggttttataatgggcctctgttattcgggcttataacttcgggccatatttacttaatttgaagttaaattcggttttgggtcgagattttgggttttagttgttttttgttgtgagagacgtcgttttccattttcaccatacattatctacttaaccggtaagaaccaaatcatacatacatgaactgttatgttataaaaccattctgtttaacatcagaacattacggaaaaacggtctatttccccatgggaactatcgcatctggctagatgaagcccgatctttgacctcttgctatttacccatgaaatgaaagttaaacgtctatttccccaccaattaaaagttcaagagcttaatgtccccgaatcgtggttacttcggtttgatacgtaaacccgagacgaaaccatattatcggtcaaaaccaaaccaaaaaaacccggattcgtttttaaaacccgatccattgtcgaatcccaaatccaaaatctaaaaccccaaactcaaaactcaagaaccctaaatcgattcccaatttttttatttccagttgaaagatgagcaatctgtcatcaagttcgtcgggatctacaggacctcgtggtcgaggaagagtggttggagtgccaaagagatgttggattatgtccagttctcagagcataatctataaccgcctctttgaacgcaactccactgaagaaactctgcttttggtacaaaaacccatcaccacgcctcacatgtatgtcggaactgtcgtcggctccttcaccatcgctctccgggtacacgtcgtggcgaattggtggttcgtcggtccactcgtttagcatttcttccaggtgaaagttatctctgtcttcagcttcgggatcgacatcaccatcaagatcggggtcgtgatggattaacgacatcccgacatcgatcgatcaaagttttagggtttggaaaaactggatttgaggattcgtcaggttaaattagggttcgtcgggagagaatttggggatttttttgtttaggttcgagagtcgggttacgggtcataattttggtttaaattaggtttattctggttctaaataggtttagttggttaagtcatcggtttcgcatacagtaaaccgacttaatccagttcatggacattaagttctcgaagttttatttcggggacattaagctcttgaacttttaattggtggggaaatagacgtttaactttcatttcatgggtaaatagcaagaggtcaaagatcgggcttcatctagccagatgcgatagttcccatggggaaatagaccttttttccgaacattacaaataggctcaatatcttcaaatatcatttacaaggagaggcagcttctgagaagtagaagagagtcattaggaagcaatgcgacgacaacgacaccagaaagctgtaccgccacttctacctcgagcaacggctatttcttcatcgatgtagaaccaaatgaagaaagggtctttattactaggctcttccacagcgtctttcttccccaagctgaactctagaggatctaatggtccaatctttatgcggatctgttcgaagacaaaagctagtatccgattcttccatgaaaaccttccttcgaatgttaatgctccaaatggaccaagatacaccccattctctattctttttccctggttgaaaaatcaagcacaagaattgttttgttacttccaaaatatcggctttcaggattttaaagtgcctcaacacttttaccaatcagaccctaaagcagtactagaaccagtttagagacttaccgcagcatcaaatctctgaacagcagttagagggaaataacgacctttcgtcagtttcttctgtatttatggtatataagatcccaagtcaatgatttgaatggatcaatcaagactgcaatatttataaaaacatgtaaaggctaattgaatatctaatggtacctcggcggtgaagataagcatccatgttcgtccaggagactcgggaccaccaagcgtttcaaggaaagtggatggatcaatcttagccttttcgatagcagagaaagcagctaaaatctcatctgctgcaactttccgagtttttgcagccgtttttaatacattcacactctccgttacttgctacatttcaaaatcatttcacaatcaagtaaaaactagttgcctagatatattcagaatcttaaagttagttagaattcatgtaatttccattcgattcaaccaaaactctaataaccaccttggttccatgaaattctatctcctagagctagaagtaaacacataacacttatgcgaagagtcccaaaatataaatttgaccagaaagtaacttggataagctttgtactcctcaactgaatttctctgaaggagttcgttatgaaacgactcttcatcggtctaacactatcttttcaaacacaatcgaaatgaagaagggtgctgcttactttgttagggatttgatcttttgccggtgggacaatctggttcctgccatccaccgtggctttcaccaaatgtaatctctcccgacgactaaagaacagagacgaagaagatggggacgaaacacatgaagctagtgagaccatcatcgtctctgagaagctcctcactttttttccctcttcatcattcttgttttttcttccacatcactttttcagacaaaccaaaaacaaaaacacactagagctcgtcgtttcattgtaatccacaagttttatttggttgagaaaagctttcagttgtatattgtttgtgtcgacctttacctcaatgtcctcggaccgaatccttccaattttaagaattgttgtatgttaaagttttatagccagtataaaatttcaataaatttccatcgtgtttaacttgatccaattcggtttcataattgcagcttatgttctatagacaaaatccaatccatttcgagtgaacttggatgcacgaggttatttatggattaacctgaccgaaacaacgaaataacttgtcgtatgaagcaaaaagctagaatgagctagaaaccaatacttgtctgacaagtattaaggaacgaatagagtttcttcaactatgaaatatcaatctccaaatagccaaaaaacatactcgccagccaaaagggaggtagtcgtattaactgttaatttaatttgaaagaaaagtaaactctcactcacgttcatcataattctctctagctttgaaatataaaggaaaatcggtctcaggtaacacctctccgcagcttgtaaatctcaactgtgcactgaaaaaaacaggtattaggacttgggttttagggaactcagatttcttagtccgaatcattcatgaagcgttttcctaatctccctcctggtgcaacccgaaagccgtctcctgctttccaaagaaacagaacccaggtttagattggccattttctaaagttaattcttccatatggtggcttaaaaataattgaaatcataagactcctcaccttttctctcacaaaatttggatcaagcgcttgagacagaacttaagagctcggtaacctttccaacagcaattgtttttcctgtaccgtatctcagataattaggatgagtaaaactaaatgcattaagcattgcatttgatatctctgaaatctcttcttaccttcagttcgtagagtgaatcttccaagttgagggaaatctgagaatttttcaatacaaattgaattcgtaacctgcaagtgatacagcaagggttgagaaataataatttgcgaaatataaatatataaatataagtaacttaaaacttctggctatgaatacgtgtataagagaaacaggaaacggtagttaggaggagacaaacctggatgcggcacacaacagcagcaccattcttcacaaacaaaactttctttttcattggtttccttgtcttgagatcaatttggcttttcaattcgataatctcacactcctcgacaaccgcatggatgtggagaattgccttgtaaccagctgtaaaaatagcctacacgagcagcaaaataatgaagattatttaaaactgtatatactcaaacaaataacattctagaacgtgtgccttacgttgtcaagcagctcaaggatttgtagttgggcaacaaactcggtaacagcagggacagggtttactgcaacagaaaacaaagaaaaaacagctaagagaagactaagaattcggatattaagccaaaaaaaaaaatggcaatgcaaatcatttattgtgaaggcaatctgtaaagcattatactcaccaatgctggataaaacaaaaccagaaaggatgtcctcatcttcaatgccagtaatacgaactctcaaattctcacccggtcctgcacgcttaactttatcctcatcgcaatatatagcaacaactttcacttgttcctacattgattcatgaaagtcatcaggaaaacaataaactggcaatgaaatatgaactgagaaagaaaaaaacatctgaaagcaccttgttcggcataacaaccaaggaatcaccctcccgaatgctgccagattctacttttcccataacaacagttcccatgtccttgaacttatcaataattggcatcctacaattcataaaatcgattccggttaacagtctacaacatacagagattggtttacagtaaaagacatgccaaagttgtagaagttgcatgtgatatataaaacaatgcacagagatgtgttaatccatttaaaacatgattatacacaagtaattgatttcctgaaatgcaacgaccaataattaataacaaagaacaaccggaataaaaagagagaaaacaaaaagtgggcagcggcggttcacctgaatggaccattaggatcgcgtggcggaatttcaatagaatcaagtacttcaaaaaagctagggccactccaccaaggacaaatttcttgacccatcctctggtccatatttttgcccattagaccagatataggcaagaagacaacatcttaacaacaaaagagtaagagaagaaattaaaaatgctgtttgaccatagttaaactgcaatgtttacagttcagtgcatacctttctttgtgttgtagccagaggctttcaggaacggtaccattttttgttctatttcatcgtacctgcataggatttacataattacaaggatgtacagaagaagatacgaaaatcatcattgacaaggaatcaaaaggtcttctaattacctttctttcgaccagttcacagttgggtcatccatcttgttcacaacaacaatcagtttagagacacccaatgttttggcaagttgaacatgttcacgtgtctgcccacccctctcatatcctgtttcaaattcaccttttcgagctgaaatcacctatatcagagaggcgtgggtagggaagttaataagcttcctactggagaagctaaatcaacagaaaacaaattaacttataagctgactaaccagcacaccaatgtccgcttgagatgctccactaatcatattgggtacgtaactcttgtgcccctataagtccagaaaagcacacaagaattagaacagaaaactcatccaacaaatattctgcaacccagattccccgcataaaacaaaaataaatggaaaacgattagtttagattgatcccttaccggagcatctaaaatagtgaatctagtgctctccgtttcaaagtgagcccttccaacttcaactgttttgccctgtcaaattaagcaaattattcatagcacttagcaaacatatattcaacaataaccttgatgggatttccataaacaaattatcatcaaatacatgcattttaagcaaaagaacaaacattgaccaaaacacatgaagtaccttaagcctctcttcttcatttgtatccattatatatgccatatacctaacatacagggaaataaaagtttcaaaactagttagaaagcaaagcactcatttcaggtttgaccaatcaggaacactcaccagctttctctacttttgtcttttgcttccttctcatacttttggatttgtcgatcatccacctgaccactaagaaaaagaatctgtcctccaattgtggacttaccagcatctataattgaaaaaaattgaagccagaagtcagccattataaacttaaaagtacacagacagaaaggtcatggccaatggggatttcaaatctgtattacataagctctgaaaccctgtgtctacacaaggcaattatcttgcaacctccagctttaacaaaaacatgcccataaaaataaaaataaaaatcattaagtagatagtcataccaacatgcccaatgaacacaacattcaagtgtctctttttatttgcttctgcaacatcttcagcttcctctttggcagccttctcttgagcagctttctctttagctaagatagattatatatatcagaatgataaataaatcgtcaggcagacaacaggataccagagagatgagacgggagcagtatgagaagatagtcaagtcaacgaacctttcgctggattatggactggatgaagcattacttcatcatgatcctcagaagctgaaaccaccaaagtccaaagaaaaaaagtttgttatggcaaagtaagataaagcaaactaatttgaagtgaaataaaaagaaaaggaaactgatgccaggaaccttcttgctcatcaggaactggaattgattcttgcacttcatctttcaagtctgtaagtaaagataaaatacatggttattctctttgtcaaatgatttggctttgtgtatgtattgtaataggtaccttccggtgctttatccaaattctcaacttcatgtgagttatgaacttctggaatgacaacaccattgttttcatctgcatatattaacaccaaaatttggtaccatagaaataagaaggaaacaaaaatacagttaaagctagttgtctctattacctgccgattcaagctgtaatgcgcggatctcagcctcaagatctgcacggcgtaaaaatgtataggaaataagaattatcacctccaacaaaaaacgtacagacatttagcaaagaattccacaaaatacccaatccctcgctaactgagagttaaattcactcgaattccaaagagaaatagctaggtcagttctacgcaagccaattaaaaccaaccaatcagctaaaccctaatccgatttctaatccaaaagccgataaccctccttccgatttaagattaactaccagagcaacaaatcaatcagcttcataatcgaagttaacacagtaaaacgcaaaaattcaacaaaaattgaagaaaagatccgatcgaccaacaaaagtagtaagcgcataatcgagaaatcgagagagaaagaagacacatagaccaatgactagaaagagagagctcgagaacccgtacccatggcggattgaagaagcgaacgaaaggaaaagggtttctaggttatctcgcgaaagaagaagaagaagcgcgttaagggatccaccaaacgaactagtgccgcttctatgaggctctcatttttgcccaggtggatcttttatattccctttttttgcgtaatcaaatttttcttatttcacatcccaaaactcacgtgtcaggtttaacgtaaatacgacgtcggttagctaatataaggccataatgaaagcccaactaatgggccttagttacccttgtgtatgattgttggaaggcccatattcactattgtgagcaatatttattttgtacaacaattggaaaagcctttgtaaaaagacactagattttcaaccgcggggactaattatattttaaagttaatatatataaaagtttgtaatttgtaactatctatgtaactttctataaaatatttttattttatagtttagaattgttattaagtaacgtcctgccaaacccgtcccgccaacccgtcccgtaaaaaaaactcatttattttattaatgttgatcttatttatcatatgtttatgaatcattgtctaaatattttgtaattttgtagtaattaaatgctatcaaatatctctgcggtttgatgattataattgaattgtaatagtcatgcagaaaaacaatatcaataatgataattttgtagtaattaaatgatattaaatattttgaaagttttattttagtaaccaatcgtgtagttaatgtagagagattttaggaaaattgttaaatgtcaaatatttaattcgaagatttttttctaattatcaaaaacaaatattaatctagtggcaaccattgtaaataaatcccaactacaggatttatttcataaaatggctgcaaaaatgtatatatagatagatgtgtataaaaaacagaagaatttgcttgtaatttttattttatttttttaacacacccttataattttcaaaagtttgtatcttttacataatttctttcagttaaagaaagttaaaagttgaatgcaaaaaacacaaaagcactaatgagactaagttcttttctgtaggaaatctacccatagattctttttggggttattatcatctgttatatccatccttcaatcttgaccgcacaatgttatcttcttgttttgtatgttcccgatagaccgatactttggaattttaatccaaaaaagaaattgaatgttgcaatcagatttaagaatgacaaaagaaggagtggggttacacaaaagccaatgaggaggcatgtgacgtttttatgtaaaagggaatctaatagctaaacaatgtcagtccatttccctaaagtccttttcattaccacccccacccattctattttctttattttgaatttggtatgatgatattttcatcatttcatttcatgtactaatcaagctccatattccatatgaataaatgttactttaatagcaaaaatcgttatcagactcgtctattcattagttgcgtgtccactctcttattatattcttattcaattgaatttttccaatctaaagtaggttagaaaaagattggcaagatttgtttcatgattaacaatttaaataaataaattaattaaattaacagactaaaaagagtgaattagaaaaataactagaaaaaagtaagttcttgagtagtaatgaaagtgacaattgctagtaaataagtggtttatgaaatcatatatatgaagtgacaattgctgtaaatatgtgatttaatagcttttcattaaatatcacaacaaaaaatctgtgaaatgaatcaatagctattaaatcacaaaagtaaaaaaatctgtgaaatgaatcaataatcctaactattaatgggtttaagaaaagtcctcgaaatgaataccatctttgactccctctttctttctcattagggctacagatttttgtctttaaaaagccattcaagtttcaatggtttttcacttttgttctcctcctccctttttttcttttcaggattcttcttttctatgttttatctttcataatagatctgataattttgatttttcactatatatattatggttaatactagtagctttttcatttcaagttttatccttccattggttctttctgagtcaaattgtctcctgtttcgaaccatatataagttttcaatggttttgtattaactcaagtattcaacattatgtctctctttttcttgcttggatctctaatgctgttcatattttaaagcataggtttaggttagatgcatgtaactgccaattaaaagaaggtcaagagttttttgattgtatgaatatatgagttagtcaaagcagatccacacgattatatagaaaaacaaaggaagaagaagaggaagagctccttgaagttcaatggagggtttagcagggtgaagtaaagctgctaagctatggatcccataagccttatcaaattcaatataattgatgataaggttttttttatggatgccatatctcaggagctttcacttacccctttaatggcttcactcttctttggattgaagggagctcttcatctctccatccctatctctctctctctctatctttagttcttttaagaatgacttttcattttttgtgttgtctgttgcaggtgtataaacatggatgatggatcttgagtaggattttttattttattttcttgtgacatatatgcaatttttatggtttgtactttgtatttccattagtttcgtacttttcagttatgtatcattgttaattctaatgtttgaagacatttagagtttatacttctctaaattactttttcgactcaataaagtcgtttaagtgtctacaagtatataccgtgttaatacttttcaattcatatccaccattgtataaagatatgatccgcttttatttaagtgaatcaattaatttacagtattcctctatatctctctcacactgttcgaataaatttaatactcaacagatctagtttgaactttttaaataagtttagccgaagaaaattatcattgttgaacaaacttattaaattcggattggcttatttgatgcatccagattgcaaaactatatttttgaatacagctggaaatgtttttaaagtgtaaaacaacggtatatatataagtcaaactggttttttttgtagatttctctccctttagcaagttttattgctttcctataatccataatatttacatccaaaacagcaattatataagattttctgctatttcaatacgatgttatactatttcggcagatgtacgtactacattacatctaaccaatccagattgataactatatttgatgtaatctcgaattagtcaatctctgtaccacatataagaaattttgcttttttcacaaaagagttgttagaaatttgacctatacaaaaataatgaccacgataaatgagtatatacatgtacgtaagataaatgtaaagttgtatatttgtgcgccattcatgattcattccacgtatatattgtttgttcgaatcaaagcaaactcagaaaatgaaaacgctgaatgacgataaaaatagggacgcttttgttcgaattagcgtgcccattatgtcacgaacgtagattcaagtcttggccataaaacaggattccttatagcatccaccaaaacacgagaaatcattctcaaaaacagtctctccaaatccgaactaaacaactcatagcccatataataaggtctgtagtgggatgcgtttttggcttttagaacataccaattggagaacacgctttcttacacatggaaacaaattacgaacgcttccaccaaatatgggctgagataagcccattaacataagacccagtaataaatatataatatgagcccatattaaatgaaccctaatccatttttagtttctatcatataaatagcttcttgtgtttttcacgcccttcttctttgtatttccgcctcccccgagaaaacgaaaaccctagtttcagaggcatctccagacaccgaaaatggcggaaggactcgttttgaagggcaccatgcgtgcacacactgacatggtgacggcaatcgccaccccaatcgataacgcagacatcatcgtctcagcttcccgcgacaaatccatcattttgtggaaactcaccaaggacgacaaagcctacggtgtagctcagaggcgtctcactggtcactctcacttcgttgaggatgttgttctctcctccgatggacaattcgcgctttccggcagctgggacggcgagctccgtctttgggatcttgctgctggtgtctccactcgtagattcgttggacacaccaaggacgtgctctccgtcgccttctcactcgacaaccgtcagatcgtctctgcatctcgtgaccgtacgatcaagctgtggaacactcttggtgagtgcaagtacaccatttcagaaggtggtgagggacaccgtgattgggttagctgcgtcagattcagccctaacacgcttcagccgacgattgtatctgcttcgtgggacaagaccgtgaaagtgtggaacctttcgaactgcaagctcagatcgactcttgctggtcacaccggttacgtgagcactgtggctgtatcacctgatggttctctttgtgcaagtggaggcaaagacggtgttgttttgctgtgggatttggctgaggggaagaagctttactctcttgaagctaactctgtgatccatgctctttgcttcagtcccaacaggtactggctctgtgctgcaactgaacatggtattaagatttgggaccttgagagcaagagcattgttgaggatttgaaggttgatctcaaggctgaggctgaaaaggctgacaacagtggtcctgctgccaccaagaggaaggtacacaaatattttcccatgatggttcaatcatatgcttttaatcgattacaagttttcagcttttgtataggaagaattttctgtagttggttatgatgttgattatgacttgtgattaagtattacccatagctgagtatatcataattcgtaatgttggtctgttattgaaaatgtgaaagttcgtaaaaagtttcttacatggattattctattcaaatgctacacgatgatatatgtaaatggtcttctacacttggtttcagtttcagattctgcaattatgtttgcttgaattaccattccgtttggagacttaggctctctatcttctttatctgttttaatcttccatatatagcaattaccataattgtgttttcgccccagtttgagcctaaattgtcaattaaggttgtcttttaatggttttgtgtgtccatactcattgattacctgacatttcttgttaggatcatagtagtagtaatatttttctcctgatacatagccctttgtttgttgtgtaatagtacatgtaaataaccatggaaagtgactgaattcaatttgtttgttgattgggtcaggttatttactgcacaagccttaactggagcgctgatggaagcaccctcttcagtggttacaccgatggagtcattagagtttggggtattggtcgttactagtaatctcatcacttgtgctgtcgttgctctctgctatctgcttgttggttttatctatcacttatgtttttatcgacaactcatgaagtaccttgaggtttttggaaggatgtttgttttcttgtcaatctaggtttttgcttctttatcttatcgttcgagatcttggtttttagagttacttctcccattttgtggcaaatgattcccattaataatatagcgaaatggtggaatagcggaattctctaaaatttgtaactttatccaatatgacagatgaaccaaatgatttttaacatgtaataaactactgatttgcaacgaactaagaaggttatagacatgaacatactatctttggaaatggacatgaactgccgctattactgctgcttccttcgaccaacgaaatttcgccacatagactggtaaagtcgaacagccgctattactgctgatgtggcatctgtcgtattttaatcactcccgccattgccttttcgcgctaagtttttttttttacttatgcttttttactctagactggaaaaacaaaacaaaaaaggctataaaaagaaaaataaagaagacaaattcgcaagaaccctaaaaagaagaagataagaaatcggaaatgggcatcaaggaccttctcagattcatgaaaccttatatccttcccattcacatccagaaatacgccgggaaacgagtaattttctccgacttgttttcttaatgttctccatttccttctcgattttagtttccgttaatcgttctgggtaaatctccattaaaaatcaagtttttaaatgatgggcttacacatttttgtatgtccaggtgggaatcgatgcttattcatggctacacaaaggaggtaatcttcctgctcttaaatctccagaactgttttatctgttagtaaaccgtgtaattgcaatgaaaccaaacgaataaatatattattgaatatggatatcaattgaagcaatttcgagctgagagtaatctatttactgggtggttttcaaattcatgacttgatggaaaactttttctacagcatactcatgtagtatggagttgtgtttagacactgatgggaagaagaagctgaggtacattgattactttatgcatagagtcaaccttcttcaacactatgagatcattcctgtcgttgttctcgatggtggtaatatgccctgcaaggctgccactggtgatgaacgtcataggcaagtctctctagtttgatttgatcttatttggttcatcctcctttatgaattttttcttttaactaagcttttggtattttgttttgattatcaggaagcgaaaggctaactttgacgctgcaatggtgaagctgaaggaagggaatgtcgcagcagctactgagctttttcaggtgcttacttcttatttcagtggcttcggtctataaaatgtataatagtaactatcactgttaattagcagctacagagcattttcaggtgcttagttcttttcatttcaatggcttagatctttaagttgtgtaagtatttgcctattgagtttctatagctccaggactagtctgtgtttagaaagacattattacacgctgcttttttctgtatgtctttcgtgtcaattttaaaccagttcccaagatccttcagagataatatgttcctcttgaatcttatgtctagtttggcagtcctggtgtgttggtttgtgagtttcgttagtaatttttatcatgtactctgctttattagattttggtcgagactatgatattgtgtgagctcatgcctattttcatcacgattgcagagagcagttagtgtaacatcatccatggctcatcaattgattcaggtataaaattgtttattaaatgagtaccttttcttagggaaatatgaatcatctctagggccctaacaacttctcaggttctgaaatcagaaaacgtcgaatttattgtagctccctatgaggctgatgctcagctagcatacctatccagcctcgaactggaacaaggcgggattgctgctgttataaccgaagacagcgatttacttgcatatggctgcaaagctgtaagatattgttttctcacacaaataaaaaccaagttcatgattagtgttttaagagcattgtatgatatgtttccccaacttctgtatggaaaaaggttatctttaagatggaccgctatggtaaaggagaggaactagttctagataatgtttttcaagctgttgatcaaaagccttccttccagaattttgatcaagagctattcactggttagtatcatagtattgttgaattctcccaaattacagtgatacatttgtgttgctgattgttcttggtttggccttttttcagcaatgtgcgtattggcgggctgtgattttctcccctcggttcctggtgttggtatttcaagagctcatgcattcatctccaagtaccagagtgtagaactcgtaagcatttactttgacaaacccttgtttctcccatcgctaaaagaaaagcctaagacattcaaatgttggaatgatactataggttttgtcatttctcaagacaaaaaaaggcaaactagttcctgatgattattccagctctttcacggaagcagtttcagtttttcagcacgcacgtgtgtaagtaactttggtctcagtcaggtgttgctagactccatggttcgtttcttactttttccctttaattgaatctgttgcagatatgactttgacgctaagaagctcaagcacttgaaacccctctcccacaacctcctgaatttaccagttgaacaacttgagttcctgggaccgtatcctttttcatattctccctcaaatatttcaatcttctcttaataggcaaaagcagagcattcaaccattctaatcacataataagaccagaaaaaaaaaaaaaaaagaactatcacataaaagtccacttgattattttgcagttctgttctctttgacacattaaacttatcagagatctgtcgccatctgttgctgttgcaattgctgaaggtaatgttgatcccataaccatgaaagcttttaaccacttctcggtttctaggaaaccgttgaagacgcctgttcgatcattcaaggaacaggaaaagggaagctcctttttggtatgttctttgtctaaaagtgaggaaataatagagctcaaaaggactgcagatgaagctatgattgatccagaagctattgtgaagaagaagatgtactctaaacaagattcagatctatacaaactgcttgcgcagcctaacagggatcaagtggttacccgacccagcaatccctcacttattccggacaacaacccgttcaagattagaaaaaccgatgaaatcaatctggaaatcgcagaatacggtgtgcaagaactcgctgattcgtttgtgaccaaaagcaaagcagtggacgtggcttcttcttcaccaaactctcacgaacacgaggatcaaaaagagtgtgttacaatcgatctgtccaaacttgatgccgctggaatcaaacaggacagtgagaagaacagagtgaaagaaacatttgaaacaacagaagtagatctagctgaagttcaagatcatgtgaacatgacgacaaagagagtgcgtggaacaaaacctagaaccgagaatttcaaagtgaaaacaagctgtaaaagttcagagaacaacaagactataatcaagaagaaacacagtatattagatttcttccagcgattgtaatctctttaattttggtatgtaatcttttcttagcttctttataactcttaatttatgattatttggagaatatagagacgaacaccatatattattacaaacaactccatatcaaaaagacataaaaaagatacacatatttgtaagccatatagatagagctacatagatagatttagctataaccggactaatagataatgtggtttgatatataataccacattttttgtccgctttggttttttataggtaaaggttcctttcggttttcaaaccaaaaagttccggatttttggcttatttgtagatggtatttgtttactttttgtactagcgtctgcgtgaagcaggttccttttgggcgttgaaatagacagtggccacaggtagaccaagatcgaaatgtccagcgaacattcgtgtgctgaaattggctcgtgatggaggctgctgcaccatcagacccaccggtgagttttgccggaaaagtaccaatatgtaacggtgaatccccactggtggccttggttccatgtatggaagtatctcttttcctgaattttaaaacatggaatatttctcatcgtatactaatataaaataaattaagcaataactgttttcactaggaaacatgtactagtatttttcgtatcgtacaaaactgctatattttttcattgtgctgtttaaggtttcttataatatgacatgtgtaagctatttagttgatatacagcaatgcacacgcacggacacacatgagatgttcggtttcagaagacaccacatgtcgtaagtataagacatagcttgaaacataggaaaattaaatagtgactctaattctatattccttatgtataaatatagtagttaagaactgatctaaactactcggattcatgtttcttaataataatggaatttgttgaattatgtctcgttttataaattttagtgtaggaaagtacttggatatggccagctaaaaaaatataacagaagcagcctattagagagtttaggtatatggtttcggacctgaaatgttctctaagcaagtaatgtttattcttataatattgatttcatcatatctaaccgaaagcaccatgtccaaagataatatgtttaaatgaataattaaaattagtgtatcggatttgtcaattagatctaaacacgtcatgatgggcataattaactattactatattttcttaatgcctttcacactaacgtcactttatttataaattataatgcattaatatacaaagcaataaatctgtttaccgtcgtcaaaaaatatagtaaagagccaaagacaatcctaaagtaaagtcaagtaattgtattcaaaatcgaaaacttagctttaatctttagtattcaattcatacctcttgagggatttgtgcctccgggaatatccacgacaatcctgaaaataagaaatataattaatagtgttttattgcacctttatttatacgttaaattgtttacgttggtgtacaattgcttcactaaaaaaaaaaaaaaaaagagtgcgtaacttggtacgcaccagtggacccattctctcatgttcggctcgcttgggctaggtgcgtccgggtcagtcatcacctgcatgcatcgaaatatttgcattcacatacggccaatgaaattgcaacacatgcaacacgtcggttagctcagataactaattaaacgttatttttgtaatcaaaatttcagctaaaccgtgactaacacatttaattatgtgttagaaactcattgatatttatctatctattttaatataaaaattacgtcaacatctatgtgagtgtaccagtaaatatgtgtaaatagtgcagcacgtctcaaaattcatggaagtctctgcaaagtttggtttttagtatatctaaatgtattaagaaaatagatgttaaattaatagatgcttcaatgtaataatatatatacatgtttaaatttaaacatttcttgaatagagattgtgttcgactgcattgaacctcttagaaatggttttgaagtaatgtatgcatgcatgtttctactataatgatgacggtaaatcatgatgacgaggaagcatgtaaggtatgtgcatatatacacatatatgtttataaatgcataaatggatatagatgtgagaagatgaatatacgagagtgtaaagctcatcggaatggcccgagatgttgacttttggaggattgactgcggtggagggtttgatctcgcagccgttagtgatgtgtttggggccaaagtagacagacatattggcggttgggatgaacatgtccaacacatctccgatcactcttccgaccaccaaaggatcaacagaagccgccatcgatcagcggggagggagatatatatagagagagagagaaacagagaggttcttattttaaaagaatcgttgttttgttttgtcgcatgtccgaattcggatgggcatctatgtcatggtttatataggaaataatttccttacatcaagttttttttttttctgtcgtacatcaagaaatatttaataatagcatcgacaaatacaatgaatttgaagcacgttggcgataatttcctctttcttcgctattcactatttatttccacgttaattattttaatgtttttttcgaattaattattttagtttatgtaaaaataacaataatttagttttcaaacgaaatatctattgcagctgtaaaatgtataagttattaagaagaaatatatatcttcgaaatgtatttcatatatttattttaaataacatgttaatattttttatattagcaataatataaaaaagaaaagataaacgaactattacgatgcgttattttgtcatatataattatatattgtttgctttactgcaaaaattattttgtataaaattttaaatgaataagttcttaaaaataaaaatatatcttcaaaattcattttgtatatagtacatgttagtattttttatagtaacaacaatataaaaagaaaaagataaacaaactattatgatgtgttattttgtcgtatatagtcacgtgttgcatgattagcccgcaaaatttgttttgtataattaaactaaaatcttataagaaaaatattaaagaaaactatgtataatataattataaaattcaaatatttataataaaaaatacataaaaaacaaactattatgtgcgttattttgtcgttaatagtaaaaatttatattcgtgtcgtatgatttatggtcggtcgcatattcatcgtaaagaataagaagcgttataaaataaagtattaaaatattaaagatacttttttttgttgatacattacaatgaaagaatcaaaactaatttttgctttatgttaaaaaaaatgtttaaaacaacagaagaacatgttaagttgcagtcacacctctttttaagcaatttatccggaaaaaaactttaaaattgtcatcgcttcgtctaatttctttagcttcaatgatttgattgaatagatagaccaaaaattatacactacaatgtatcttttatatttgtaacattcatttatcatagaaccatttgtataggttttaaatttaacactgtaaacatgaaatatttatcttcttagaagaagaaaaaagatgccttaagtattatacccatttatagaaaaattaatgttttcggggccatttacaatatagttttggcttggttgtaatgagcgagaggaagaagaaacaaaaggaaaaggttaaaagaaactttggtcggattagtgtaacctataggccatgcataggccatttgaaactcctttgcattcacaattatgatacgtgtcgtgtcttcgtctcagctgttacccacgatcccttttgttcctcgtgccacgtgacatcatttctgccgtcggttaggaggatcatcccttccacgtggactatccttgtggtactcgatcgattggtaaactaattcttactggtggtaactcttgtaaacttttataagttttttttttggaactcatgtacacgtcacatgtgagtataaactttattattatttgcataaaactcaaaaggaaaccgtgaatttcatgccaatttggtttgtttaggttcggatctcaaacaaagtaaataatttgcaacgtccaatcgcgtagaataatcaggaggaacaaaacacgagacgtgagtttccttattaaaagcctaatcaaaggcgtcgaatattttcatctcttcaacaacaatgtatagagtatataagaacaacaagttcattctcatctccatccctcgcataactaataagctatggcaaaaaaactgtaatttggtcattcttctaggggtattattggtattaaccctcttccatgatccgatcattgtcgctgccctcggcggtgagagtaatccggcggtaggactgttcacttttggagactcttactttgacggtggaaacaaaatgtttaatttgtaagcaaatttcaacatcctccccaaagcttttggccgtacgggaaatcccgcgatgaccccaacggcaagttttctgacggccgcatagtccctgactttatcggtacgttacagttacatatttgtacattcctacgtacttatacttttttccaacttattatgcgttctcttctaaaatctactatgcatatcgaccgatccacgatataaaattcaaattggaaacggtagtttatgattgattactaacaatcgttttattgcaaatttattattttgtgatccatgataaagctgaattcatgggcattccggaagagatcccaccagtatttaaaacagccgttgatgttttacgtggagccagttttggcgtcgccgatgcttctattcttggctatccggcaacatccgtacgtaagccagccatcgtccaatttatttcctgtcgattttttgtattagtattttaatcacaaatcgtatatgtatgtagatgacactaaatcagcaagtcgataattttagaagtatgaaatcaaattggatcgacgatttcattggaaggtcactgtttatgatttacattggtaccgaagataaattaaactttaccaagaacaaaccaaatgcagcaagcatttgtcatttccgctattaatcaattgaagtccgacatcaacgtacgttgctgataaatatatatatatatatatatacgataacattagttacataacacgttaattaacaaaacaataccgaaaatttgcttatttttttggacgaaaatttgtttaaaatatttaagctaaaaattaaatttgaattcataattttttttccaactaattctgagataaaaaaaaaattatttaatctatatattaaaatttaatgaaataatatttctaaatatttctaaaaaaatctatcacttaataaagtttaatttttactttttggacaacattttgtttaaaaatatttaagataataattatctttaaaattattagttacatcaaattttaatttatgactttttttgttttaagtttaattttgtttttagttattcttaaattttaatgaggctattttaatacttttatatattaaaattaattgtttaaaaaaagaaaaaaggatagagtatttttcaaatgaaaacccaaaaagaaggaatttttcaaaatttactcttatataattcactatacatatacatactaacatttttaaatttgcagttgttacactctttaaaagcgagtaaattcgcgattcaattgctagctcgttgggttgcttaccaatatcgagacaagaatacaagacagggcaacgagtgttacgagccactcaacgatttagtcaaacaacacaacgagaagattggtccaatgttgaacgaccttgctaaaacaaatcccggacggacgtcacaacactgagaaggcacaatgctcatcttttctttggagctgacgctaacgtcgttcagccaatgacccttcgtgagcttattgtctatcctattaatgagcctatgcgtgagtattggcaaccaatcggctccaccatcacaactgatgggtaaagacgtacgactatactaattataatgttttctcttcttgttctcttgtcttttatttataaataactagataagacccgcctaaataggcgggtgtaagatgtaaatgtaatttttatcgataatatttaaattttgaatagtaaaataatagtcgatacattgttcttataattttgaatagtaaaatagtagtcttatgcattttattttgttatacccattcagtcttattgatgatatttgaagtctaaatagtaacctacacacttttttatattataatttagtatttagaagaaaaaataaatttttatcttatacattcaattttgtaatacaatttaactatctatttcataaaaaactcgattttaattctacacacttcatcttacttgataatgatttcatgtcaaaataatatatatatatatatatatatgagatcaaatctatatcttagttaatattaaaattattaacaattaacaaaacataattcataataataaaacatttgctaataccatatatattaaaaatttgaccaataacatatataattttttttttttgttaattttccttttggttaagaaaaataaaatgtaatattttttagatatagacatatgaattagtatatgttaataatgatttattttttagttttctatttctttaagaagaaaaaagttaattgatttctttttaagtatttctatttctttaagaagaaaaaagttaattattttcttacacatgtcaacatctgattgatagatttgacacgtggcaaaatcgtatgagttagtaactttgaaaaccatactttatataataagatattaaaaattattaacaattaacaaaacataattcataataataaaacatttgttaataccatatatattaaaaatttgaccaataacatatataatttttttttttgttaattttccttttggttaagaaaaataaaatgtaagattttttagatatagaaatatgaattagtatatgttaataatgatttattttttagttttctatttctttaagaagaaaaaagttaattgatttcttttttagtatttctatttctttaagaagaaaaaagttaattattttcttacacatgtcaacatctgatcgatagacttgacatgtggcataatcttatgagttagtaactttgaaaaccatacttcatataataagatttgtcgtttacaataatataagatgcatgcttgttgacaaaagaaagcaagttcgaaatatgttagaatagagctattttaaaggtttcttctggatcgtttgaaatatacaagatcgttcgaaggcacaatgctcatcttttctgtagagatatatcgtttgcaatatacaagattgttaacctaattaagctcatatttgataagttgaagtgttcgacaatcttctttattgtttccattcttgtcttttcttcctttattttattattattttttctatagtgtctaatcttttttctttctttacaacaattctgttccattttattttaggggtttaattagaaaatttggtattttaataattattttttagttgaaatattttaataatgaattaaatgagtactattttataaaatgttgaaaaaataccttagatatatttcccaatatgtatagatataattatatctttatgttctttttggggcaaaaaatctacattttctatactaatcgtttattgctttaattataataaactataaatggttgttatgaaatagtaataacttgttagtttcataataatttaaagttaatatattaaaatatcaaaaattcctatttgttgggaaaaaagacacccccatggcccatagtacgcttcaaaattaaaaacaaggtctccctccctgaaactccaaagtccgaaactaaaacctatcgacgtccgtctcacaactttttacaaatttctcatcgtcttcgttctctgctgctccaccaatgtcgaagaatcatcccgatgaggatgaaacaaacctatcctctgccgtgaacctcaatttataggatgtatctttgaaaaaacattcagaattttttgggcccttttcaatagcattttttttgacaaagcgcaatgttaaatacgaggattggggctaaccttcaccagtttgacgagcttgtgtggattacgtaagcgtacctcgcggtttatgtcgaagaatagttccttagtcacatacatcccttatttggcgtttgcgagtttcttgcaatagtaaattaccgtctcaacggcagagccggtctgtcatgcaaaaatgccttatgaaaataaacaaattgtgtcttttatttgtttgcataatcacaaataataataatatataaaagttatactaaaactttatagaacattttttataacattttataagcgttttgtaagtaaaaaagagggaaaaaaacaaaattatatttttaaatatagctctatttagatttttgcctacaaaactattcatcaaattcacgtaatcgagtttttcaaacattgttgtcttaatggataataaagtcaattcatttctttgattaatcaaaacaattttttttgttatgtaaacaaagttcaaccactttacattagaaagttgaaaaattctttctaatgcccttttcataatgccccttttcaactctacccttttgttttatccattttcatttataccctctttaaatttttaatgaccattttacccctatttaaaaattattttaggttaacaaaataaaatattaatattttttcgtctaaaatattctaaaataaatttcccgccaaaattttcccgcaaaactttttcgaaaaaaaaattcccgccaaatttttttttcaaaaatttctttcccgcatttttttttttggcgggaaatagatttacaagggattttaaaagggttttaaaagatttacaagggattttaaaaggagttttaaaagatttacaagagattttaaaagatttacaagggattttaaaaggtttttaacagatttacaagggattttaaaaggtttttaacagatttacaagggattttaaaagggttttaaaatatttaaaaggaattttaaagggctttaaaagattaacaaaggtttttttaaaatttttaaagggtttaaagtgttttaaaagatttataagggattttaaaaaatttacaaaggttttttaaagggtttaaaagtgttttaaaagatttataaggaattttaaaagatttacaagatatttttaaagggtttaaatgagttttaaaagatgtacaagggtttttaaaagattttcaaagaatttacaagaagatcctttaaaatccattgtaaatcttttaaaaccttttttaaatcccttgtaaatcttttaaaacccttttaaaatatcttgtaaatcttttaaaacccttttaaaatcccttgtaaatttatttctagccaaaaaaaatttacaaggatttttaaaagcattttttcggctgagaaaatatttgttacgaaaaaaaatttggtgggaattttttttttagcgggaaaaaagtttggcggaaatatttttttggcggaaaaaaaaatttttggcgccaaaaaatcggcgggaaaaataattttggcgccaaaaatcggcgggaaaaataaattttggcgccaaaaaattggcggaaaaaattcagtttccaattacatgttcctattagatgagggtaatataatcattttgttcaagggaagggatatttttaaaaatgaacaacataatagggtattgttacaaaatggtagtaaataaatggtagttttacaaatctcccaattttttatttttaatcaaagttttagaatttaacgttttatttttcttaaataaactaaactaaattcattaagaaaacattttattaatttaaagatgttaaagaaagatagtgaatgaaaagcttaacaaaagtaaatatatagaaaatgcctatatttgtttttatttaaaacataaaagaaagtgcctatattccagtgtgctactatacaggtttggctcccaaactcttttttttttttttttttctattccctgcatttctcttggcagtttatttagtgtgtcgtttctgctgttgcctaatatcaggttgattttcaccttcgtgatcgcttcaaactagaatattcagctgagaatgaaactatgatagagagatctgtgctgatacatagagcggtgttgagctctgttgagcgtctttttgccatattgttggaacagtacaaaggaaaattccccttctggcttagtccccgccaggccatagtttgctctgtttcagaggattatcgttcctacgcagacaaggttatacattcatgactgtactcttaacgagtttacttgcagagtcttattatatctctcttcctaatttcctttgtttgcgtatattcaaacaggtgagagatcaaattcacgaagctggctactatgttgatgttgacacaacggatagaaacgtcagtgacaaggtaactgttacaaggtccctgagcacaaaccattgaggtttatgttcccgtatacattttgaatgatgattgtggttgtgagtaggtgcaagaagctcaggttgcacactacaactacatactagtcgtgggtgatgaagaggctagaacgggacaggttagaatccagttttgctcattccattaaatgtctgtgcatcaagcctctctcacaaacatggtttttgttgtcaggtgactgtttggcttagagacgaaatgatgagcatcgagactctgtcggatgaattcaaattgaagacggccaactttctttgagacccttttatttgtgtctagtgatcataagaacgtggatatttggaaaatatgtttctattaagaattcacaaaccattttgacaattaaaaccaaaaaagacaatctatatttatatttaaacactcttaattagcgaaaccaaaaccctaacaaaaccaggtaataataatagaagacattttttaacactgaggaagatcatgaggaggaggaagcagagtttgtgaaggaagaggtccatctttgacgataaaccccattgctaaaccccacgaagtatgttgttctagatgacagtgaataaaccaaactcctggattatccgcatttatcctaatcgccgcccatcctcccgtcggcactgcaaaagtattcctctccggcggatccaccaagttgtaccttttcggatccttctccgggtcaaaattcccaaatcctcttcccactacgaagaaattgtgtccgtgtacatgtaaaggatgattctcgatgtttaagaaactcgttccctgaaacacgatctctaatctcgatccgaattcgacttcgaaaagcttcgtaccgaattctgtgttcatgttttccgataccggatctactcccgtgaaatcgaatctgttcggtggtttctctgggaaatcgagtgagaaaactcctttgctctgtttcttatagtagctttcgaggatcgatatcggaggtctgacaaatgagatgttgttcattgatgcgaagaatctcttccctgcgtaaccgtcgcaggtctgatttaacggacaatcctggagattgagacttatcgtggtgatcactcgcttgtctatcttcgtcgggactttacatggatacttcgctgatcccagacttttgatgctatcggagaatttcgtcgcgaatttcgtatccagcatattcgggagagctacgactgtcgacattgccgttaatcgccgtctccgccgtgtgtttacggaattttccggtttggttttaccggtgtaacggatgaatcctacggtggttgagttgttgaaaggaaagacggaagtgacgtaaggagttgcggcgatgagaaattcaccgccggagagttggtcggcgcggagaagaagggtggtggtttgaccgggagcgatcatgattgctttggtatgaaccggtttggtgtaaaccgcgtcgacttcgactacagttagcgtgtgattcgctacagcgacgaagagctcgttgtttagagctgcattgattatgcggaggatgtaggtttttccggcgtctacggtcgccgtgaaagtatctgcagacgatcataatcagtgagaaacgaaccaaattgggccggaattgaatcgatccggtttggaacttaaatcatcggttaagcgaaataaactggacctttggtagaacatggataaagtgggccgggaagcccgttaagggtgtaagcgtcggaaactttagccccagctccggtcttcatcatcgctttctcaacattgtccacgtcatcattccaccattcacctacataatccaatttcacatattctattcaatctacatcgtgcaattaaaactagttaaaaatgatataagcactttttgtcactggcttggtgtttttttacatatggaggagttgaaccagcttagttttaagatcgcataatcgtgattctaaatttcgtatacatatatgtttgaagggaaatgaaaaaaaaaagaaaagaaagaaaagaagttatattttttaccaagtataatgggaatttcggattggatatggctgccggaaaagggataaggctgccgcggatagatgatgaaagcgccgtagacggaggctcgttgccatgagtgatgagcatgccaaaggagtgtgcctctttgatcctccactttgaatctatatgtatatgattgtttcgatcttatcggacattgcgttatgtaagccggtccatcagcccaaccggtccggtattgccttaacccatgcctgctcacaaacccccaaaaatataaaaacgataaataaactcacagaaagaactaaaacaagatgttaaaagtggttgaattatgcatgcacgagtgttaccaatgaatagttgtattgtgagcaatccggttagtcactttgatttctacgatgtcaccttcgtgtactgccacggtcggtcctggatattgtccgttcaccgttagaagttgtttggtgtggcacaatcgagttaccttcttccattcgacctaaaaccccaagaaacaaaaaaacgtttactatatatcacattgatgaaaatgttactattacatgagcgtaatataactaccacgttaagaaactgtatgtactataattgataaagatgttcttttataagcgatacaaatcttgaataaatgctgtatgagttttccaaatctttagtataatcatatcagtaacatgaaattgaatctgcctaaatttgcttacattaaagtgaaatcgacgagtggttgaagccgaagaataagggagaagagttgtaaatagaagcaaaaaggtcgaaattattagaaaccctaaattttccatttctttatagaagactgatatcttctttcttttacttagctatgattattgatcaagtttgatattgtgaaggctcctttatatagcatcatcatgggtttcatttctagtttaaactttattattatacataattctgttaaagtacctatattatttaaagttttaagaaaccccattgagatgatcccaaaaaaatgtcctgcaagaaaagaaaaaaaaggagacaaattattactggtgagttttcttacataattggattggtaggtgagtgtaccacgtacgaaaaagtgagttattttgaagatttcaaatctctcatatatatatatactcatgatctcaaatggatacaatcagcatgcttctaaattatatagcatcactaaaatggttacctgctagtatatgtcattgagtactcataactcattaactaagtactcaattttatttaactaagtaactcgtaactcataactttaaataataataataaattactcgattttttgtatttattaaatttgaacatctgtagtttttttttcgtttcgtctatatcaacatctttcgttttatatgaatctatatatctgctacggcctacgatttagttatttcccccatgatccctagctaaaaccacgtgacttcctgaaacatcaccaattgctcatacagtatgagtcatactcatcatatatacaaaagctaaatcccctcttgttttttttttatatatgtatactttctttctataattctatcttccagttctcttctctacctatctcatatctcatctacttcagcttttcatccagtcaatatctcttttcaccaaacttcccccgatttaaatgtatccctctcgtatcaaacaacttgctcatttatatatatatatatatatataaacacctcaattcctccttttgttatttgagtctgtttgatagttgattaagatgactttatataaggtttgatatcttagttatggtcttcgacgaaatatgtatttgttctaatgaaaatgtatagcactaacaaatcaaatacaaaatgtatatatattcaatcaccaactatataattcgatatttctcggttaattaagaaaatttgaatagaattaaaattaaattaaaaatgaattgaatagaactgaggataatttagttcatgttccaacattgtaattctcaactatgaactcttgaatggttaaaaagtaatatcatttttcgatatatgtatttgtttaacaataagtggaacatgatctaattattcacggttgataatccttctgaaaaagaaacacatgcatgtaaaattggttacgtaaaaagttatgtgtactttagtagatatttattcaggatttgtggggtaaatttaactttcacatgaaaaacgtgtatgatatatatgtccaaattaatgtccttttcttttttaacgttttctgttgtgattaagaagtgtttacaaagtcggaaaataaacccaaaattcccttatattataattgggttcaagcgtcatctgcaaacaattttttattaaaagaatttgttagagtttccgtttggtgcattatggttaccatatatataaaaaattcacattatctgtttctgtaacaataaagtatgggacgaaagtatataatctcttcttaaaccagagatcaaaacatgttgtttatataaatggaattataggctttgtagttaattccgcttattaaatcttcgtactgataatatggaaatttgaagtccacattagtgatatatagatgtatgatggaatacttttaaaaagtcttatattaggaaaatcattgaaactttatggtcgataaagtgatgtgatctgtgcatgggttggtgcgagccatcgaagagaacaaataataggacgaaattgcaaactgttttaaacctgataaaaaatatatgaattacatactacaaatgcaagtctcctttttcattcgtaaatagaacacaactcataaactgatgctttgcaaaaatttaacatggatttaaaatgcaaaatgattcctatgaaaacaaaaagaaaatgtgtgagctccaatgatatagaggagtcgaaaataaaactataaatggatgtgaatcttcagcatgtttaagaccacaaaccgttttatgagaacaaaaaatatgtagtttgaaccgattttcttttcactggcgattagaaaagacttgtaatataacttttcttcggacattttaacttccaattttattagtcaagagttttgtgacaatcttcctttacgatcctatagtttacatgaaaccaactttttctttaatttatatttgtagtggtcataatttgaagtcaaattccaaagtttggcggcatgatccattagtataatgttagttttttttcacttttaaacatgcacaaattcaattagtatttctactaaataatgtaaaaacagtgtagcctaattgctttaaccaatctggcgtctgtggactttgttcgccatatatacatcaactttttgcagtttctttttcttatcgagactgtagtttggagttggtgagtaagctccctggagctcactttactcgaccataccattatttctgacctctttttcaaaaacccgattttgttcattttttttcttcttctttttgtcgttttatttattttattttgtcgttatgagattagtccaagaatggtatcaattcagatggaccatggaatataaataatagatattaggttagtcttcgtcattaaaaagccaactaacacagcattattattatgtgtgctaattttttagtcttatcttttttacttttaagaagtcgagtatgttcttcaggttaatataatttattatataagacccaatatcccggtttgacctggaccggatcataccaatcacacaaactctcccaaagtactgaagcaaagtgaatactgaatagtatataaataatttcaaaatatgagtgtttaaagaaaagagagaaacaaaaaaattacatggagatcgatgtttttatttaaagtttcatcaaacccccaaaactattaaatacaacaaatcaaacccaaccacgaagatagatgtggatgaatggagaaaccaatttcttttcaccagaaaactttcgtgaaaaaagaaaagaaaagaaaaaaaataactaaatcatttttaagaattgtgaagagaagcaactttatcagtaagctctgcaactgtttcattatcttcttcctcagctatggtatcctgcaaacaaagagaaaagaacaacagtaagcaaacttcatcgtcatgttccttttcaagatcttctgtttttctttctttctttctttactaactaacctctttgtcagttttagattggacaccaatgcatttagaaccgctgatgcttgcactcttcatgaggttacgagcactgtaacctcctccattgtctgcttcctcggattccaaggttgaagccacagcagctgctgctcttctctcaacatcactgctttcttctgcagtttcaccatttggagcaggaactctctctctgcaacatcatcatagagaagcacaatgctctcagagggagattgagaagagaagagaagagatagagagattctgtgaaagacattaccttggcaaggaagcatgatgtctgtgaagtgcagtacttcttcctcctcctgctgctcctggtttaccttgattttcttcaagatgagcaaattgccttttaaatcggtctaccccactgcgcgtaaacaacaaaaagatttatcgagttcataactttctgttttcaagacttatagtttctgttaactgttaattagctaaccttgggtacataaagctaagctgatcaccaccacgaaggtattcctccaacatctgaggatgatattccaatatctgatatttacaaaatccaaagaaaagtgattgttaggatcaatgaataacattgaaacaaattcagattaaagaaaaggatatatgtagaaggcttttgtgtttgtttgttacctctcggtaaattaattctctgacatcatctttaactaacttctttctctcaaagtcaaattcaagctttgaaattggctgtgttgttggttcacgctctgaatttgacaaaccactgaaatatggatcagctagtgcctgtaatatgaaaatcaaaaacgacgaatataagagtttcgttctgtataaaacaaaagggaaaagtaaagcaaatttacttctcacttacatcttcagctgatgcacgatctttcggatcaaaggcaagcaggcgttccagaaggcggagagccaaaggatcagctttagggaatttatgagagaaagggactggttgttttttcctcatgctgctaagatatctcctcgccttttcatttctaatctgtagaagtccaagattgcaaagctcattacaaggattaaattactctcaatgatgtatggaacattaaatttgctacagaaaatatgaacaagtgttttgagtgactaacccttgatattgactcaggaggtggagtaccaagaaagtcagtcattagatccaattggtgcacaacgtttttcccgggaaacaaaggcttacccaaaagcatttccgcaaaaatgcaaccgacactccagatatcaatcgcaggggtatactgaaatataacaagagtagacttagcttgagatggctggtcttctcaacaacactatagaaccacacaacaatattctacaaaatagaaaactagaagcattttcctggtagggagaaatagcaagagtagttgggtttggtgaaaaagaatcttactttggagaaaaacgatccacagagttcaggggcacgataccaccgagtagctacataatcctacaaaatccatataaacgaaatgagctcacaagcatttgaaaatagttaagaggaagcctaatgaacagttttgctttcacattgagttagatgactcacagtccaaaatatagcggttggggcatcgttaaaagaaacgcgagccagcccaaaatcacagatcttcaatttgcaatcagcattagctagaatgttcttcggtttcaaatcccgatgaaacacattagctgaaaacagagaacccttaagtgtttcaatattatctataacaaaaatcatgaggatcgaaagagaccaatgtgtaaaaccagaaactaacctgcgtgaacatatttcagaccacgaagaagctggtacaagaaaaactgataatgctcaggagtcaaatcatcattcgccttgatcacttgatgaagatcagattccatcaactcaaagacaacataaatatcgcggaattctctgcgagaaggaggtaacatgatgtgtttaatctccacaacatcaggatgacgaagcaaccgaagcaatttgatctctctgagaatcctagtagcatcggagacatgctcaaacacatcgttgatcttcttgatcgcaactctctctccagtgtgtgagtcaacagcagaagccacaacaccataacttcctttgccaacaacctcttgaatctgatacctgttagcttctccatactccgtgaagaattcagtttcaccctgaagaattttattcatgattcatacttaaaattgaccaaaatgatggatcaagacaataagatcaatcaaacgaaacacaaaactgaaactttatccttttgtggaagcaaatgcaataacacagaacattaagagaacaaaacaagtctcttcaatctcaatcaaaagacaacatctaagagcaaatagcataaaagggtagagaaggagaagaagaaaggtaccttcttgtgaggatccataggtaaatgattacgtttaggaacgttaataagcgttagaccagagaaatcgagatcttcttcaataataagctctccagagttagcggaatgattggggttagaggaagaagagaaagaagaagaattgaaaatgggttgttcgtgattattattattattgttggaagaagaagaagaagaagaagaagaaggtcgctgaaaaagccatcgacgaacaccgtcgacgagattcccaccaccacccatagaccactactagattagaaaagaaaaagattagtaatttacaaaattgggtatccgaaattccttgagagccaaacaattaccgtcaagtcaccgtctttctcgccgcgtctctcggttttgtccttcggagttggagaccatgttcttctcctattttttcattttttttttaattttctttttatgtttttttcattatttatgctcagatatttatttttttcccctgcttgattattagagagagtgagtggagggagaagaacaaaatatttaaacctttggaatatttcgacgacccggtttgtctataccggttaatgataacctgattcgggcatatgcatttattgagtatatgggcctacaaagcggcccatacaataaatgtattttcgttcaatcactaaacggattaaactcaaccggacaaggttcgaaattaagaagatgttagatgttacattacaaaccggaattaaaagtctaattatgaatctgagacacaaaaaaagagagagtaaaaacgccttgctcgttcggtcgcgttgatgatatgaacatatatttcatcatgagctgagcaggtccaggagtctgttgcggttcgagcacatcatagttattgggtcataaatgaatccgacagtagcgtaatctaagcattttttagtgaataatacgcttgatgatatatgtgatatgtcatgggaggataatgcataaggtggtgagcgaagcattttttcagccaaaaagacaaaattttatttgaataaatgatatcaaacaaatccagatacgcgaaggaatattgaatatggaaagcacgatcgtaaacaattctgcgatttatcatttcttattttttttaacaaaatgtacggttttgcatgatatatttgcattaaaaatgaattggtaagtttttaaatagctctatatttgcattaagctttgactgattgtacaaaaaatagagtaattttttaattacagtagcaaaaaaaagcaaaacaaaattcaattctctccagctcaaaaatccactcttcatcctctactatactcgtatctatctatctactctactctgttttacgtaagttttttttagttgattttcttttgtcggactttaagagagagaaagtggcgtctttgtggactttctcaattcaggagagagtcaaagagaaggaagaggcttcgcttacttgctgagaaaaaagctccaaactttctcttattgggtttttgatcagctccggagataaaaaaaaaaagtattttcttgaaatcgaaatctgatctccattgagagtcttgctacttgatttggattccgatttaaggttttctcgagaattcttttgctgcagttattagattttgacgagccgttgatctggacggagttccagatctccgggtcgtggtaccaaggaattagggttttagcacaaagttctcgtttttctgtgtattcgagggatgaaggagttttcgggtcgatgttcgctgctctaacatttggagtatgaagatgaacatgaagaaatttctcaaaaagcttcgtatcacgcccaatcaacgagacgatggtgaaggttcagtctctaacagaagcaataagtctagtgatgcagaaccatctccttctgattcattgaggtctcaagataactctgaattcaaaccctttttgggtttatcaaattggttaagctctgttactcacaggaaaagcccttcttcttccaatgccaccaatagcaaagaggatgacactaccatggaacatggtggtcccgttgggtcggaatctgggatgcagggtttgggttctagtagtaattccaaggatccagaagttgaagaagaatatcagatacagttggctctagagttaagtgctagggaggatcctgaagctgctcagattgaggctatgaagcagttcagcttaggttctcgtccttctgctcccgagaatactccagctgaactcatggcatatagatattgggtgagtttttaactcattgctagacatagaaacaaatttccaattcacttaagcgacaatagactatgcttgaaacaaaatgtgttaagttgattataagtttataactcttttctgtctcttctaaccaattttacatcatctggaattttgcagaattataactgtcttggctatgatgacaagattgtggatggtttctatgacctgtgtggagtaatgaatgaatcttccttaaaaagaatacctcccttagttgatcttcaggggacacttgtgtcagatggtgtaacttgggatgctgttctagtgaacagcagcaaagattctaatctgttgagacttgaacaaatggctcttgatattgcagcaaaatcaaagtcagcgtcttcttcagggtttgtgaacagtgaattggtaaggcaactggcagttttagttgctgattacatgggtggaccagttttggatccagatagcacgttaagagcttggtggagtctgagctacagcttgaaagcaaccctccgtagcatggttctgcccctgggttctctaactattggattggctcgtcatcgtgccttgttattcaaagtatgtaccatgccctcattcacttttgctttctgtgaaaattagcataagaggggtattttttgtgatcgcatgactgttaaagcttcttgcagtttggtgaatgtttgaaattgtgttcaaaattgcccctgtttctctgactatatttattacatacaaagcgtatggcacctctaaacgctttgtggtgttttgtttcttctttcttatgagactttgtaggttttgtgtgatagtgtcggcgttccttgtcgaatagtcaaaggacagcaatataccggttcagatgatgtggcaatgaactccattaagactgatgatggcaggtgactttcaaattaaattcaatcgctgtgtaattttaacaatttctctatcatttggagagaaaatatatatatatattgtcaccaaatgtgtgcgtgtaaaaaatgaaactatgtgcatatggacttggggtgtgtgtgctatttatagctaactcacatctctgaaaaggttagagcaaatactgaggcttgataaaagtgtaactttctttggtctaagcaacaatactctttagaaatgaaagtacgattaagcatgtttcatgctttgtacagtggttctttctattgttattgcagtctgcagttgcaaattattttccttaacgaatccaaatgtgaatttcagggagtacattgttgatctcatgggagatccaggcacgcttatccccgctgatgcagctggactacaaatggactttgatgattctgtctactctgccagtcccagagatgttgattcatctcatgtagcttcttccagcagtggggtcgagagctcaattgaagaacacacagaatcttggtcagcggaacatcgttctaggaccaagggttcccgggaggaaaaccaatctgcaggtggaggggatctcatgattccaaatattagggaagctgtgggaagtcaaaaggctcctgttcaacatctttccagcaagcctactcattctttcactcatgccagatcaccttcgtggactgaaggtgttagctctccagctggacgcaggatgaaagtcaaagatgtttcacaatatatgattgatgctgccaaagagaatccacaactagctcagaagcttcatgatgtgttacttgaaagtggagttgtagctcctcgaaatttattttcggaagtctattcagagtcaatggaggcaacaggtgaaatcaaatctgtggctgaatccaatgatgagaaagggaaagattttggaacaatccagcaaggaagaaaccagagcaaccttggccctgtgaggtttttgcctcctcttccaagaccgcaatctaaagcaattacccatgacctacgtgaacattcaggatctggactcggtcatttgtctgaacattgcaatattgatggtcactctgattcctcacattctgaaacatctactgactatcccagaaatgttcctgttgccgtagctgcagcggctgttgttgcgtcttccatggttgttgctgccgccaagtcagcaaactcggattcctccactttagaactttctgctgcagctgctgctgcagttatggcgacagctgcagcagtgagcaggcagtttgaactagattcacttagcaacggggatgctggttctggtgggcttcatggggtagattcaggaggagaacgaatatccgacagatctattggcaatgaaagttcaaaatctgatgctgcaattgatgatgtagctgaatgcgagattttgtgggaggaaattactgtggctgagcgtatcggactgggtatatgctctactatatgctttagtgtaactagtgccacaacagtaagtactttatatttatgtcttttgatgcaggatcatacggagaggtatataggggagattggcatggaactgtgagtatctcatatttctttagcttttactaattagctgacgacaagagaaacaatgtaaatttggttattattttcaatatcaatgaaactcttgatttggtaggcagtggctgtcaagaagttcattgaccaagatattactggagaggcactggaggaattcagaagtgaggtataagcctttcattctctggaaattcttgtaccctttcaagtttcacaattcgtaacatctcatttcaatttgatgcaaggtccggatgatgagaaggctcagacaccctaatattgttctcttcatgggagctgtaacccgcccaccaaatctctcaattgttacagaatttcttcctcggtatgctatgatccttttcatgatttaattgttttgacgctctatatgatttgcatatctttgatgataactaccatccattatatgattttcacgctaaacgctttatgttccatccattagtgagcagagctcagactcgtcagtctcatttctgtgtttattaacctttttttttttgcttgcgcagaggtagcttgtataggttaattcacaggcctaataaccaattagatgagcgaaagcgtctgaggatggctcttgatgctgtactattactcttttctctttcgctccttctttacctctactacgtatttgtatcttctagattgtttcttacaaaaaaaaattcaaccgttgtaggctcgtggaatgaattatttacacagctgtaatccggtaattgtccatcgtgatcttaaatctccaaaccttctagttgacaaaaattgggttgtcaaggtcagtaattcttccactcggatttcattttctctcctatgatatctctaatggcttacatatttctcaggtgtgcgattttgggttgtctagaatgaaagtaagcacatacctctcttcaaagtcaacagcaggcacggtaagctactagaagaaattcactgttctccactaggacagttaatgtcaactaaaacaatcctgtagattccagatttactttcctctcgtaatttcatcataattacaccgtcaattatcatcagaaactacctcatatcttactttccagttgattgatctaagcatgagacttgattttgtgtttgctcatttcaggctgaatggatggctccagaagtgcttagaaacgaacccgcagatgagaagtatggtttttctaaagaaaaatagttttatcgtattatattttcccatgtaacgttcccttttaagaacgaggtacataatgtgaaaacaggtgtgatgtgtacagctacggggtcattctctgggaactctttacgttacagcaaccatggggaaaaatgaacccaatgcaagtggttggcgcggttggttttcaacatcgacgacttgatatccctgaatttgtggatcctggaattgcagatatcatcaggaaatgttggcagacgtaagtttgaaaagtcacttaattgttgtatgatgaatctagctctattgttttgttcatgaattaggtgcggttatttggtagggatccaaggttaagaccaagttttggagagatcatggattctttaaagcagctacagaaacctatccagagagcagcagttcccagttcttctgcattgaccactgatgagcaggaacaataacatcatgcttgatgaagaagatgactaaatgatgatgaaggtggggatcattctttacatattaatgttctgtggtgtgctgtccatgtgtattcaccatgttttgtttacaaattgtaaaaaaagatgaatgcaaaacaaaacaaacaaagaaaaaaagaaaaaagaagttattttgtcaatggtaaaaaaatcattgagaattgaaatttcatatctcttatatacgaaattcaaagtaaattgttcatataccctcaataactaattcactgtttatctattttatcttggcgcgagtttatcatttctgttaattatgattatttcgttactaacaataaccaaatactgtaaatcgaataaattcgttcgccttctttcttgaaacatgatcatcactcgatcaggatagcgtttaaaaaggaaccaaaaataataattagagcctgaaaatggcgaatctgttcactgctacggctcctttcctctcactctcgaagccattcaccaaaacggcatcgtaccaccagtgttacgcctcttcttccaatccgccggagcctgagtcttcttctcctcctcctcctccgcctccgcctcaaccgctggcatcgcaacagaagaggaagaagaacgttgagacgacggattgggtcgcttcttccttgacccggcggtttggaatcggcgcgggtcttgcctgggcgggctttctggctttcggtgtaatctccgagcagatcaagactcggattgaggtttctcaggaagtagctaacaccaggttttaatatttcacatgtcgttacaaaatttcgcatttttgaagaactttcaataccgaataggcgattacaaagaaatagtttttggatttcataatcataagttatctgaagactagagttgattattttgttgggtttgcagagatgtagaagaagagaaagagattgtgttgcccaacggcataaggtacaatttccccattaacactagagcacaaatgttgaatgatttcatccgtggataaagtttaattacctgcttactagttctttaaacaaagctctgttactgaaaaatgagatatgagcctgcttcatccataataattagttaattaccacgtatgttttctctgtggccatttttagtatatgagcttattaagccattgaaactattgatgtagcaatgtgtctcctttcctatgatgtactgaagaaagaatatccgacattgataacaaaacagacagctcttgcatcagtaactgatgcatggaatcggaccgtgcaggtactatgatcaacgggttggaggaggagcaacaccaagagcaggagacttggtagtgattgatctaaaggggcaagtgcaaggaaccggacaagtattcgtggatacatttggaaccaaagacaagaagaagatgaagccattggcacttgtggtgggttcaaaaccatatagcaaaggattatgtgaaggcatagattatgtactaaggtccatgaaggctggaggtaaacgcagagtgattgttccaccatcgttaggatttggtgtagacggtgctgaattggaatcgggtttgcagattcctcctaatgcttcgttggaatatatagttgagattgatagagtctcaattgcaccagcttgagttgttgtacgtacagctttggtttcattcccaaatccttcaaatatttggttgtataagtatgagtggaaaacaaagtgtaaatttttgtttcttttggggtcgatgtgattgaaccgagataaaccggatcaaaatcttcggtttgatttatttatttatttaaatagatataaaattacgtaaatgtatttctgtggttatacgtactgtatttactatttacgactttgatgaagtcttagccaaaattgcgaagataattattttattcgctggatctctctgtgaacgaggaaaggatcacgacacttgtcaattaacattgtttattctttttttccggcggaagcgaattgttggttgctgtagagagaattgattggccggagagaatggtgaaagtaatcgattcccattacctagccatcaccgccattgtcaccgtaagtctgtcttttctggtgcaatcgtttcgttttgtgtttctcgaaaaatcacgagttgggtcttttctgatttagcgtttttttttgtgtgtgtaggtgggttatcaattcatattcttcgtaatcacagctcttttcaaatttgatcaagttactgactttgccggtacgttgatctatctaatttggaaatgctaatgttaatccttttgagtgattcgttattcttctttcgattgcgatcacaaatgttatagacttttcatttctgctaacatgcatgtgactaaaaatgttggcaggaagtacaaatttcgtgatacttgctgtattgactctgcttctcaaagggacatggcattatcgtcaggtaataagatctctctctctcaatgagtttctctgtgtgattctgtataattgactcagctctttaacctcccagatagtcttgactgtgctagtagtcgtatggggacttcgtctgggactgttcctccttatgaggtttgcaccatgacaccgcttcaaatcgatatgcatttgcaaaagttaatgattttctggtcatgtctgatgtattttttgcatcctaactttgagtaggatcttgcaatggggtgaagatcgacgctttgatgacatgcgtgaaaatattgggaaactagtagtcttttggatttttcaggttagctacaaactttatattttcatctttagaagagagagaaggaagtagctcagctaagttggattcttgtgatctaacaccatgtgggttcttgttctttttttccctatcaggccgtgtgggtttggactgttagtttacctgttacctttgttaatgcaagcaacggtggaagattgtttcagcccgcagatgttatcggttggacaatgtgggttgcagggttcttgattgaagctacagctgatcaacaaaagctttcgttcaagaagtgtccagaaaacaaaggaaaatggtgtgatgttggtgtatggaagtattcacgccatccaaactactttggtgaggttagtatcgctacgagaaacttttgtcgatatacatattgggtttgttgtatgaactagaagaagctcccaaagaaaacaaattgatgggcgtgattatgaattcagatgttactctggtggggcttatatgtggcttcattgcctgtgcttaaaggtctcgagtaccttgtcataattggaccagtctttctcactttgctacttctcttcgttagcggcataccattactcgaggttctctctatctctcctctctgtttccgctcttgtatattataaatcacacagcagaaacaacattcttgttgtgtataaatgcaggaatctgcggacaaaaagtatggtaacttgggagcttatcgacactacaagaagacaactaggtatgatacaaagctctttgaacaccgttattggccctcgagatgtgtaataagggctaagtgtttccctcttgtcaattggatattggtttacagtcctctgattctcttaccgcgaggagtgtatgggtacttaccaatatggtgcaaatcagtctttctctttgagtttccattgtacagccgtaatcttcctcaagagactacagcttggtgagccttctgtataatgcatcatttatttggcttcaatctctttgtaaatcgcacaatgtttttgttacgataacttatgagttatttctacgtgcaagggatagacgaaactcgaagaagagccagagaagcattgactgagagagagaaagagagtagattgtcactgattttgcaaacccgtctcctagttcttccttaatattcaaactctctttttgtatagattcttgtttgtctttgggtacttgttaaagataattgctacattgattgagaatacaataagattcaaaccaagcttcaaaaaaaatgttggaaggaaaattacatatgaatcaaaagaaacattctctaaggaaaaggctattgaagtgaactgttactgaagttctctaaggaaatcactgcacctgatctaagttcacctgaagaagaagcatcggaatgagagagtaggatgtataatacccatagatgaaggcaaaccagatagaccacagcccatatcttggcagtcgggtttctacgcaagaagacggttcccgagatgaatatagcgtttagttgcatcacaagccatcccaaatgtttcttgcctgaccggattttatcttggaaagctggtttaaactttgatcccgagagttcccaatctcctgcttcaagatcttgggatgaggcttcagttgcagacatacctttgttttcttctataagccttgacacggcctggcaaataaatcaaaattggattgtgtgtatgtgaagaacatatttttgttttgggagcaggttggtgggatccatcaacgtacctcgattctaaacaatatggttgctttctctgaggaaagcgcctcgacctggtaaatttggcaagaaaattcggaacttattctagcaaccatatcgtttagatgtctaaatgtctctatcgcaagtgttgatctacctgggattgtttttgaataagatggtcagttagctggttcagtcttcgtttcagttcaatttccacttcagttggttcttcgagttcctttctcatcatttctatgtctgcttccagtttagttgcctgaaatttcacaaggaatcaaacaaaaaatggaatcttgaagaaaagacaatagcataagtcaaccagataggaacaatcattccataagggaacctgaagcataattcaaccagacaactatgttagctaaccttatcttgtaaccgcccgattttatcagtcagcaaagaaatctctgcttcaagcatctggtgttcgaatttgtctcctctagaagtatctaactatacagcccacatatcagcagcatgattctcagaccaaatagacaaagatttccacattgagattgaagaaaaagaaacagaaagaaaagaagacccaagtcacctgttttaaagttgttccccttcccccaatattaaaagtatttcgcttcagttctacatgatgaagacaacttcttcagcaaaatagagaagtgattatccccaaatgactatttgcagtaaaaaaagtcatttgaattaatgtttttaagctctgtataatttctcaaagaaggaacctataccttccagagtagactctttaagctcaacttgttgtttgagtactgctacttgatctatctggtcacatcagaaagatagaaattagtacgcaaatgcagatatagaagttggttctaaaaccttgactcagcaacattaattaggtattgatcaaaacatccttagactcagaagatctacatctttcagtaagaacaatggtcattaacttttaccttcattatttccagctaatttaaacaaaccaagaaacaaaataaatagattatgtgatctttatacctgagtctcaagtttcttctgcccagcggcaagtgatcttgtaagttcagcgttttcagcctaaaacattcaatttttatgtttacatcaaaaaatcatatcatcttgctccaatgtaaggtaataataagagcaatttgaactgtcggcaaacaaattaaacggttaatacctctaatccggccaagcgtgtgagaacttccattcttgtattgttatgtttctgcttttcaaggtcagcagcttccagtgtttccatcatgtttgtttgcaactccgcagcctaaaggaatgaggacaaacccagattatatagttcatctagcttgagtaatacatatataaaatgatataataggtgtttgcaacagcttctacaacttggacatattgctacctcttgtgcttgttgtttagctcgttcttcgactattttctctaaactcaatttctcaccctcaagtcttgctaccatattctctcgctctttgatgaccgctacagcttttgttgcaactttttcagcaaaaactctctctcttctcctcctacgctcctccctctgacgctctctctcagagtcagtgctcgaatcagactcataatcggattcagattcatcacttgacaaggaagattccttcctcgttagaccatcagaaacattgctctgtgagacttcttccctcacctgctttccccatacagaacttcttctggactcacgaccatccctttttcctacacttggtgatgtttccctagggagagtctcattagccgatcttctggagtcatccaggggaggtgtcttaccactgacatccttctcactctctttatgagttgagttcacaaatatatcccgaggagcattcctatttttcatgtcagcatcagaagggctagacacttccttgtcgcttggttccttattcgtctgtttttgtggcctccctctggaattaaccacattactactactactcttctttccatcagataccaaaggatttttccccaaattcccatgtctttttccatccttcttcaatccccgaatcgcagatgttccaccaggactacgagacgtagaagtgctggtcctctgatttggagtactcagaagttctgtccaatcattgtcagtgagtttagtattatcttgtgtcaaactttgtgacggtgcacttgtcctttcgtgtgattgatctggtttgcgtacttttttgctgctacttaagtagctaggcttttgctctgttgagtttctctgagatccactaccagagtcactaccttcatatgtcttcttcctcaactgatctttcaaagaaacaggactacttccagattttggagaggtctcaaacacctcgtcatgggtctctgacttctcatctttccgaagagaatctgctgcctgctgatcaagctgaaaagcaaagtttacataatccccaattagcacaaattttgtggtacgagctcaactacaaattcgacaagaacacaagactctgaaatagttagtataagcagaaatcagtgcaatgcaatgacccagatggtgtaacaataacattgccaaatgatttagattagtccaagcttgaatcacatcacatcaatttcccggaaactaagacaccaatccggtgatcaacggaggaattaagagtcccaaagcaaaccatggaggtcgaaattaagctagagcccagcgaattccaaatccagtatttttcatccgttttcgatgcaaacaaaaatgagattcgacatctctcttacctgttgaagaattgtttcggcggctttgagcttcgacgagatccaattcgccattttgcttcactgctctttaggaaagtgatgagactaaagaaccatacgacaccgttttttatcacccagagtgatttctgaattgcactcgcatcagaaaaaaacgaagaagacgaagatgaatcaattgttacagtgacgtgttggtgtcgtagtttatttagcaaacgccgaaagagactccacaactaactcagccgaatccggttttatttttcggtttacatattcatttgtctttggttcattacatattcaataatccaaaccaaaaccaaaaacttggattaaaacacttttttttttcaaccgatataaactagaactcaaatgagccaatcccgtggattaaaacactttatagtttaccatttgtgatttttgtaagtaaatgcagtgccgacttaaatataaggataaatagtacgatagccttatatttgggtaattttttttttgtatatataaaggaagcataattttttttttggcgtttttttatatataaaagagacaggaaaaatgatatatacaaaattatatatgcaaaagagccctacaagaaattttaaaaataccacttgtgattatttatttttaaaatttatcgtagggcacaagaaatatatgagcaggaacatataagacaaatccagaaaagccaacagttacaaaattacatcatcgcagaattcaaaatataaaaaaatagatgatcatcaaattatttacttgtagcaacaagtggacaaagaagtactcaacggtcgagtgcggtaacttcatgaatattcacaatctctttgccggcgggaatgactgcatcgttcctttcattattaccgtcaccgttgattctaaagatcttctgagtcaaaacctcatgtatccgtccgatcatgcttagaaacgcttcctcgacgttttggttctctaaagccgacgtttcgagaaaatagagaccttctgatctgatagagtcttaaactcttcgtcttcaattttatttgtgggaagaccctctcttatgatgtgggatggagaattggagatggcctaagggctccacagtaaaatgaactcgtaactcgttattgctctaaatcttatttcctcccatgcaaaaatacaacagtattaatttattatttaagataagtaaaatggcataaactattaaagaatttcacaattctaaatgtataatgcatttaaagaaaagaaaagtccgaggagctacgtgactgagtgattaagaaagaaatgtgtctcaacgatgaaaagtccgaggggtgaacaagatgccttctccgttggcagtggtgtggtttttctctccttcgatgtagttgtggatccgatgtgttggaagtagagagttgctacgattcccttcggttgtggacgccggttggtgtagcgatttcttctcgtggctcagccgtcgtgtcggcctctgcaactacggcggaagtcgatcgagagaaggtgggtagtgccaattcgccatggaggttaacggtggatcttcctagatttgttggctgtcgcggattcagtgtgtttgggtgtttcgcttgagccttgggcctcaaacaccaccgtgacttgcttcctcttggccggttgaaggttttttgttcggtaaatcggagattcgttggattgggaaagaggggttatgtttgattgtcggcttgctaggtacgggagctgacaacgacgtgccgtgatgtcggagggttgaccatgccgagagatttgtggtggaaacggttggtcgcgggaaaaggaatagtagcggaagtcggatgcttcctctctgtttactagatacttcgatctgctgcaaagctgtggttctcgcatccgtcggtgctaatggtcggcttctctgcgtcacggtgtcactagggcaagatcctcttttccggtcccgacaaattttttcgtttttcctttgtctctggttttctttgtaaaccaaagcccaacccaattttgtaggttctataattaataaaaggccgtttaaaaaaaaataaaaataaaaaaaataaaaaatgtgtctcaacgcgaccaacgcgaccgggacacgctccttttacgcggcgtgattgttttagtagtagcactctttttttaattatcggtgtttttttttggaaatttggtagcactcactgctgtggcgatgatgcctaaatcacatctacttttctagaaactaaatgaaaactaaaatacaagtctagaccaacaatattttatcaaaacaaattattaaacgttgtttgtcaatttttcttaaaatggcattagagcctttacaaacccaaaaaataactttgcatgccttttattgctcatattgaagaaagtgatatcacggcttcagtaaaccaaatactttcttgattgtttctctgtactgatgaaattgagcttgcttgcgcaacaagcaaattaaatattataacatttgaccacataaaaggggactcaatatttatacagagagaatagtggcctttaaaagcacagaaacttcatgattaacaaggtaagcaaagaatgatatgggctatctatggaggctgataacagacgtgaagttgtatcatgtttcatccctgccccctacaaatgagaaacacgacatatatcaatcaagcagaaccttgttgtttatcaaaccgaaatgggaaaagaaatgttagtgtatcttaagcaaatgtgcaacaacaaagatgtaaactttaagttcagcttgtatcttaggaatcattccctaattaagcacaaattggcagatcaactagggaagaaattgcgaccaatcttataagttagtaatctaactaattataacgtaaccttttctgctccgaagaaaaatttatacccaaatccaagaataattaccaaaatccattagcttgctcagtcgcagcctcctcttcggataagaccccttccgatacggcaaaggctaagatatccttcaacagcagatcttcagaagctttcttaagatccagaatcggctgatagtagtcagagtgagcatgcatacacttgatcagcctaggccagagtttatgacactcatcagtttatttttgagcttcatcaacgcaatttttcaaagctgtaaatgattctttgcaagcaccctcattcataaactcgcaaaaccgcaattctgtttcctcatccctctttgttgggtcaatttcatttggtggatcagctgacgacgtatctccgagtttcggagggaataaggcgtcgagctccctggctatcagatctatagtagcattcactatcgcttcttcatgagctctccgtctctccgccgggagttggtagtatgaagaactggacttcgaatcccccgatttaaaaatcgtggatgacgcgatgatccccatagccgtgaaaccggatcttatagaaatcggcgattcagcctgtcaataaatttcagagtggagacgattagggaggttaaaaaaagacaagtatatatcgaagaaaacaggggaaatatatgctagggctttgatcgatttggcttctatgggaaaatcttgatattccaagagattagtataaaactagataattgttttcttttcttttttttttaaactagataatttgcccgtgattcgcggatatattttggcaattttttttatgccaaatattatcaatcttttgttttggttgattgttgattttaccaaatataatgatgcttaatcatacttgcattaagcatcattatcaaaatttcaagcattagaatcatataaaaattaatatttatttacatattagtttgtaaggtttcaaatgcattcgtctcacccaaaaatgtaattaaattatacgagaataaaataagacaaaaatcccaggccaagccaacattttcaacaattataaaactacattatcgaatatttcataacaatttaaaaatagatgaacaatttatttacttgtagcaacaattataaaactctacattatcgaatatatcatataacaatataaaaatagatgatcatcagtttatttacttgtagcaacaattggacaaagaagtactcaacggtcgagtggcggtaacttcatgaatattcacaatctctttaccgggcggaacgacagcaccgttactttcgttgttaccgtcaccgttgagtctattgtctaaaacgattttctgagtcaaaacctcatgtatccgtccgatcatgcttagaaacgcttcttcaacgttttggttctctaaagccgatgtttcgagaaaatagagaccttctgattctgctagagtcttaccctcttcttcttcaacttctctagactgcccgagatcggatttgttaccgacgagaacaacgacagtctcgggactggagaagcctctgagctccgacaaccatttctcaatgtttttgaaagtgattcgtcttgtgatgtcgtagattagtaaagctcccaaggctccacggtaatacgaactcgttattgctctaaatcttttttcctcccatgcaaaaataaaaaataaaacagtattatatttaagataagtaaaaacacataaattattaaagaaattcacaattctaaatgaaagataaaatttgtcgaaataaatataattttagtaagaaaaacaaaaagaagaaatggtcgtgacatttaacaaagattaggtccgtgtgacatcgattgcttataaagattttcttctgcgcgtgatctattttcctaatcatcattccaatcccaaatttcattcattatttttttgttatttatctagcatatttaccttaacatttagacacaaaaataactatcgaaaatttaacaagtttgacgtcttggtttgttacgttagaaattatacaaataaaaaaactcttacaaaacaagcatttttgttcatggtcaatgaaaaatcaattaatggaagtgagttcatttatttacgttttctttttctgtgcaaaaatattagtccaacgttaaatacagaaattttgatcatgtcttcatcatcaagtccgttatagtagtatcatacctttcttggccggcggtgtcccatatctgagcctttatagtcttatcgcccacgcgaacattccggtaagcaaagtctactccgatggtcggtttagagtctaaccgaaactcatctctcgagaacctcgaaaggaggtttgattttccgacggcggagtctcctatcagcaccgccttgaataggtagtcgcactcttcgtcgtacgattcctccgccatgctctatggtgttcaagtttgataagatattatattagtaaatcgaagcaaaaggaagttgagaaggatcaatggatgatcgaaatccgaagaggaaagggtttgttttatgtaagaacctctcaggaaagtctttccactaagtatatatggctccatttattgaaaacatggataattatgcatataactaatgtcatatgattgcgacaagatatatgaaatgaattagtattgttttttttcttttcttggaagagttaaaatgaggacgatataatttttgagaaaaggtatagtatataatatagaaaatgaaacgagcaggacaaggataaaagaggcgtgacagagattgtacataataccatccaagatatttgttatatattgtatatagtctgtatttctattttgtcaacgaattaaaatagtgtgacctcttatctatcttaacttttgacttcttgttatgtttctagcttaggaaaaaataagaagttgtgatgttttgattgtctagatcttattaggatctcaagcgtcaagtcataaagctcaatcatgcatgtttctctgtagtctctgtacgtttgagttttgacattttaccaaattcactcactgactcacggttaggttttgacttgtaaagagttggctacttgggcctaagatgggctttatcaggtcggatttttcacaaaaaaagtcaaaaaaaaaaattcttaaaaatgggtgagcaaatgaaaagcctttgaccgattcctttactcgaagaggaagagtagaatacgattcgtagacgtcgacgtctttctttaatccatcggacggattccatctctttttttttttggcaagatgggtacacttttcaacgaggactagttgccttatttaataatcacatttgtttctacatccgaaaatagcttaataggacaagcaaacgaatgaatatatcaatttacgcgtcaatccagccctttaatttcagcattcatgacgttgcttcgtagtaagagagtgtatattagttaatttgaaaccagatcctctgctaaaaaatttttagcgttggttcatcacaaagaccttaatttaaaaatatgaatgttaatatgttaccatggtccccaaaaaaataaatactacttgaatgttacaccttacatttgaatcagccatcttttatttttttttctatcaagagaacgcctccgttgaccattttgaatacggttttattacttcctaatccaatatcaaagtcttaaaaatttgtcatgtgattgattcatagagaaagctacgattgattttttttccataagcagagaatctggtttttgtttctatgcaaatatagttcgaaactgatacataactcgagaatgcagaataagaaattagaaaccaaatttgttttgaacaaggagagcaaacgatatatatccatattcagatctaaatctcaaccatgtatgaatgaaaagagatccgattgaagttagactgatgatgattgatcacatttaagaagaaaagagtacctaatttccatagttattcttattcccgaaatccagatctgaaatctggaaaactccctaggtcgaaggaggagcggcggatccattgctgttgaggagagaagacgacgtcatcatcttctgaaactcttcgaaattaacattcccatcgccgtcagcatccacaggtccgatcatacgagtacagtcttcaacagagcaagacatcccgagacggttaagcacctggtgaagctcagaggcggagatcagtccgtttttgtcctgatcgtagagatcgaaagcgtcacggatctctgcggcggaggaagacgagcgacagagagttgagaattcgtcgaggttgatgtaaccgtcgcgatctgtatcgacttcttcgagcacgcggttgagttccgtctctgtgtaggaagtccccatagccttaaacacaccgccgagttcgaggactgagatcttgccgtcgccgttggagtcaaactggtcgaaaactttcttaagctcctctggattagccatgtccaccgttgcaggcgtgggtttggcggtttctggattcgcgcttgccattttttttttgttaaaggtaaagttggagagagagataaagagcaattagaagatgatgagtttgacctttttatagaccttttcgctagatgtcactatttacaagtttggaatcgaatcttgtgtatttaatttccgttataatacgtatctggtttgggaatactgtatttggttgaaatatgaatgttttgatctgttatttaaaatccttttttctaattaaagagaagtaatgttatatggttattatatacactctcaaacatggtattctctttttataaatactacttttgctaggaaaaaggaaaactaaaatactactttcaatattcacaatgaaaaagaattatatatggaacgttttaggatattaatgttactctcagtctttccacatggcttaacgaagacggcaaggcaagattatgtcacgtgccttgataatttgttttttcggctgtaaatgttaaaatgaaagttacatttgtttaagacgaaataacaatcctgaaacagagaattcttcttttaatccattacttggttcagtcttaaactatgttttgataatatatcgtagggactattatattacaagtgttactattttgatgataccattgctttattttagtattttgttatgcatttaaagaaaataaaagttggaggggctaacgtgactgagtgaatcagaaatgtgtctcaatctaacgcggccaacacgaccggtacacactccttttacgcggtgtgattgttttacaagtagtagtggggtcttttttgaattatcggtgtttttttttctagtacttgaccctgaagaggcctctgcaaattactactaaatctcaaactttagctgtatttcacattcaaacccctatatgcaaagtaggcttcttcttgttggtcatgaccttaggcatgatttgaataacctcaagctccaatatcctaagcatttgatgaagtacatgacccttaccaaactggtgaatttccttgtccatttttggttgtatgggtaattggattgctatataatacattgactcgacggccactgtcttttgatttttttacttcagatttatctttcccgctttgtcactgatatgggtttggtattaattcccatgtaaaaccggttgcagcgaatatgtatcacattatggttagtaaggcggtaaaaaaatctctatgaggttatggcattaggcctgattttcttaccgccttactaactctaactctcagagcttatagaaaatatttcatgctcttcgaatctacaagcttcagcgattcgagattccaaaatgctatattagattgattctccacactctccatctccatttcttcttcttctctatcaaactcgcgagagaacagacagcggcaattagggttttagagaagtagatgactacttctcctttgataaaccctcagagacacatcaaaatatgtgtattatgaaaacaaattttataagccaatcactgaggtatctcacacaaacatatttagttaactgtcctttgactttagtttttctttcatgatgaaagcttgtaaaaatattatatgtactaacaagttggctccaagagaaatgatataaacgaattccggaaatgaaatggaattggagatggtaaagagctcatttagacttccagcagacaggttacaagatacaggactaacaacttacggctgcagcaaaaccacgaaaatatgtgaagatacaggactaacaacttacggctgtttcactcagtatatactgagatatgttaatattgcttaaaggggtcgtgtatctacaaaatatttagtagcattgatgatattagcaaaggttaacacgcgacataaagcaacccgattttgcacacaaaaaagagaaaagataaacaaccggcctctataaaatctgacgtacaagtatcccttgaattcgaatccctgtcatggtcgattaggactaaagaaaactttgttcatatttgtctgcaatgtacttgctacttagatcatctaaagtgtggtcctaaaatacaactagcctaaatatactaacagcagaacagcaagctgagttccgtagcaagaaacaaggccaaagagaggtttttcctcaataatttagtatattgcaaaaatgcccatgagagggaaggaaaggtagaagaagcttttatattagcagtcatgtaatcagtaacatgtttcaaccatgaattatgatcacagaagtggtattcacgtctttttttacttaatgtatatcgttggctttttttatgtatcaaatgcttaaaacataaggttcgatcgctagtggtaaaccctgtaaagaacatacaattaatataaatagactacgaccctagttgcaactaaagaaacgttgaaagctaagaaaagtttgtcatatagatcagtctgttttcataacatatactaacaagataaaatttgagattccggtaaccagaaaattatgcagaggcaatgctggcctttgattagtcattcgaaaagcaaagaaacttcatgattaaacaaggtaagcaaagaattatatgggccaaaggctgttgtgtatcgtaagcacaaagtgaagcaacaaagatgtaaacttttcaactgaatgttcagaggaactagtaaatgttcactaaataaaggtcagactgtatctgttccagaagacacaaatcacattcaagtgaggcattagcaaagcaaaccacaaagacgacaagatttctttaatgaaacattcatgggcgtcaacatattgatgaacttttgagaaaatgatctcacgaatcatataaaaagaagaaatccgaccaattttataagtcaggaatctaagaaacgaaactttttccaatttattcccaaatctagtattgattattcccgtaaacaagaaaaattaccgaaatcctctcaatcatccctcgcaggctgttccttttccgagatgacaacttctatgaagtccttggccaactgttccatcgaagattcagccagcgtgataacaggcttatagtaattagagtgggcatctacacactttatcttatacacttaacaagaccaccagtttccttcgcgcaatcttccaaagccttaaatgattctttgcaatcacctcctttcatgaagtcgcacaaccgcttaacaagtagttcgtcgtccctctctgtatatccttcctttggttgatcagttgatgactctcccactttcggcgggaataaagagtagagctccttccacaccccgtctacagacgcttccaccatcgctcgtacgtgagcactctctttcttcggcttgtcttcctgattcgtgtagtcaaacatctcccacgggaattggtcgcttcgaagactaagctcggcggggatccccttggatgacgatggggatgacaatgagggtgacgaggacgtcccatttttctcaaccgagagatcggatcttatggaaatcggcgatactaaagtgactagagagttcgaaagagacgaaccaatttgctagggtttcgatactaagaaatttaaaacttaatcgtttgggaaatcttatcttctgatattccaaaagattagtatataagagcatgtccattaaagagtcctaataatggaatccttacatttttatactaataaattttgaaattttttatgtttagagtttttgttaaatcctaaacatttttcttgtccaatggtgagtccttaaatgggtttaaaaaaaaaaaaaatataatagttattagaaatatgaatgaaaaacttgaaaaaacttgaaaacacataaaatgaagtttataagtaaaactttcccgaattttagatttctagcacaaagtgtcactaggagaccctttcttactatttctctatctatcaaaaatgatacgtgcatagagttgagattgatgacaagctcctttattatggcaagctcccataatactactccaaagctgtaaatgtcagacctgtatcaacgaattagaagagctaattaacgtttaaggaaaagaagaacaattaatcaagggaacttaacaaaacagaatacaagaatatacttcttatcagcagatatgtttcatgcttgatacgcgagaggccaaagtcagctacctgtaatggatatccaaaggtagctcatacttagaacattgtccacatgcaattgccaaagtcaagtgaatgtgtaactaacacttaattacaatgtcaaaggccatatggatacgccgcctccaatccagttttgacgtgctcttctgtagtagagggaagagacttcaactgaaaatagcatttgaaatgattaggtgcatagatcagagctatggcatgaggtccaaaaaaaaagaaaaacgaaagtgagagtagtaaccaaaagagatgagaccgacataaataatttggaattagctgtctcagaaatgattcgtcttcagtaagatgcagtttttaagtgaatatgcttcagtacagaaaattgttgtcgttgaagaagcaatctgactactaagagatgaaagacataatcaatatttttgaattcccatttcacgataccctaattttgattacatctaccaacccaaattaatcacgatctacacaagcttaaagatagaatcataccttcagcatgtgattggactagaagtgtcaattgggctgtccaaagcccattggtcatgtccacttggaccatttttttcatgggttttattggttggtctttaatggacaatggtcttaaaatttgtccaagaccattaaagaccattgtccaatggtcagcccatggccagcccatacaatgatgtttatatacaatgcattttcacacaatctcgtcaaaagctctatttataaaaccataacatcaacatgaaatcaaacatgcatgtacctgttcttcccagtcttgtaatcaaccgtgacaactcaaacacgcatctaagactctctatatgcacctacaagtaaagaaaaaagcctacaatggctacatggagaatgatttaacagagaaacccatttcaatactactccaacatctagaaattggaaaccagaagtggccatcttcaataagcttaggtaaaacaataagcttaaacaacatttccacaatgtaatcaatcacaaatgattataagtaagagacaaaatccagaatcaattccaaaccaaaatctgtcatccaagttgcaaccttagaccggataccatcacaacctatagcaatctgtcaaagacatacatcatcaaatcagccatgtactgagaataataaacacataaccataggctcagagcttaagagaacagccatgtacctgtttcttcccagtcttgaaacgttcatgcaagggtggtgtttgtgtcctcttgaccttggatctcatcagtttcttcaataagaaaaaccgagctattaatctaaaagctgcagtctaaaagccatataagtttactattataaacgagttcaagatgtgaatattaccaacttcttgaaatccacgaaaccagtttctagtacataggagggcttgcacattagtaggtaaaaggcagcttctatatttgttaagcacacgactacctatactaaaagctgattccgatgccacggtagtgatcggaatgcttaagatatcacatgccatcgatgacaattctttaaaacgcgagacattgttttccaatatgcaataacatccatatctctaaaagagaccatatctaacacaggctcttccaagtacatatctaatggtgattttccagttccatttctttcagaaaagtaagagtaaaacccctgaaatatgaccaacaaaacaaaattctcactaagtataagaatgcattttcagaagcattatgctttaaaatgctttgcatagtatcatttgcagaagcattatctacagttaaagtaaaaactttcttctcaattccccaatctttcaacagctcattaagcttcattgctatagctactccagaatgtggaggcgggaaagcacagaaagataagatcttcgttttcagaacaccatcaacatctacataatgagctgttaagcaaatataactttcaacagttaaagctctccacaaatctgttgttaagcatattctacccgggattatagctaacttttccttaagcttaattttctctctttcataaatcttgtagacatcagaagctgcagtatttctgctccaaaattctatataagggttagcatatgtaaaggcttctctaattctttcatattcgacaaacgaatatggaagattatgttgaactaaagccactgcaatcatttctctaaagaccatcatatccacctttctgctaattctaggtgtacttccaggagtcttctcacaagatctcatatgacgattcatggtattagtaccatttcgtctcagattcaagtgataagtctgctcacaatatttgcatgtaacctcagttttcccattaggatatttctgtcctctatcgaagtttttccagcatgcagcacgaaatctacttacactacttttacctctctcagctgtccctgaagaagcagtttcatgaggtagtatctgatccatttctggatcttcatggtccatttcttgatcctcaagattaaagttgtcttcatcaaccaagttttgagtatccaattccatatttctgaaacaaataaagacatacacacgtttagcagtgataaacaaataaagcatgaacttgactaaatcactagccttctggaataattaagcatgaacttacaacacaaagggtctctacatattgatgtgcttcaattcataatgaaattcgaaatggcgaaacataaacaaaatctgaaaagtgcccatttgctagctagctctcctcatatccaaaattcacaattgaactttggacaaacccacaagctagtagaactaaccggagtaggagttgagagagaggtcgagcttggtcgtcgccgagagagagctttgtcgccgggagagagagcgtcgttgccgagagagagagaagagaagaaaattgatgtgttgaaaaaattgatgggccaaccataaaccgtgtgggctagcccattaaacccatggacaaaattggtctttagaccatatagcccgttttcattacgggccgaccatggactgtccataatgttgtggactgggcttagcccatggtcagatgaccatttgacacttctagattggaccatggtttcacacaagacgtcgattttgttcacagtcctctccgattaacatcaccaaactcgtcgacgttgagcaccttcggttgagatgatgagcacggtggataagagaagaattccggcgataatatcttccgatttgatgatataaacgcgtgatgatgatgatccaatcgttcaatcgccatcgtcgagcggaattcacaagagagagaaaacgaaatcgataaatgaagaaaaaaacacgggcaaagatgattttttttttgttttgttaaaaaatctcaaccaattaaaatttgccacgtatccgtcctttaacatcatcaaaattcctaaaattaggtgcgatcctaagtatttatcacattttagatttaatttttctcaaaattacttaaggattttggttaaggatctgttaaggtcctcccaatggacttgctctgacatatacacatataggtcctttagttatataagtattaaataaatagataaattcctaattagatggagattagcttatcacatctttatccataatatcacacatctttaaccataaccatcatccgaggattgtttttggtaaatttgatttcaacatggtttatggtgaatgatagcatttgtttgacccagcaaaaaaatagcattaatcttgcattgtctagtacataagccactgaacataaaaggatttagaatttggagattaacactcacaagacacatcactaagttggttgagttccattgatattgataataggatctgcattcaatcatagtgttacaaaagtagatatagaaactcaagaattcgaaacatgacaagagtttgttgctaatagagaaatgtttcttcttctttactggctaatttaatggcgatgatgagggcaaaaggtgacgatgtagttagccttggaacatgtggcgatactggttgggtcgtcgtaagcataagagtaagcttttgggcaagcgactttgaagattttggagtaagccgttggtttgcaagactgtgggttaccgaacaagccggtgcaacagtactgtggtgaattgaaggcagagcaagcacttttacaggctactacacgtttcccgttacgtgaccggacttgtaaaccaaccggacacatctggtttagatcgctaacacaaccggcgtagctacattgacctgaacctttaaccggcataatcgacatggccaggttataactgtcattacaaaattagtgaaaaaagtaagttaagtttgtgtaaaaaagaaagcagatttgatgtaagatttacagacccgtcgacgaggctgacgtcatagaagtctagctcagggccgagagtgatttcggcgagagtggccggaggttcaccgccggcaccgttgcaggagagagaaccgccgcaatctccggtggcgcagtgaccacggccagatctgtcgaaggtgcagccgtggcgaccccagaaacggccggaccagagtggtgggagttgaagagagtgggctttgttagctggaagcttaaaaccaccgccggcgagtaagttttgaccggcgctgggttggatacctggccaaactgggtgtttgcatttgttgtagaagattaccgttgaagctgctctcaaagaaacaacaacaaagatagtggtattagaaaaatctgcaactaaagtatctctaaatctatatttaaaaagtgcatttttattcatacatgggcgagattgaagcaaagactaaacgaaacagaaaatttaaagatctagcagggaatgtgaagagaaacctgaagcgtgagagagaagaagaaggaaagcgaagaggaagaggttgattgaagccattgatgggagctctactgagcaagagtgagactgaatcaacttgttacttctcagtgctttttatggaattttaagaaaaatatttattagtagtatattttttgaaaaaatgagagaatttggggaatgtaataatggcaaatgttaccacacgtctcgagactgtcagaccagagttagtgcgtagtactagcttttttctttttacacagtcaaaataatgtaactggccatttcatcctcacttttcaactcttcatattcgtatcatcgtataaaggtttgcaacacttgattcgactaacggctacaaataaaagaaaaaaagaactaggggtaaaatttggtacggattaatataggtacgtatcacatggagtattagtgaacaacatgtaaaatagaacattgtattaatttatttagttttaccatttggacgcagatcctaacaaaaacgccgatcttgtgaatgtgcttagtcgtcgacgcttaaaagtaggtcccacgtctcccttcgtccgatagattctcttcttggaatgcttgtcatttcccttcacactcttctaaacaaattgactacacactttctactactagtactaattacctattttttatacgttaactatatcagtaatgatctaatatacacttcgaaatgtgtaaatatgtagtcttcatcgtttatttgtttgtaatattagtttatatcttcaatagaaaatttacacttttagcaaacaagttatgtttgtcgttgcactttacaaaagatggtaaatataacttctctcagctagttcaaaattcaaaaacaaaaagacaacatcagcattgaagatcagtgagctttaaagtttgtcaatataacgttatgggccatatctataagagatataggccctacatacactgtttcacacattttggttcgaagtaaagttgtaacttttaactgtacatttagaaagaaaaaaacacaccaaaaagccattattctctgctattacaatgacgaaaacgattatcaattgattaccgtgggaacgcagcgaggtgttgcgccacatcagcgtcgagcggttgtgccacgtcagcagccactggatcggcaacaacgacgacttgtctacgttgtctttcccggagatagagaattgtgatgagacagacaaagagtgtaagtattgttgcattaccttcttcaaacaccacattctctatccaagtctctaccttcggatacacttctggtaatgaatccacaactctcacctatcagtaaaaaaaaaacaatttcctcttgttattttgatctgttagactgcatccaactatttaacataagaatgagaaaatgtacggtttttagattttaccaggacggtatcagcatagtttctacggagccataagctagcgagagcaagtgtgactggcaatctcgcggctgcatcgctctgaagggattcatcatagtaacgttttgctaaatggagatcaaagggaagtccttgtccatgttcatgcatgtaaccgaggttgaacattgcttgcgcattggactgtgatttagcatgcatgtatgcttctgccgcacgcacaaaatctctctcagttccctatttagagatcaaagaacgagagaagagagagaatcaggcgacaagtatcaagttttttctagctaattcaatcattgttacatgtctcaacgttattaggttcataatctagtttcttatacgaggtaaactcacccggccatagtaatatgcatctccaataagcagagcagcatgttcattgccttgttcagaggcccgccaccacaaagaatgtgcccgctcatgtctctctttgtctgtgcaaaatccagatactcccatgcacatgcttctttcgccgtatttatcgaggatccaggcagcattactttgtgccacttcataacccatctctgccatccttgagtacaaaatcaaagccttacccacatcaccttttaagtaagcttcaagagcccatctagagagagaactccacggccccctttctgctactagcttataaaatgaagtcgcctgcaaccaaaatgtgatggaagtgaacaagcaattaaaccacaaattctctcaacaacgctggagatgtctccaaactgctcaaaaaaaattcctaagatataaaaggagttgaagtacgacagtgaaaaataacaaacagactaccatcaacagaaacaagtactatactgcaccctgctgccttaatggatagacgcatagacatcattcatacctcaacattaaaaaaatacaacgtctggtcagacattatagtactgataaaaagttattaatagaatagacagtgaaacagagcttcccacattccttgtgcaagtaaccttttttggtaatgagattttacataaccaacaaaacagtgaaataattttctgaactttagaagagcaggaagccaaatttttttgagtttcgttcttttaagactttatgaatttaaagtcattttttctggcatccatgtttaggcaggaaagtctcagaaatctaaaagtcacttaccatctccagattcttcttaagcccaacaccagtatggaacatcttggcgagttgatagaaagcctttggttgaccagcatttgcagcaacaaagaagtattttgttgcctgcctcacatccctgttgactccgatgcctttaagatacaaaactccaaggttataatgcccactggggtcttcattgtcaacagccttctcaaaatattctcttgcctgcatttgaaggcatacatccatagaatgttagactagcctataaagagtaagcctgggaatgatgaggctacgaatgaacagcctaccttagtatagtttttcttatctactccatagcctttgacatacaagtagccaattccattaaatgctgaatagagaccttcttttgcagcaagtgtaagccattcaagtgccttggtataatttctttcaacaccagctcctctagcatatatctcccccagaagttccattgacctcggctctcctttatctactgctttcaaaaaccaatgcaatgccttggtgtgatcacgccttaatcctcgcaggccaaagtagtagaacagtccaattttgtacattgcattagcattccctttctgtgcctgatattccaatatctggaaatcttcatcctcctcgcctcgagatttccttagagcacctttgttctcttcagttccgctatgaattctagttggttcaaccaccggagaatcctttgagatcagaaaactattgacagctgtctctgctaattcagcatataattgaacagctttatcatgcatctgtaacagaatcgcaaatcaataacaaacactcagatgcaacttcatctattcataaagaaaatcaaaagttccatctttacttacatcttgacgaagatacgtgaacgcaagtgccatcttcgactgcatattcccaccagcagctgcgaaattatggtgaagaaacgacttgcttttgctcttctctcgcatcattcctatcccgtaaacgaaccccattatcgactgtgcgtgtggatctccagctgaagaagcagcctctatctcatccactgcttcttccatcaacctgaaatttccctcactcgccgccgatagaatctttttgaggccggagtagtactgcggcgaggctgcttggactgttgagtcatctggctcgaagatcgatcgccatgaaccgggatcaagctcctcttcggacttaggttcggattctccaaactcatcgaagtcagaggactctccgactccgttatcatcgccgccgctattgagatcgtcatttgagaggacgagaacgacgggacgagcgtgaacgccaaattcaatgaaagagaaaacgagtaaagagagaataacgattccgtagcttaatattctcattgtacttcctcctccaccgtattcttcgtcgtcgccgtagtttctcagtgatcagatcgaattttcagatggatgaccaaagaaagaatgaagatgaaaggggcaataacgtctttcaatagtccataaattgccacgttgaatcgttgtcacatatccaatagtaaccggccacgtaactagacttgtcttaataaacattagatccaatttcggtttggtttgttgattattaattcggtttaatcgaaattggatacatacatgttatattttgcttatttatagttttatacgcataaatacaaaaaaacagaggatcaaacagtttacatttgaatcttgtcttcgtcatcatcaagcttcatcaacatccactgtaatgattgaatcacttcttgatcgtacacttgcttctgttcggcgactctcttgtattgttttgtctccatctccacaacgcttttctccatccgtagcttcagaagcatagccatggcttcttcagcagctgattcagctgctcttctctccttctccagctctttcttcatgtaatctccacgttttctctctctcttcaccattgttctcagagtaataacgtctaacaattggtcttcatcattctgagactgtgattcttcttcgtcctcgctttcctcttcttcgccatgatgattcttctcgtcgagctctgtctccgataacgccacggtattttctctgttctggatgtgatcaagcccatcacgtagaaggagaagatcacagttctcccagctcaatctattagtagaatcagaactccagtgtaaaatgattggtttcttctgatccaatccatcagccaaatgagattttgaaatgaacccattgttgttgttgttgttgttgttgttgttgttgcaatccttgtgttctcgattgaaggaattgaaaaactcaatgttcggagaaattcgattgatcttctctaaatactgcaaaaacaatgaagtacctttgaaagatagaaactttagtcccaaaagaagcaaacaacagagaaagacgagattgaaaaactgagaggagcaaccaataacgaagatcccaaatccaaaaccatcagtttgactcaaaagcttcagaaatgaagtaatctccattacaaagaagtatacatccatggataggaacaaagcaagtcataaagataaatacttggagatagcaaaataaaaacacgaaaaaagaaagaaaaagaaaagaaagaagaatatgagtcccaatgaagagaatgtgtgtgagagtttgggatatttttgatcggggaacgggaagataaacggcgaagattgcgaggattttatagccatgaataattagtagttttatccgataacaacaattaaatatttgcccatttagtttctatttatatatttgactgagaaaaagaaaaaaaaaacagttaaacagtactaaaaatgatttctttatttccaacaacactgcatctgcattgcatacaatgcattcatcttctttggatgtgatgtaatatttgttgtttttttattctttggatgtgatgtacaattgtacttaactaattgatcggacatttttttatcaacaactcaagcttttccggcagagccaaagagacggatcttatctgcgatcacagctttcatggctgcttttgttgcggacatgacatcaacaatgtcggtcttcttcccagagctaagagcttccatgtaagccgttcttacttctgtgttcacgttgaacttcctcactccattctcaatgcattcctgatctcattcagtcaacaattttcatagcccacaaagacgttaattcagttaaattcatatcaagatctccatcaaaagaaaaaatttcccgccgattttattagttttctattaccaaacaagaaactttcaaacatgatcgactcataccttgataaggttctcagacaaaccagaagctccgtgaagaacaagaaaaacgcctttcttcgagcttaaggcgtgcagttcctacatacatggtgatcagttagaataagaatgacacaaactcatagaacttacttcagtcagcacaagaatataattcaccttaagtaaatcaagcttgaggtttggaccggacttggggtactttccatggacatttcctatacacacagccaaagcatctataccagtttccataaattcctgagcctgaaaactcataataataaattgtagtttggtttagcaacataaatttgttaggtgagagattggatttatcggggcttaaaaccaacaaggacctggttaacgttggtgagctttgcttcatagtcttcaacagtcaagccatcctctgttcctgagagtcggcctagttcagcttccaccataatgtttttggaacgggccaactctgttatggatttcgtgtaggataaattttctgtgaaggaaagatgagaaccatctaccatcactgaatctagtccctgcaagaaatcgatttggtatgaattttcaatataagaataagtaaaagatgacacagagattgcacataagtgatagagatctcaaacttactagctcaagagcttctaatagctcatgctttgtagttccatgatcaaagtgtacggatattggaacctgccacattgtgcgtattaatcagggggctcagagtcagacccatgtactgggtatttaggatcagctattaagttttgatttcaatgtctattccgaaaaaccacagatgaaagctagagagcgagttcaaaagtacatgattgcctaaaattttggtatgtatctaatgcagaatcaacgtacagttacaaagccacttaccctggcttgttcagctgcagagatgcaacatgaaaccaaaggaatgcctccttgtttaaaggcacctggatggacctaaaaaaggtagccaaaaaaagttcagttatcaaatctctttgtgtcggacatctttgaacaactcagaacagaatgttaatctttggttgctattgtatatcagaaatccacttttggtcagaacactaacctgcaatatagcaggactattttcttcctctgcggccgctacaacagcttctattccttccaggttatacacgttaaatgctccaactgcatatccacctttttctgcattctgttttacatagaaagacaacatcaatatgagaagagatatatgaagctagagaacgagaaggatactcaccagaagcagctcttttgtcgaccgtcctgctaccactgaccaagacttcacaacttctgcaagcgctgtgctgttaccaacattacctgttacatataaggaaaaagagttgattaagaatacctatttttattcagttaaatgttttgaatacaaattaagatttaccagggaaaacaatgtaggggacccctggatgtctactttctggacctaacttccatactggaacaccagcaagggcttgaccaatcacaagtgcacgtcgtgctttcagggctttcgttgctgtgtctgatgacgtaattccaccctaaacaatgacgttacagtgtcataaaaaaaaatcgaaaggctttggatcatagaacagttaccatttcaactggggattgacagagtgtgtcaggaagtttatgagatggaaagataaatatagaagctaaataccttagcaagaatataacgaggtctggtcgatatctggctcactacttcaaccagagcggagctcactttgctgttaatatcaagactttccgaagatgctgtcaaaatgaatatagacccgttaatgatgatattcctcagtcatgattttataccaacgacacaaatatataaagatttgagatagagaacaactttttcccgtgatgagttcacgactgctcataattagagtctccctgccagcccgaaggaaagcatcggccatctcaactgctcttctgatttcttcatctctcacttcagatgacttgagagcaactttttctacagagatctgttgatcattgctagaacttagcaaacaaagcatgcataacatgtggtatatactaatataagtatcccgtgttacatctacttctcttacctcgatgctccttaaattctggttatgttgtgattgaagttcttcaacctgttagttagaagaaaatgactcagggctctttaattttatttcattgagaagatatcaaagaaattagtgttgttagtagataatctaacctgctttgttgttttcgggacatatgagcctacaactattagtgcaccactgctttctttgttagattcgaaatcttttggcaacacaggatcttttggaataatccctattagagcagacacaaagctagcagcagtgcggcataaaaaggatctccctttcagttctgcctgccaaatataatgttcaatcgaacgaagggaccaagaatataagagaaaaataaatgtatcctctaattgaatatgcctcaaaaactaaaaagactagaagaataattgggcggcttacctggatcatcccggctgcaaatacagccatgtctctttcactagcggcgttgacaatacatgtagacccctgatttacatatgaaatggaaatagagttaagactttctacacaactgggactaactgattccacaactatgaagaccaaaagttcacggaaagcaacatccagaagtcgtcgcgaaatctgcttagaaaaatttaccttctttaaactgcacagaaactcacacactgcatcagggccaccttttcttaaaagctgaattgagatcgactgaacgctgttagccggaatgacgccagctgttttctcctcaacccactgaaatcatatcaaattgttccttactattaatttcttaaagggtcaaataacataagatgattcccttgttggaagaattaagacctcacggagatttgaggatttatatccaaaggatgcatctttggcaaactctgtctctcctgcaggaacgagcctgcaatattcaaaatgaagaccatcaatcttcatcctctgaagggaacttttccctgattctgaaagtttgaaaaaattacacacacacacacacacacacgttgctcacaaagacatacctatcagaatccgcaacataatgcacatcatcaatagtataacgtcccccttgaaggaagaaggggcaaataatccatgcatccatttccccaagtattgagacagcagcatctgcttcctgtgtgtggatcataatatcaagttatgacagaaacagatgccaagctgaaatcataacattgacatgatagtctgctatttcatgatagggttaccaaacttgcctgaggaaaatgaccacgtaatgttgaatcacccctcagaacaatcgtgtagtcagcattgccaacttcttttgatgcagcacataggttggaacagatgtctttgatcaattcactagcctgttgatgaaatatgcagttagagcttggcattggtgaagttgatgtaaaaataaagtttcattgttccatgaaattgggactctgcaataagtagattacacaaaataaaaattgtcttgaccttctcagggctcagggaccttgaatttgtcaaaatgaagaagcatgcaggcttttttctaaactgctcagaaatagattcaacactcctgtcaaaatgtagggaaaagcaataagcaattatcaattccttccattagtttctaggctagcgacttgccaattatttcagtgaaagattcatgatatcttttttgttgacacgataagttcagtttttcatagagaaagatgcaaggctaaccattcagttaaaacctctacgtcatgaacagtttgtgtgccagttggatcatcatcaagaacaaccaatgtcttcgagtttcccatatttagtctatgtatgtcagttgtagggtctgaaggccattcagctggaagagatttcagtaggtcttgtttcttcagaacaggaagtctcccttcgactttaattccagcaagggtttcataaacctataaataaaataaaacgtttccgttacttacagcttaataagacaccaaacagacgacaccaaacgtttctgatatagcttcatctgtccatctatggctacgaaagataaccagcaaacactatacgtagatcttgtgtccaatagttcatatgctttaagagcaaaccaaaattataccttcaccactccagcatcatctatccgtccccagcccgcagcagagcctgtaaatgaaaatatctctaaacatattagtctccacctttagtagtatagttcagtaaaagtagaaagtttttctggttctccacaacattctagaaagaagcactgcaaagaatatttttcacgaaatttgcaactcataaaactctgtattcaacccaaataatgagctcttaaataataatttgtattgttaagaaggtaggacaaaaatgatgcacatgcaagatgaattgagaacagttaaaagactggagaataccggctaagaatagctggtgtgccactgttgatatatggagtggaactttacgggatgaaccttctcgggtaacaattccctacagtcaaaactcatgcataaagttaagaaaacaaaacaaatttacaaattgattaatgttgcttatcttaccaaatccttgacaaaaatatcaagagcagagtatggtgtgtaatcattatccagcatgtgcggaacacgattttcaaacatcctgcaagatgaaaaataggagccattaaaggctaataaacgcgtttctcattaaattgtaaaagtaaatatcaacaaacaagagcacagggtttcattaagacaaggctttatgcataagatagttaacatttttcagagcatcagagtgattcacttttcatcagaaatgttaagacgttgatgctcagaaatgtaacacagaattttccaaagataaaagaaaaaaaaacatattccataaaaatctacgtaatgcttaccaagatgttccaccgctgttggaaataacattgaatagctttcgagtattcagacctaaccgagctccaaatgccattgcctcggcagctgatgcgatatgaactcccgcaagcaattgattgaccatttttacaccactattgaacatcaaataaacaagttacaaagaaagtgaatgtgtccatgtcagtaaataaaggatcgtgatggtaataacaaaaagtcaaaacaaattaccttcctgccccacaacctcctttaatcacgtagagcttctcacttaatgctgctcaaaaataataaaattaggcatgtccaggttatgatgtgaacaagaactatataaccagaaaaatgaaaatgcaatcgtcacctgataacacaagtcccgcagacttaagtgcttcatcggtacctgaagccattatctgaaaaactatataacttcagcttccttacagacgcattagataggtttctagacttcataccgtaagctcccccatggcagccctcttgacaccaccagacacaggagcatcaactagctttaggtcttttccctcatctgcaagattaccaaataaaagaataaaccaaagaactcaatcaagtgacagtaaaagatactgatggaagtgagaattgatcagcgtatgaccatccagaatgaaacagtatttactgtagcccgttactgaaaacactttgtaaggattttcctctatcatcaagcaaagaaaaaaacttactttctagacgcctttcaagttggctaacaaacgcgggagatactgttgacgcaagtacaacagttgctccagatggtatagctgaaatatttgaaagaaaatataggaaagtcagctctaacctccagtgctaaaatctaggatatagagatataccttcaaccgctccaagatgtccatacaagacatcctcagcctgaacctcgtttgttaccataattacaagaacatctacatctgtaggagcagtcacaaattgttaacgtattatttctgggggaaatgactggacttaaggggaaaaggcagatattcatctcagaagagctgagagctacatgacacagctacactgtaatctatctgctttcaaggagtacctttcgtcacttcagctggagaatttgccgccaatcccccggcattctcaaatctgacaagtgttggcttgtatacctgcaattcaaatcaatttcaacattttatttaacaatgttgcatgtttactgcttaagagtgataaaacagcgtttctttttgatgttaagtcacctattagtaaatcctgcatttataataatctgacgagctaatgtgaatacatgagtaaattaacaattatatgaaacacaaagcataccattcaccgagctaacagccaaacgtagggaaatctatgaatgcactacagccaaaagtttagattgaggcaaaccatgtgcctctataaacacagtgttaatttactcatatacatgtatatatactaccgactcatatgaccaattaaaaccaactaacacaatcattctgaacatgtatatcatagactccctataccattcatagtggagatcggagagttaatcaaaggcttacgtcataaccacagacagaaaaatttgatttcaacaggtgtgctgccatgccaaaacccattgctccaagaccaataaaaccaattctattcacaggctttgcttgagtagtaatttctttggccaaatcctctggcttataaagttctctattggctgcttctaatatgccaacaccaagtactttttccgagatctgctcaatcattaggtgaacctttcgttagagaatcatgtatcatgtaaatggtctatgacagtagttttccattcagttacgatttccacaagtttccaaagaactaggaatggagaaaactttatcaggaccttagccaatgaagtagctgtatcatctccctgcatctgtgatattcctggagaagggaaagttatgaatagaaataaataagtggaaagaggtcgaaatcattgtcccggacaagcgatcatattgatttataccagagattagttgttggcgtgcaactgccaaaagtgggacaggaaatgggagcgatttggctttatcttcaacaatggccttcccatcagaaagtcagttagcgtctcattagttacatatgctaaacatcaagacttaatcacagtgaagaaataatataaattggagctaaattatgcagtactttctttcctattttcctttgaacagaaagaacgacatcgataaaataacactttcaagttgatgtatcataccagattctgagagagaacatcgaggaagcgaccctctatgtcatcttttagcaacaacggaatatgattcttgtaaatcctgaaaacaaaatatacacaagacaatttaattctgtgacagccatggtcaaaatatgggcatgtcaatttggcataaaccttcagtgatatattcaatgggcctaaatgaggagctaaaaacaaaaactatttttcttccagatagatttggtaaacaggaaaccctggtgtagttacaacttacttgcaatagtctattctcaaaacttccagaattagactattcagcttatttttttccgttctctaaatgtgtgtatcttaaagatctactactacaagaaatgttctcaaacctgtgattaataacagtcctactatcaaaagacctttttattactcataacaaaaggaaagtccatgtagcataaagcataccatgaatttccagcagcattggaaattatgtcataaagtatccatggatgcacacccgcctgagaacctaaagatatagcctccacagcagcaacaagatgtatgccctcaagcaactcattcaccattttaactttactggttcagaaagaaaaaaacaatgacatcaattggttttctgtaatgccggggaacagttagaatagtcaaaggtgtttttacacatattatgaccaaaggtttctcatagatttcatgacattaaactcagtaaacaagttgagcattatgatcccaatatgactcgtgacgaggaaataggcagtcaaacacttagaagttgtagtgatcacgagaaggttattctggaaagttgcataccttccagcaccaatttctccctcaaaggtgtacagattttgacacattgctgaatgaaacaaagagattttctcagaaaacaaaatgaaaattcataacgtctacatctggagagggtctatacactagagttaagttttaccagtaagatagggttgtgctcttgtgatcgaatctgaccttccagatgctattatcttaaaagttgaaaagaaaagggttactataagtacggtgacatgcaacttttaacaatgaatggagatcagctagcaatagtactccaccagcataacaaactttgctagacaagagagtatataccattagttttccatcaagaagctcagacatcccttttaaaacataggcatcaactacaaaaatctgctctcttttctctgcattggaaacaaatcccaattgtcacgactgaaaagcacaaacttcaaaatacggtgttgaaaggcaaaccatgcctcaaactcagagtatcaaattgaaacctgtaagttgtttctctagtttctggagttgcaaagtcgatattgtcgaagacaaaagcaatacagcgtccttctgtagacctgcgaagaaatgacgcatacagtctcctacacaataattctgagataaagttcataaaatatgagctaaagaatcttcaggattacctttcataacaccctcatcaccaaaaatgacatcttgaatttggtcagggtgggatagtacaaccacaacggctgctgcagctgcttaattaaaaacaaagacagaggagagaggaagcaaagtaaataacatgacacaagacagtatcagaagtaaacagagtcatgaaacgaagtagcaatacaaacacaacaagacggtttgcatgtacagagtctaatgctggatatcaaatcaaatgctctgaactcatttccatgtatcttagtgtttcaaatgccttataactaacaacacactcagatgctgctatacctttcccaacatctgcagggctgtcacatttgtgtcctcccaattcaatgaacttctccactaattctgtacttatctgtcgaattagatacaacaatttagcttccctccttattttttccaatagacaaagcaaaaaaaatcaacaaaaattccacactactaatcaaatcaatttcacgtgtgtagtgaatgattgaaataaaccagtaaaacagctgaattcccgagagatagaccgagtatttcgaaattactacagaacccacaaatttcacatgtttaattccgaataattgaaccccgatcaatatgatatttccagaacatgccgatccccagaaaaaaaagaaaaaaaaaaaagaagaagaagcaacagacctcgaatgcttgaaccttaaacccagaacgaagaagcgaagaagctaattcgaagctgaaagaatcaagaccaacaaacccaaccacgccactcattttctccgatcactacaattctccgatgtaatttacagtcaacaaaccaatttcatatgcatctctctgtctctctctatatatatatatatgatactataatttaacaaattgagattaatgtaacgttacatcgtgtaggctcttacgtggaagtccatatccaacagccttttagcctttaacttatctgccaaaagcaaaacttttttgatcaaaaagaaatagtaatcgtacattatacatatttattaaaaaaaaatgataagaagttgtattgtgttaggtgagaaaacatatatgatatcattccatttaaggtaccatatcattacactttctatatgaacaaacatctaaactcttaaaattggcaactcctgtaataataaatgtaacgattttctaattaatccagagcttagtcttcgtttccaatgcataatgataggatcagaaactgattatctcgaaaaatcaggctggtgagctggattaaattcaaaaaccaaaaattataaccaccttgtgtacatatataaaccacacgcatgttttacaactttcacatcttcacaaccaactaaagatagaaagaacataatacaaagagatatttaacgttttgaaatggaggctgttagattcgccgtcgccgtcgttcttgtattttgctacgttacgtcgtctaatgctcagatgacttcaccaccgagcggcggtgcaggaggagacgcacactcactgccgtgtattcagaaactgatgccgtgtcagccgtatcttcacttggcgactccgccgccggcgacgtgttgcatgccgttgaatgagatcgtagccaaagacgccacgtgtctctgcgctgtctttaacaacgttgatatgctcaaatcgcttaacctcactaaagaaaacgctctcgatctccccaaggcttgtggcgccaaagctgacgtgtcactatgcaaaaccagcgccggtgaataaaccatactacgacgtcgttttaattagtttcttaatttagcctaatgtcacgccgtttttatttcttatatatctagcctaattaatgcgacaatattttgtgttaacgaaggtactaattcgtcttcaacaccgccggcaaccccgaaaactcctccggcatcttccaccagtaccggtatgaatacatagaagtttaaatatttgaaatttaaatcgaattgcgagggttttatacgagaattatatttttcgtggtataaaactaagtttttaaaattttggattattaatgtaattttattcttattaaaacgcaggaacaggaagcggatcaaccggaaatgcagctccttcgacggccaagccaacaagctcagccccggccatcaacttcggtggacttagctttgcatcggctgtcgtggcaacactcttcttctgatgatctactatatttatttcacgtctttatcagctaggttttcatttgttggaaattaatcagaccatgttcggtaacgtttttatttcaactaaaggttataactgatctatatgtactatgaaatccaaataatagtactaataacttccaacaactctttaattaccaacatattgtctaatctccagatttataaatggtcgtattatggttcttaattttcatttttatcttctacttagtcataaacatgtaaattagtgcacctgaatatggaagattttaactataacgttacaatacgaacaactagtttgcaaactccagtttatgatacacatatctcagttatatatttttaaaaagactgttaaaatgtatatgttactccttagctagaatttaatagctaacgtttttggaagctagctttttagttcctgtcaagattttgacattccaactcccagataatgtaattaataataattccctgatttaaatatgttgacgatagctaattaagatccccttttcactttagttctaggcttctagctaatggatgtgttagtataataataatgttatccgagtgttagtgactttgtgttgtaaaattattgatatactaaaccatatgacagttcatcaaatggattcgatttaatttattttaatccaacaaaacgagcgataaacaacaaaacaagtagagtccaaagtccagggcacttgacaaatcaaatcacataatttgaactgttttaaaatctgacagcgacaaatacatatacgcaagtaaacatacagccacatatatagacatatacaccagacataaaaactaataatgttcaacaaaatttgatatagttattcttacatctataaagcctaaaaattgatactaatctgtgtgttactgtatacgtataatgtacacatatgaagtctatataattttcttaatcgactacaaattattaattaaatttataacgttaatctattgagtaacatgaatttatctgtctacatctgaataccaaatctacagtaatgattatacatggcatgtttttttataatgcttttgttttaacaatagaaaaccttgattaaaaaacatactgtataaaaaagtggcaactaacaaattttcctttaattaaatgaataaatgtatccagagttccagacaactattgagctgtatatatattgatatgatatattgtttgtttcatggtaccgacttatgttatgtaatctttgtttttggcttttggaatttctaaaaacagatgaactataaatttattattatgatgtcaaagtataaaaatgaaaaacaaaaacaaaacggagggagaagccatgtctaatgatgagttaggtagcgtcgtgactcgagctctgccctatcgcccagctcttcacaatcagacccatccttcgtccatgtgcgttttcttctctctactctactctactctatcgtattaatcacattctacactttaatcgcactatgtctcaatcaagtttagaaaagaaaaaaaacacaattttcacttatgtgttatgacaatagttaagtcatagttttgtataaagtttatttatgggacggccaaaaactgtaagaaagtcaaatatatttttctgcttataatcttaccgccttgattcatgctttttcactgaattaagaatatttagtttctaaatgacctttgtcacaacaaaaagtcacacttagatacacgcattttctatttgtaattttctttgtttggtagagcgaaacataaaacaaactaaataagctgttctcataagggatgaatctgattaattatcgagtttgacttgattatatgaaaattaattatgtagcggccatatatatgtgcattaatgaattagtgttgttgaaacgaaaaccttactttttgtagtttaataagttaaattatatctatcagataaagtcccaataaagttaagaaacgacaactatattacgaagagaaagaagatacacacagttgtacacaaccagctaacaaaattaattaatacttaatcatcacttaatccctaaactaatacaactatatatataagcataattataaagccagcccattcttctaaacgtctttctctctttctatttctctttctctttctcttgttcgtctactctgatcacaataatgggaaacacatcttcatgcgcaccattgatcatatcaacaaactcatcctcaggagtggttaaaatcttggctccattcaccggaactcttgaagttttctcaaaacccatcaaaacctccgacatcgtctctagacactccggccactttattaccgactcaactttactccaaatcagccaccgagtcaccgccgtgtctcccgacgaatatttacggccgagacgacatctctacctcctcctcccgaccgacatgctcttctctgtcttaacacaagaagaactttctctcatctccaacaaagccgcggagacactcaacaaaagccggtataaccatttgaagagaatattcccggtctgcatatttccgatgaccggagacagaagaagaaacccatcatcagttaatgaagatcgagctcatgatggtgtggaaataagagaaaccctagatgagaaggtactatacgaatcaaaacatggatcttggaggcctaaattggagacgatcgtggagagctaaatgcctaaaatctcgaggatcattaaaatactatatatataaacaaatcaattttcaaacgtagacgagtattttgttcttttatttttcctgattttttgtccgactttaaagagaaattgaggcttatatggttttgttcatgatttgaatattcgtgtagataatttagtgattcaattgtgtaattataggtttatttaatttatactggacaagaattggataaaaaggatattggtcaacgaatcaaagaattgggttttttggtaatccagattttaggtacagctattttggtatttggtacgtatttatatatagtatacatatattttcaactttggtatgtatactttgtcaaaataaataaaaaacacttaatgaccaaaaaaaaaaacactatggtacgtatatatgtatatatccaaattttaattaaataacctttagaattttattggaactattcgcagatactctgaatataaaagatatcggcagccaattcaataattaaaagaggataataaaaaggacctgcgcagttttttggtagtaggccaaaagtctacctaaactaaacctatacgagaataacctagattgattatttcattctcatccatcataaaattttcatatccaagcaagcttttaccatttatcaaaaaaggatataaaaggtaagcttttaccatttaaaatttttaaacattaaaactttagaaaatactttataaacatagacataaaaaaaattgataataaatgttctattaatcctgattataaccatctttatgagaataagaagtaaacttttagccattttttggggtcgtattattactcttagtaacctaccattcaacatcattgatagtagtttgagtttcaattatcaaagaaaagaaaaaacaatgaataagatagaaaacttgtagtgtaatggcccatggcccatttataagttttttcagcagtaacaacaacgtttgggcttctagaagaaagcaacaaaatgtgactatgtgagtcgttttatattagttgagataaatgttgataaaaaaagaaaagaaataaaaaggcatcgcctaataccgtgtttgcgtcagggacgagtttgtggatgaccacactctcttactactaaactaacaaaaacacttgctcagcttcttcacgcaccgttgatgcgcgtatctcacaccattcctgcattttcttctccgtgtctgtgccgatgtttttttggtggtttacgagttgaccttattttgttgtctttttgtaggatatctaagtttgatttttctttgacgaaaaaacattaaaattctagaagataaacaaaatactcgtgtttattttgataagtgggaatacgtaaactgctcatttaatagtgtaacatattaaaggcttttgtgtcgattttgattgtttatttggttattaccattagtgaaaccaaaatttggaatccattaggaagagttgtctcattaacgaatctcaaaatacagagaaaggagttacatttcagattccaaaccgaacaaaaccgagaactcaattacaataaccgggaaagttgagtcaataaatatgtatactttcgatttagcaagttgattagataaaaaaaaaaaaaaaatagttgaagcgcgtgggaagttccatataaaaatagtcctaaaaccaataacgctcttaacaaattcacatctccctctctcttatccatttcctctctagacttccttaaatcgattctcccgaattcgagaacagagcctttttttctttaattccaactctttctctcttgttctgaattcgtggttcgtcggtattataaaaaaaaacatgacagggttctctgtgtctctttttgtgtcaaacttgtcaaatgtggcctcgtatttgtcgcccatcttcgagaacatcccctccaccaaggttgttcccgcacagatcgagaaagttgtctctttggtctctcgtaccggtcgcgatttgcagcgttacgatcacgctggctatcgtcaagtcgtcgggtacgtcttaacgcctcttcgttcatttttttccaaaaccctaatttttgttcttatcaaattaattttacccctaattagaaattagctttggccgttgttcaaattcacaataatgattagtttggtaaatatttaggtgtaatttgatatagttttacaacgaacgttagaataattaaagttaccaattttaaaaaattcgtgttcaatagaaagatcgttaaacggttaattattcccgcggcaatttggaataacgtgttgaagttttcaaaatttgaggactatctctattcattttttctggaatctaatatcaactttttctgcagatgtgtaccgtatagatacaagaaacaagaagtcaatggagttgaaacccaagtaatccaagttcttcttgtcagtgctcaaaagggcaaaggaatgttatttccaaaaggaggttgggagacggatgaatcaatggaggaagctgctttgagagagacgatcgaagaagcgggtgtaacaggagagctcgaagaaaagcttgggaaatggcaatacaaaagcaaaagacatagcataattcacgatgggtatatgtttgctttgcttgtcagtcaagagttcgagcgatggcctgaggcggaaatgagacaacgcagatgggtaagtttggatgaagcaagagaagtatgtcagaattggtggatgagagaagctcttgaagcattcattaacctgaaatgtctagctgacgatgatgaaagtgggaactgaattagtagcactcagaagaaaaatacgatgtttatttagagttggtgaaacagagcttttgacttagataacctctacatggagctgaagcttcctaagggatacagttggtcatagcttctctctgtctattgagaggtgtggaaaagttttgattgttcgatgaaagtcaacttttgtcttctaattttattcattcttttgtattttgatgattcattcattcttttattgtgaataaaatgctagacaggttcctttataaaaacgtttactaacttaatcacacatgtcgctttcatgatcatatgtctaatcattccaaaggattttactgcagtatcatagtttttacaataatgaacaaacaagcaacattttccagcctaccgccatgacatcagtctctactgtgaacccaccacaatagattactgagagagtttccatcatcatacatatttaatctctttatcttcttaattgcaccatctttgtcgtaaagactttccagagcatagaggaatcctttccagccttctccaacgccatttctctgcaacgccggcaaagtccagttcaccagctgcttcacgaatactacatcagaggatttccgacaccggaagtatcggtaataattgtatcccaagcctacattctttccactccttaggcccgaaccataagctactgtctctcttggtagaccataaaaccccaaccacacgattctctgccgtgaaatctttaggatacaaagctt

SEQ ID NO: 1132 - DNA, 44879 bp, Arabidopsis thaliana
tctgggtccttcgtttgcaaccacggattagaatcctctacgtggttatcctctctccaaagcttcacccttttttttttttttccttcaatctctttctctcactcagtcactaaaggtgaatcctttttgtttgtcaatcttcttcttcttcttcctgatttttcggtcggaacacacaaattcagctcaccagaattcttcgctatatttattttacatttaacaacttcttaatttttagtaaaatgtatattcttaatcttacttaccaggtggcattttcacttttgtttatatatttacttcaatttttctaatagaaaaaaagtaagcaaatattcatatgtacttttcagtttagtttttggctaaattaaaaaaaaataattctacttttaataataacaacttaacaacttaacttaacttaacttaacttgttctatttctaaaccaaaaaaaaataaactaagatgaaaagctttgaaaagatctgcatgcatccatgggagatcttattatatgatcaaaaccaaaatcctgcagaaattaaaaatccaacaaaaaaaaaaagaatttggaaacaattcgagaccagctagtaatggaaaactataatcaagaacattgtttgtaagaattcttaaatacggtagtagagagactagaataactagtaataaagacatcattggtccgcaggatctaagcaaataaaaagaatttctttttcactgtcttcaacgcagtgactctctttctctctctttattcacacctcttgttaccttcaaaaccttctctcaatctcctccattatccttctctttttctctctccctgcaactggctccatcccaaagtgcttcgttctggtacagcgaccatggcagtttttgttcttgtgatgattttgttggccatggctggtcactcaagtaagtatatcttcgtctcttttcaaatccttctctgtctcatatagatcctcttcttttcttctatggcaaaacgattcttcttttctttgttcacccactctgttttacaacagaacaacatagtcacaaacttcttagctttcatagtttttaatgaaattttccacaaagaagggccatttttgcttttacccataccttcttttcatatttcctttttgactgtggagttcaacaatcttgtcccctcttgaattaaacattaaggtgttccatttcacacattatcagtgaatgagatttgaagaatgctcattgaagtgtttatgtgtgtctttaggtgggacatggtgtgtatgcaaagaagggttaagcgaggcaatgctgcagaagacattggactacgcatgtggtgcaggagctgattgtggacccattcaccagaccgggccttgctttaaccctaacaccgtcaagtctcactgctcctacgccgtcaacagcttctttcagaagaaaggtcagtctctgggcacttgtgactttgctggcacagccaccttctcagcctctgatcccagtgagtctctcctaccaacctcactacattagaattagtgcaaaaacaatttgttcatatttggtaacttaactaggtaaagttaaaagcagtagttgaaaaatggaacccaacttgaaagcaaatcagaaaggctagtttatattaatctaaacttcacatgtttcaatgtgaatgatatgataaataaagtatccattatcttattatatagtatcacaactcaagattctctacacagatttgaaactagattgtagaacatatcatttttattagtaactgttgtctcttgtaccattgtggtcttatgatataggctacactacttgtcctttccctgcaagtgccaggtacacacccttctttctttcttcacttcttatttgttgttttgcaaacaagaattggctttggtcttgaggatctttgcactctagatctttgtttaagctgattgatacaatctgagagatgtgtttgtatgtttgttgttatttaccatttaatgcagtggaagtgggacaacgactccagtgacgacaacaccttcgacaagagtccctacaacaactaatacaagaccctacacaatcacaccatcaacaggaggaggtttgggaataccgtctggtattaacccggattacacagatccatcctttggattcaaactccaaagcccaagatttggattcatagtcttgttcactctcttcctacccttttacttgtttagctaactaagtgatcatgtgagtagtgtgtgtgggtctcaatctaatgtaatgatggaatctatggagatagagacatttttttgttccatctttgtctgtttttccagctgttccccacttgcctctgataaaaattgtacattttgatttcaagtaaggagacggaaatatatttatttaaggttacgttaccttcaccggaattgttatgaccggagataatcaaatctgaatttctgattgtctgaattgaccccaaacacaaccaatcaaaacaaaacacaaaggataaaaatgtcattttgacgggttaatgtatataactaataaagggtaaaattgtcatttgacttcaccaaccaacaaacactcttctcagtggctttttttttaattgatcggatcctccaagcagcagccgaagacgaccgccggcgatttccggttggcaattgttctcatctgatctgctttctcgcggtactgatctctgatcccaatcttacatcgtaaaatctctgctttcgttcgggttttgatgatatagatcacgtggattccttcttttcacaattgactgttacaaaatcacaacattacatttaatctctttcacgtccccaattgttgtatgaaatttgatgtatgtgaggtagaaggtcatgttctataagctcattcgaccaaatttgtgtgtttgtaaacttaactttgatttgttcatctccaaggttctctcaaaatgaacgtcagacttattgggcactcttgttttcttgtagctccaagtttaatggaagcattaactacttcaagggttgtgccagttcaggtcccctgtagaaagctctcttcactttttgctaatttttcttgccttgagttaaggagatatccttgtagaggtcttgtctccattatgaaccatcccaaattgcttcgtccagtgactgcttctgtgcagcctcacgagttgtcgactttggggcatgaaggcaacattgttccttctaaaggtaactaattctaattacttcagaatctgttgaatttagattttagggaataacctgagctgcttggtactaggaggtatgaaggaagagttctaagagttaaattacaaactgttttaagcttttgaattgtttatagattgctgagtttctttctacttttggttgttggttttctgaattgctagaaattcttgatctttggagaagtgttgaagcggtatgtttcgatgtggacagcacggtttgtgtggatgaaggtattgatgaacttgctgagttttgtggagctggaaaggctgttgctgaatggactgccaggtttttggtccatctcaacgcatatatatgctaaagctctgatgatttttactgcctttttatgttaacttatcgagtattgctgttcttagagctatgggtggatctgttccatttgaagaagctctagctgcaagactttctttattcaagccttctctttcaaaagtagaggaatatctcgacaagagacccccaaggtattgattttggttacagttactttgcatgtgttgtgattttgatcttttggtatgatgcgagctaccttcccatgattcactctgctaaataaatcgtttcacttataaagatagattttacttgtaagtgttccattggcccatgttcttgtcttgaattagactttgaccaatagacatctagctggcttgattcctgcttaagatatgtccagattactttctcaagtttgttattatagtgtgtttctttggtttgtttaggctatctcctggcattgaagagttggtcaagaaactcagagccaataacattgatgtctatttgatatctggaggttttcgacagatgatcaatgtactctatctctctccctagtttcttcatgttctttactaagaccagctgcatcaattcttgtgtagaatactacaatcatggtgataaggttatgattcaatttcttttcactgtagcctgtagcatcgattcttggcatccctcgggagaatatctttgccaacaatcttctatttggaaactccggcgagtttctgggatttgatgagaacgaacctacgtcaagaagtggaggcaaagccaaggcagtgcaacaaatacgaaaggttcacggaactttattaatttgcaagctcccatatctcttcttaagtacaacactttgtaccaatgaaacttggttctttccagggtcgtctctacaagactatggccatgattggagatggtgctactgatctcgaagtaagctattatcaaccgagaatttgcagattacaatgaactctcaaatactgtcttgagtaactaaggtaatatacttgcaggcacgtaaacctggtggcgcagatttgttcatatgctacgctggagttcagcttcgtgaagccgttgcagcaaatgcagactggcttatctttaagtttgaatctctcataaactcattggactaaaagcctctatagtgattattctcgtttagctaaactcattattcatatctccaaatttgtacccttttatgaatttgtatcaaataccaattgaatcaacaaatgtttttgccaactttagccgcttgatatgtttgttcaagcataagagcgttgttataacaaaatagtggtctttgtgaagagaaaattaaaccacagactaatcaatcttggcggtagacatatctggatgtccagttaacgaacaaagccatagccaccaccaccaaatccaccgcgaccaaatccaccacgagcatatcccccacgaccaccaccataacctccccttcttgcaaaaccaccaccacccccaccacctcctgaatcagctggatgcactccaattattcgcccatcaagctcctatttaagcaggaaactctataaatggcggattgacataatcaagcaaagaaagaaagaacaatcccattggtttctgaagcagcaacgtagtaccaaaacatctctctttctgtctaaagaaaatgagataaacaaagcaatgaaaagaatggtctaatttcacagtatgattctttactaaaagagttacttatcaaacgagagagacaggagtagcattacaagctatatgataaattgctaatatacaaactagtgtactagaaacaaacttatgtcacaaagtaagaagattttaaggatatggaaagaaagtaaagtgagaaagtaattagactcatgataattagcaaccaaaataagccggaaaattggcatcaccttattttgcatagcttgcattgcgttattagcaacttcgatcgaatcatatgttacgaaaccaaagccccttgataaaccactttcacggtccaaaaccactaccgctgtgaagaacaaagtaaattttagtcagcaatgagaagaaaaaccaatggagaaatgagacagctgtaaaaacgatagctaccatcaacaatttttccaaaactgccaaaagcttctttcaagagctccacatcagtagatggtgagagacctggaaaaaaaaagcaccatataacagaatgagacccttaagagttaagacaatcaaacactcaaaagagaaaactctctctctctgaagaatgaagacaaaacaaaagatttagagtctcacctccaacaaagattttggatggagttaatgaaagattgccctgtaacatagcgtttgaggcctgcaacgctctaggctgcctaaatatgtttccagctctactaaacaaacccatgtaatgcatcttcttcaatctctaagcacattttcaagaagaaacaatcaaagaatgttgatagattggtgatcacaaggtgaaatcttatgagtagatctgtttcagacatttacgttttccggatagaatcaacaaagcaatatctataagaatcgagtcaaaagcttaaaactttaactccactaatccagttcctgaagaatccatctattagcatcactcagaacagtagaaacaaaacacatgtcggatccaaatcaaattattgagttgggtaagagacgcatagacaatgaattgagggaaatgaagcaactagacagagaaagatctagcaaatgaaactttcagcaaatacgatcgaacccggaattagagaaattcaaacgtgaaagcaattgattttacacaccttttgggtttctctgtggatgatgataatttctgggtagtgagaaaccccccaacgtctttcaattctcgcccaatagtgcaaaaaccctgactttatgtaaacgagtccgattcgtgaagatacaatctagtccgtttattaatgttttgagttgatcttgaccgttgattcagctgatcggcgacgaagttgtaagtagcttttttttttcttccccaaaggtttagtttttttttttttttttgttaaacccctaaaatttccttttactctcttcttcttaaattgagtaatccctaaaatgaagaatctctaccatttccgaactagatgagattcataagaagtcaaacttacaaatacagagaagtgttagcttctgatgttggacggtgttttcacttttttgttgtcttaataattaacacaatgttctggcctctgggataggaaaaagagaatgttgtcatgaacattgacttgtattatatatataccgctttagaatacagagaatccaaaaacgacttattgtataaatcaatatctactcgtcagccaaaaccgttttctgtctccttgagtttccttgcagccgatcaatctcaccgtgcacaatctctttcaccagatctttgaagagaagcctctccatgtcaagcactaaaccagggattgcatcatcaaagtctgtccatttctcagattggattgccatatcttcatccaatatacatttcaagaaatcttcttcttcttcttcttcttcctccaacaacaacaagttttctgatctcttcttggcttgcttttgtagtatctctatctctgaacatagttccttcaacagattttgtgcacttaagaccttctttctcgctttagcttgcttcatccatggatctacatagctctcaacaaaagctagcttcttcccgagcatttcattaacagcatcgaacacaagtttgcggttgatcttttcattgctgctactgctgcatcctttagtttgctcaatcacaaggaacagctccggattaattgggtggcctgaagggtgcagttgaaaagttgttaatcctgagccaagatctctgaggagaagacccgaggctaaaagaatctcggaaatgtatctgtgatcggtgtcaggatcactgttctcgcataaagatgcaatgtaatcttgactggtttcgtcatggctagagtttagtctttttagcttttgaaccaaatgctcaacattctgaagcttctttcggttcatctctggcgaaaagcttgttgttgtctttgagaagctataagctggattccactggtcctcctcgcaatgttcaacacccgagttaatagagccattaacacctgttacaagatgattgaaaacataaaacaatttgcatttttccaataaagatgtatatagactcttaaagagaagtcttactgccttcactagcttggattttcacaggagatggttcgatctctcggtagatttctgcattgagaacagaaactggacttggatgttctgatgatccatcttcactaaacgttggactggacttctgagtaaaaaaaaaacaaatgtgtagagaattagcagttaagaaacaaatgtgtagagaattagcagttgaaacttttttaaagtaccaaaaattttagcagtagcatgagaaaagagcaactcacattctgtattaagttagagactacagctttggctgcctctataacagatgggctctttccaccattttcgatactcaaggtggcttctattttagtcctagatttattgctcatttggctaagttggccatcattttgctgcaagctcctctgatccctgggtctactacgcctcccaccaggagaagtagtagattccacgggttgtcggcttatttgttttcttaatttgcttgaatcagatggagaggctggtggtcgagaacgcttgtcatgctcaggcttcatctgctgcaactttgaacttgcaggccctgaattctttgaagtgctttctttgtaaacctgagaagacatcacgtttctgctgctagatttcttgtcagaactgatacatggttcagctctttggtttccaggactacgatcttttactgcctttctacttgttgaacttcttctaacatttacaggttcttctctgcaggtcttattaagaccggatagactgtgaatgggaatcagagatgatgaagggataccagatttttcaacaagtctggcaggtttcattatcacaattggacctctcatattggatggaatcaccgggtttctcaggtctattgaatcatgcttagaagttgcagaatctgccagttcgtaatctctttgagcttccaagtttgagcattgttgttgctttcgagtatcaaagagaccttttgattgcattgcctctaatatatctttaagagctctgagatcctttcccgaatgtttaacctcaagatctttcaattttccctccatcgactgtgacagagatttcacagacctgcaggcttgcttttgagaaaaccggtttctctcggtttgcttccaaggagctggttcaatgggatatctcaaacttgataagggtttcataacaaactcagagcttctccatcttggagaagaagaagaagcagcagggtcctttcctaagcttctgggcgagctaggagagaaccgaagagaacggttcaggctattttccctcaatgatcttgcgaatggatcactgttatcatcaaacatgttgaatctgtctctgctcaaaggagaacccggtaatgtttccaagcccattagcttggcaacaacactaggaggccgtttcgggctacctgaaactttgttcatgctagagcttctactgaaactttcagaaagtttattacctgatttgagatcaacgtggtctctactgtccaacgaaagcctaggcaactctttcagcttcttcccggatttcgactttccgcgagaatcaacatagtaacgggatgtatctttcatgtcaacctcattgtaatagtgatgagatgtttttctaagtttggctagagctctgcaggattcattgaaatcaacaggcctggattgcttcaaaccatagggtcttggagaatcctctcttctgttttgcctacatacatcagaaagccctctagcttctctatacatagaatctctaacaacatctctaaggtcaagtcccacacgagcaccagttccttggctcatcactggatcacttgtaggagattctggaaaaatgactcggtcatccgcagaaatctcaggctgaacttctctgttgacctcggaagacaacggggaagatgatgaacacgatgatgagaaagaaaccctcgaacattcggttgatagcctcgttagtttctcgctcaatccattactgctaacaaggtttgagtcctgacactgaaatgctgatctttgctgacaaattgcatcaacagagtctctttcaaagttgatactattgacatgtgcattacctgcaaaaaaaaaaaaaaacatcaacaaaattatctttgccaataaaccccctaaacattacagattcttgaaacttcaatagtcttaaggttaagagaagtcaaaagctaccaagaaaaaaagcaacataaaactcaaaatcaatttaacaaaactaacagacatttcacaaatcagataagattcagccaagaaaggacaaacctttctagtcaccacagaagaatcagacaagacctttatagttcatgaagaaaccgagctaaagaagaagaaagattgtaaaagacatacatattaagaacgttgtaacccatatagccatgtacaagtcaacgactaagagacacgatctagagcattaagcattatttattacttaagtgttattggattatgattacctaaagtaagacttttacgccggcttgtgagaatatggtgtcgatcaaagatttggaaaatcccattcatacatccaattttcttctgcagatccgagttttcatctgccaatgtatgaagaagctttgcagccatgaatggtgaaaaatagctagaagttcacctgaaaccaggagggttctccggcgaatctccggcgccggaacttgctactggtaacaaaaaggagagaatttgaactcttctctctgtagtgacagtgtcttaactcttctttattgtgcttccagtaaatcctaatttgggaaaaacgtaagctttcgttatatctctatcaatagcaaccaccatggaaccaactaataacgagaacgacgccactttccatatttcatataattccaaaagtttccagcttttatcaattcacattccaataaaatttgccctgacaaagctcaatgtgaacgccatttcccattgctctccagctaaattacatagcttaaatccctatcataatgaaaaattcgcttttttcttatacgtggtaaattgggtagagtctaggctagcagaaacatatgaatctattaaaccctattttcaacacctagattctcaaatccccactaaccccaaaaggaataagacaagctccattattacagaacaaaagctcttttgtctgaaaacttaatctcccagaagaagatcactgatcagagaatgtacattcaaaaccttagggaaagaaagaaagcgccaagcaaagaagaagaagaataaagaacctctgcaaaatgtttcctcctggttctgctcagagaacaaaacaaaaagacagccacataagaaggaggaacttgttggtttgtaaatattgtttgtttgttccaattcctcactcttaaagacttaaaagctccaagattttagattatctttagtaagtaatatggataataaaaatagaaatgagagagatcgttcatgagaattggagatacagacgcattctctcaaatcatgaatccatgtgggaaggaagtaggatgtgattacttctttagatgtctccctctgcatgtgacttctgtcttctagtttagattttctccaaattatccttctttttatttcttcccattttttctaaaatacattgcaagcactattaaatataatgggaaataaaggaggccatcaaaataaatgaaaataagttttcttctctatgtttttacatgagcaaaaagaagaaaaacgaagtagttgttacatgaaatttagaaattttgttttcatgtaaacaggttgatagaatcacatgctatgctaatcaacaacgaaattagttggatatggaactacatgctttagcctttagtagttggattgccaactaggactagtttgacttttcttctacgttatctccaaaatttatgtttcctactgaatgatcgaccaaattctaatctagctctagaaagagtaaacaaggctagagttgaaattgaaaaccataacatgataaagggtaaaaccagtttagaagaatcactccacattctagaataaaccatttttatctgacatttaagctagttcattgtgcaaaaaaataaaaactatgagggaggaagcataacattgcttggaagttgaattaaacccgaaaaaaggagaaaattgcagagaataagaaaagaaggaaaagaaaaaacctaactcagagctagcttctcatcatcctcaccagtgaccacgataatctaacttagattctaaataaaacccaccctatctccagactaatgtacaggaaaagaaatgatgttgttcatgctgttgttcctctgttcatagcggagaatctctcatctgtaaatcaaatgctcaaaacgaacagagttagacccaactagttttagatgcaatggcttcttctgtttttgtgtagcctaaagattcgatcataaggactttaaagacgttagcccacctttgtttttgtagctatgactctccaagtccggtcttgttagccctatcatctatcgtaatcgcatttctagattctaaagacgcttcatcaacctgaggaactgatgatggagctgtattcactgtattcacagtgccctgcacaaagattttcagtattttagggtcaagaaattgcataatcggcattttcagaaacgaaatgactaaagacaggttcttgaggatatatgattttaaaaacgcaccatatcgagttgacttgcatcttggttcttggcatcagaagtaacaacagaggtttctgtttcgtgtggtgccactgccactgtggttatgttaacacccagagggttgctgatggtatcaataccagcctccataccgtttaattgagaatctttggattctacagcattagcttgatccttgatcaaagttcttgatatctttgatctattgtcctgatccccgttcgacatagctggcctctttctatacaacaaatacacttgttcacaaaacgatgcacacaactgaaaaccccggaaagaggaagattaatttaaccactcacctactaaagctttgatctgccggcagaatagagctgcgcttgtttgaaaacaaaacaccacgaagcacttttccatctatcattgtttccatagtgtaaccaaccgggtaactctcggttatccgggcttgaaacatcatctttccttcattaaattggcaagtgttcaaaccaaaatttcctcttcctacaataaaatcaagcatatacaaactagtgagtttctgctacagaaaaaatgctacctttgtatgtttcaatctaatattgactagcgcagagtctgcctaaacacaccttgatgatccatattgattctgacaagtgatttatcgtacaaggaacttgcatgactttgttcttggcattttatcttcaattgcttctttagagacaacatccctacattttgatcaaatcttgcatcgtatccaagacctattaaccggaaacaaaaatgattagagtgagaaaatccctgtccagatgtccctatgaatcagataggcaataggtgaattaaaggggatttgccgcaacctgtctgtaagtagaacatgtcatccaacgcctcgagattcttattgcagccaccaacaatgacaagaaaaccagctttgtgaggatctagacaagcccctgcagaagagaacctagcagatggtccttctcccatggtgagaaccttggaccatatacacgtatctacaggtacaaacaacaacaaaacaaaaaacaatgagaatatgcgtaattacaaagaaaccaatattatgacactaatacactttagaaagccttttacaggtttccttctcatggaaattggatacaatggttcatcttaaaacctttaaccaagcagattttgtttggacaagaaattaggaccaaagcctatctaccacataagtcataagtattatatatggctattaaatgatgattcagttacataccgacatcaagcacatagagatcatcgtaaagattctgagcatccgtaaaccctccaaaaacaaaaaagttcctcccaagtgaaacagtaacatgaccagctcgaggtgtcaacaactgccctgaagtattcaactctttccatataagtgtatctgaaagtcaaaaaaaaataacgtacattaactttcagataaaagacaaacactcgtaaaggttaaaagaacatgaattcaagatgctttttcacctgtatcaaggatatgaacatcggacagatagtagtcatgtccatcttcgccacctataacaacaagtttgttcttccacgatgagcaagaatggctatcccgcgcagatggaggattcccaattgtaacagcccgtttccacacaaaagtttctacacaagcataaagccgattaacttacttgcatcctcgaaaatttagtacaaaagtattttaaagactcaacattaacgcaagaaaggatatggtttcaacttgtttttaagttagaatctatctaaggtcccttatcaatgaataaaagatgataatatggaaaagattcacatgccaatttgaagagagccatgagtaaccaaccattacctgtattaaatatgtaaacgtcattgtaatagatttcttcattaataccagaagatttcccacagccaccaaagacaaacagccttttaccaaccagtgtggcgctatgaccttctcttgcctcaggtccctctcccctaacactcggacatttccaagtatgtgaagctataaccacacaaaaaaaaatcaaacaaagtgggaatgacttcttcatatagggagaactcaaaacttgaaatatacaaagagaaagcttacaagtatctagaatatacaaatccttaagagggttaactccatcagtaccaccaaacacaaaaagattgtcgccgactgttgtacagctgtgactgtccctgggaggaggaggtgtgccattgatcattggctgagtccatatctgctttgctgcaacaaggatcaccacagtgagagagcaagtaaaccacaacggaccaaaagcttcctcaaaagagtcaaaccaaaatcattaaaggaaaaagctttaaatacaaaattggatatagagaaatggggatgtttctcataccaaaatctgacaaacaaaaaacaaatcagagtgtaatttcttatcctaaagcagacatgcaatatggatgaacaaaggtaggaaacttagatgattgtctagaatcgaaatccgaaatgggaatcaacccaaatccgccattttttgagaacagagacgatgtggaaagagagaactaaccagcgtcgaaaacatggacttgattggtttggcaattatctctgccatagccaccgaaaacatagagaaagctacctcctttaatggcgttacaagtgtgaccccacctcttaccgggcccggaagaagactcaccgagacccacttgttgctgtagttgtcggaccctttcccacctcattttccgggcgagaatcgtttggggtgagaaagtgcgggaaaatgaaatgggttcttttttggaggaggaggaggaatgaggaagaaagaaaatcagaaatccaaattatatcttatgggcgattacagatgataaagctgcttcatttcttttgcttaggttttttattcggttaccggaaaaataaattaaagaagagaacaaacaaaaaaaattgaaaaacctggtgaagagaaaaacaaaaaaaaaaactttactttattacgtggcacttttatgacgtgtcgagtatttactggttgtttataagtctcttaaaatagtgaaatgggtcccgaggcttaaggatttacgttacaaggattttcgtttgtgtttttttaataactagatgagtactcatgttacgcgtgggtttattttgaaaattgttaaagtgttggcaagtgctgctagcggttccgcaactctccttcgttactttatttagaacttgattgttctttatgttaatttatatttactatttgtttatttttgtattgttaataaaattagatgcataatttgaagttacaatttttatggttagattcatttgttacttgaaatattaatttatatatttttgtgtataaagctgattatttataagattttaatatttttttacttcataaatacatataaaaacaataatgatattttgatgcaattctgtgtaacaatgttatttttgtagtttaaaatttttctaacttgattataaataaatcaattccttgtatacttcaaaaatattgtgatagattcataattaaagtttggattgatatcaactgaaaaagatcttaagagtattcgtacaaaaaaataaaaatatagcaaaaattgatgtcattgaagtcaacacttttggatcttttgtcattgcatataacaatattagagaaatgattgtgtcttggatgatttgaaaattgttcaacttgattataaataaactatttatagttttatttattctccagatataatactccaacaatattgttataggctcatgattaaatatatagaattgatataaactgaacaagatttcaaaaatattcatatgaaaagaataaaaagaattcaaaaattaaagtatcattaaagtcaatacttttagatcttttgtcattgtatatatcactataagagaaatgatcgtgtattacattatttggtaggtctaatattttgaaggtttattatttgaaaaaatttgaatgtcaatgttatcaaagactcaaaattaaattactaaacaaataagaggttaggtagcaaacaagtacaacacaataaaaaattagttatgattattgatgataaaaaaaattaataaataaaaagagtataatgaaagtagtacttaatttgtttacataattttattttttatttttattttggagaaatcaattaagagtaggattgataatatatttaatttgtttatttaattttattagttttattaatttaaaaaacatcgaatgacatatgtcactttgttgtgtgatgatgtgtcattaacaatatgcaaattattcaaactattaactaatctataactactatacactcataatttgagttaagattacagaaaaaatctttaagtatgagaaaaccaatcaaataattttattgaaaaacatgtaataacaaataaatttaatattagtacaattaaatatataaaattaaataataaatacatcattaatctataaattataagttgaagagtttacattaattattcagtggacaattagcaaatgctaaagtgatgatagtgatgatgtgtcaatcatatggagagagttggtcaactttcatatatatgatttaacgtgattgaaactgaatcatgttttagaaaataaagcataagagatgaaacaaaaaaattaataataaaccataaaaaaatctacttaaaatgtactctataaagataattaggttcagagtagataataaaccataaccgcgaaacatatataaatatttttttgttataagcacagtgctcagagcactaaacaaatctatactttttcactaatctacatatacatttttgcagccattttatgaaataaatcttggagttggaatttatttacaatgactgccactagattttaattatttgatttttttaattaatggtttgaatttttttagggcaattaattctataacaaaccaaaaagattcgaaatatatggcaatcccttatgtcacgccaaatacaatagattattttctccttatctcacctacaatattcactaaatcttaaaacaaccaaaatttgaactatttgaattatttgtattaaatttcggcaataaattaaaacaaacattgtgaaacaaaccaaaatacatttacgatcccgtaaaatgagcaaacccaattatatgtgcacctaaaaacatttcttatcttggtttgaatattctatggaattaaaagtccataactttttcggcataaaatcacaatcccgactaattccataactaatatttaaacttatataaaaaaaaatagatcatgagacgaaaaatataacggaacgagtttggattgatataaaatataacaggacgggtttggattgatataacacatgttaaatatttattttattattttatcatcaccaattttttagttatattattaatataaaattatataactttaatattaaactaaaaccataaaaattaatattattaaatgtatgaataaaatatttactccgtggtgtagcacgagttaaatcctactccatattatgattagaattttttaagttatcagaacatttaaatggaatagatgtaaacattccgtgtatttttgtttatttacgtatgtcaaacgatataattccatttattgaatttaacatttctaaatattccatttattgtatcaatatgaattcaactaatagttttgagttttgacagtaaaaacagaaaataccataccaatctagtctgattaaaattactgttcatgtgagccacacacaatatggtctcaaagattcaaacttacttaaatcatttatagatagatttctctaaagatgaccaaaaccaagcaaggtcaagtcaaaagcggaaacggcctttcctaatccgagcccaggcgatggctgcaactgcagctcctcccaaatgagctgaacctgatatgttactgttcccctgcagtgttcaaattgtttgttgttttgtaaaggaaaaaatatcatcagattgttccaaacaaactttgaaattttgcaatgtcttagtagattacctctgttatccttaaaatgtcttttcctatgagaaagataccctgaaagataaagaagagtgagttttagtcgacttaagaagagagctttaaaagcctgacatgattgagctagagagcttaaaacttacaagcaacattgccggaactggaatgaaaaattccaagtatagagtagctcttgggtgcaggaagatatcgagcagcatgatggcattcacggctccactcgcgcccttttatacaacagaaaaagagttcttcaaatcattctcacttgcgggcaaacaattacataacaatggatctttatgtcaaattcatgttaaattagaatcaatgatcacaatttcaatgtctgataaccacatcaaagaatgaatgtcactgctcttttaataaaaccagtaaattcaaacataccagtcccggggttctcgatggatccctcacgaaagctccttgaccctgttcaccgcatatgattagtcacccaatataaaaaggataggccttcccacaccacatcataattcaaatgaaaaactaacttatctgaggacctagcatgatttgagataaaggaaactaactgcaaaaaaattaatgctggttgctccctaccttgggcgatgttgcagccatataagcatggtgaatcaagtagaaaacagagcccccaagggctccagcaaggtacagcttcaaaaggaactgaggaccaaagtttctagcgatctagcaagagaaggatgcgggaaaatgaagaagtaagtgattgaagaaaacaattcattctctctatcaaaactttccaaaaactagcagcgacaggctcaagagtacttcactcaacaaatacaaatcacaagagaaaagaagtgttacactggttccaaaaaagtagagtccaatcatgtttgagacgatatgtccaatatcaatatgactgaatgctgaagttatcagagtgtgtagacgcccactcttgaaattatccaacgatatctgccaaaaatatcaatcaataaagtcattatcaactaaattatcaccagcattacatgtaaaagacatctagaacctaaatctccataaacaaacatgtactggaacgaaacgcctataaaggtgtaagctttgaggtctaaccatgaagttattcatcatgaattgttgattgaaaacacgccacatcacaaacacaccagcattagctataactaacccaagaacaacgtcacgatctgataacccttgaagccaatgcttcctgtcaaaaggtagaagaacacacaagtgaaacccacatcaaatctcaatgaggttgtaagaaatttagggatgatgagggatgaggaatgagggacaataacataccagccacgcctttgaaacccagaaaacctctggaattcgaaaccctttttgggaaactgagaaccaatgaacccaactctggattccacgagatttcccaatttcacagctttgttccctaaagcgctcgcgaaaaacccacgaattttctccgatcgccatagctgagaagggtcaaagcggctcacgggaggagacgacgggcttgaaggaagatagtgtgttcgaaaatggcggctctggtttggtttatagagagaagtgaaagtttgacgattcaggtgagaatgagtagttggattcgcgagcagcttggtgagacgcgaagatgagtcgacgacaactctacggttgaagatcgccttcattttgaaaacttgtggaacagtaaatttgcacaattggcgaaaatgtaaaggcgagagctttcgcttcagagaagaaaaaagatcaaattttgatggaatcgatcaaaaaccagataattgactactgggtattactcgatagtctctgtccgacacataatcaatgtgcagaccaaaattgagcagctttgatgtttttgtgtaagaactttcttgatgttttggaaaagatgctgtgataagtttccagttttatcgtttttacatgactcgtcaattggtaattggtttttgtttgcactatttggctgttaaagggcacaaaactcgaaattagtacttttggaaagaaaaactgatccaccgaaaggattgagcaaacaaatgtagtaacgatgaacaatactcaaaacatcacacaacattggtgatctttgttttgaatatcctgattcaatctatatatttcatgctataatggacaaaacgatacattgagttttgtccaaaccataaataaatcgtattcttataccaatttcagcatatttcgctattctgtacaccctttctatagtatttagttgatcaactcaaaaggatttatacagttataagtgatatgctcccatacacactgaacatcaaagacactaactttgcttatacaattataagtgatatgtttcttcccttttggtattggtgcaaaacagagttgctctgttttttcttattgattaatttgtgtttctttgccaacatcaatacatcattagtttatgatcattgaccaataatcgatacatatagtgtaaatacactcaacaagagcaacaatacagcagttcaccacatattcctccaatggagagtatactagtaaacaaaagcaacttatgctataaccagcaaaaggatcagaagaatcagacattcatagctcgaaaacaagacaaaagaagatcacattcatgattttgaagaaagaaagccagttcctttaaacttctcttccatcaaaccatcaatacgagccaccatctccggagtcagataattctgccaatccccaactttccctttcctgaaatacgcactgttggcataaacagcaggacgatcttctctatctttctcacctttgttagcttcaagattcttcaaagtctcaaagctacaaagcttcactactttctcaacaacatttccctcctcttcctccttcgtgaacccataacccataaactcagctaatctcttcacataaggcaatggatcagctctcattgtctcatacttgagaaacaaaatctgatccgggtttgcttggtaagctttccaataccctaaaacatgatcaagataaggaccgtaagctgataaaccttgacagtacttatcaaaagcttcctcaatgctaaccactggtccttgttgtgatctctccttgtgagcaaaagtccacatcgacacaaacgtgtcctttgggtctctccatatgtaaacaatcttgcaaccagatttcacaactgattcaggtaagagatcataagggatatgagtcgagaaaagcgtgtttccttcgtctttaagaacatcaacgcttgggaaaaacgggaagtcgatttcgatgtaaggcacaaactcgtgtggattacgtttgagaagagggtttgttgaaacgtcgaacttggagcgatttgcgattgcgaaagttaaggctttgagccaagtcgtgccggtttttgggtagctgcagacgaagaaatcattgggacgtgccttgaagaacttctgggcgtgaagtaaaccttcaagaagaggttgtagccaccagtgaccaccgtactcaacgaacggatcttttggtctccagccatctttgtgaggaagagttgcgatgatttcttggtaatgtttctggttcttctcaaattctgatggcgacgaagatgctaactcgtgatttgactctgatacgacgacgtcgtttatggttttggattccattatagagagtgttttctttttggctatgtaatgaagagattaatactcgttgataccaaaatacgtttgttgtttgttataatatatagtttgtagtcagagaatagataagtaggttggtggtgactggtgaggctattatttgacccacaaacgtgttttatgtgattttttcagttgttggtttggtaactatgcaatttctttctaaaaatttacaatgtatttgcaataataaacaaaaaaaagttaatgatatcgtgtatgtatgttgaattgaaattttgttactcaagtgtagtatttaaaattatttaattttcatataataaaattatctttcaagtgtagtagtatataaaagttttctcgtttgcaagtgatagaacaaacctatttaaaaacgtagaacagaggtcaccaattatccctgtaagtaatatattcaacctctaatgtgtgtgtgattataagttttctcttccgacccaaaaaaaacaaaaaacagtcttcagaaggaaatctgaatttgatctacaatattccaaaaaaaaaagaatcttcaaagtgtataagaaatcaagaatcttctgatattgattagcctcaactctcaacgtcttttgctttaagctgtgacacaatcttgtaaataaggatggctcgagttcaaaaactttaaccagaaaggtttatacctaccaatagccagctttagccaaggcttcatgttaccattatagtgaatcacagctgctgtttcgatcagacggttatcgatgttcacatcgtaacctaaacccaagacatgccatcttctgtccagtggctctgtgagaccatagaaagatagtagacctggagggagtgtcccgagtttccaaagcgttcgttctctgttctgatcttgccagtaatggtaccgagcagtcacgtttgcattcctccaagcgatcagatcaaaaacgttcataccaaaagcccatccacatgcttgtgggtcgaactttgagctgatgagtgggttcgagaaatttagatacttgtaatatcggtgaaaggcttcaagacatgtttccacagctccattgacgtttccatgcagatccaaggagaagagtggagtcaaatctttctgaacaacaacatcatcgtctaggaaaacaatcttctctagctgtggatagatctccggaatgtagaatctgagatggttcagtaatgacaagtactttgggttcctcacttttggctcggaaatcgtacttgacttgtctgttccccgaaatagtaagctcttgcatctgtgtccagcagttgcttaacaacaggagaatatgaagcattcaaccaagaaaactcctctacgctcctgatctctattgctgagcccttgaagtcattacttagaaaccaggcctgcatagctttgtagctcactcgattcgtcactatgtggaaaacaagctgctttggatgatcagcattcgagacagttgaattaacaacaaccgaggtggcaatcacgttgtccgagaagatgcagaagtggtagaggttgttgtcgacaagtctaggtgagtttctgttctcatctgccagttcatggcgagatggctctgttacccaatcagatgtgagctttatcgtcaaacagtggaggctctttggtaatgcctcagcaaccaattgcccaaatattgtggtctgaacagtagctgcatttgcacgctcttcaagtgcttggatgtgagatttcatggtcatcatagtggtggcaatatcataatgtgcatcttgagccttgtagataagagctgatagaccagtaataatcggtttagcctcatcaaacgaaataggttgtcctctcatagctgctttggaaagcaaaagctgacaacttctgatcttagaactcaattcccaagctaaatgaagattattatgctctttagctataaacacataagctttggcaagtgtcatttgctctgctaactgcctagagaaggaggaagcacttgtgacctcttccgtgaagtttaaatggggaggagataccatttcggttctcgtgtctctctcctgtcaaaagatgagattatccaaaagacacgaacattagcagttataaacactcacccaatgtcttatctttagtaaatgaaatcaccaatttctactacatcatcaaattaaaattcattaggttatacaattcacaatttttgtcagcacaacaagatccagattttttcatgagggaagatcaagcagagcaaaactcaaatctcagcaattaaattttattaaataaagagagaaagacatacaagtaaaagctgggatggatcttgttgatggtgataatgctgaacgatgaagagaactaaaccagcgacagagaaagaaccaaggagaaaccatatccaactcgacaatctccttctacctcgccgccggtgatccaccggccaccgcctcatcttccgctacaagtttacccaccgttttctgaatcgatgataataaacactaaaccacgatttcgagcagaacctaaagaaatcggaaatctaccgacagcgatccacacgaagaatcgaaaaggaactgaacctaataagagagtgaggaagaagaagaagcgagtttgagattgtgatctggcttttttgcttttctcctttcgggttttctatgagtgtatcaaaattctttcttcactgtccaaatatgttatttttgttttccagatctaaattcattggcttactaaatgacagacactgtattatcaaatgtttttaacttctttttcaaattttcccatattaatcttccaataattttttctttacagatgagacatgaagtatataaagtgtctattaacaccctatcactcagtcttaaatagatttgtgtaaggaagggatctcgattagggtttcggttccgtttcttcgatttgttttggttttataagaaattgttactaatttactatcctaaaactttgtctactttcatttcgtttgatttggaaattctttcttttcgattttttcgagtttggactttttcgatataaaaatcgaataaacggtaacaaacgttattgaaaaagaaaaaccaaatacacaaaatatgcatttcaaggtggttggcaacctctcgacagttaatctaccgccaaaacgagtgatctatcttcgtggcgaatatcgcttcttttaagatctctagatccattttttttgttttgttgtattagtcttaagtttcttagtaacaatgttcggataacatgtttagttagtagaccaaaaatccgtaaatctttctttttctacacaaagttacctgttttcgattggttttcctaaaaacgagtctatatttgtatttgtatccgtaaattaaatgaaacggagttttgactttaaatgaattcgacacatttacaaaggccgacggttttacaattgtgtggttagcggctctactagctagctatcgataaattatactcatttccaaaaatgctttaaaagtgcatgtgtggttagtggatatactagcctatagtgatgataataatctcattcccattaaagcgagttagggaatacgacgtattgcctacaggtgatattggaactaactattattaacggatcaattaaggtgctatgagaattattggtgccaactaacttattttaaacccaaaaaaaaaaatcaagtatctgtaatgattaattaaggttctatgaattcattgttttagagctgaataatctccacgtaacatgttggatcgagcaatcacaactttacttgtttacttttctaaaaatcagcaatcaatgttgtcctttaatggagatttaatttatctgtaacaagtggaaataaagttaggggaaatagtgtatatatagaatcacctttgttttgatctttcgacgaaaccgttggatggtgatagcacctttacatcgaatcgcatatattatcgactcgcatatattttctatacacctatcaaagtaaatacagtatcgattgattgaattgttctttttaatcactttgtatgcatcctacttggatctcttattcaactatgaatatgtgtgctcagtgctcttaccttttgtatgttaagacttaagcatatattactggaaatacaaattaaaaagctatatattagtgcttcaagaagcagccaataaggtttgtcggaaattaatcagatgttagatttaattagtgtccaacgttgtcattatgatgtaacaggtttgttcaaatcggtaaaaaaacaagcctttaaaatgttttttagtaaaatatgaatagattattaagatttatagtcctatatatatagaatgcagatttaaagcgaaaaaacagtcctgtgaatatgcaatttattagtattatatattatttacaacactaaccaaataccatattaaaatttagcatcgtttcaacaatgttcttatgtgaaaacaaaagtggtatgatatgatgcaacttcagaagtggtactactttttgtcaggtcgtccatattcatccccatgcagaaaagtagaattggaatatatataggtgccgaatctatcagaatcagccatcttataacactcacctaatatgtattatatcagtaagtaaaatcatattgataaatagaactcaataatttgactaaaaaaacacacttatattttcattttatgtttttataaaacaatgttacatattcatattttaattatttgaatatttttcaaaatttaattacggtatatggtactctaaaaggcaaacagaatgcgactctaaaaagaagttaaaaatggagagttttcatcaaataattatctacttgatcttttaaatagatggtctctcactttttcccgttaacgagtcattctataattctcttaattataaattttgatagttaattatatgggatgttttctcttgttaaaatacggtgtcaaaaaatataaatattgaaccttaattgaactagagagcataaatttttccaaccatacatatatcagaattttttatttataatttctttcgcctgtatactttgaacataaaaatgtaaagtgatgacacaaccttgaaaataaaaattaatacatatatgtggttgggtatactactgtttatatcgttacgtcatgggacttttgaaatgtcaaaaggcatgcatgcacaagaatgtggccactacacagagtgccaactgcaaagaccggcaatgacttagtgacgacccacatgcttatgcattatttatgatattagaaattattttaaatatatttatccacaaactactgtatcaacctctttaaatcgactatcagatcaaaaagttaagaaattaaaggaagaaaagaaaaagaaaattagatatggcccggttgattgcatagtgtacatgatcataaaatacttgcaacttgtttatataatttgttagaaaacaacaacttattcgatagatttatctttcattgattcgtggaagcaaccctcgcgagtggaataacaaaaattaatgtgtatgaattactttatattcgtttttgaaagcaattttccatcaaaatgattaaattttcatgtttcacctagcagaacgagcgacttacatatatctgaagagttcaaaaagaccaaaagtaagaatcgttcgttcctgtcaacatgtacatctagtcatctagatgaatctccataacacgtctcacgtacacaaaatctgataagacggcgctaacagtgttgatgaacagatgggagaatctaataagtagcatctccaaaaatgtcaacacgaaaattttcgggtaaatccaagactccaatatggcaatataccatggaatccatggaatcccccacttattcccaaaagggttactttactgaagataaacttgaataaacaaacgatcaaattaattaccgtacctgaaatacaaatgtatagtatcgtgggaatacgtcaacgctcaaatcatgatattggactataaacatcaaaatgtcttttatcttagtaggcatcctcacgcagaaaaatagaattgaagtattgatttattcaaacattgttagcgtattgtaatctgaatttcaatataatatacgtgtatataatttatagatggtaaaagaaaattgtaaatatatattcagaaattaactaccactctttgtaactacgtatgataattaaattctaacaatcaccaaaagatcagaagtccaaatattcagaaaattttcatttttcatacgggtattacaattgttatttttacaaaccaacaattgggcaaaaagccaacgatgtaatatttttttcattacctatagttttaaatcagacatgataataagatataggctgtccctggaaatataatttttattttctaatcactttatttatatagagaaaacactatctttgaaaagcaaattaattcattcaccctttttttgaaatattaaaatattgaaacaaatcacaaatcagcttttgcttttgttttcttcatggtgctttcgaaaggttagggatcataatgcactttttcttatcctttttttttttttggtatcaacttcttcttatctttaaccctcggaacattcaaagaatgatcctctcgcttgctttaaatttatgtgggtctcattgctgaatattattcgtatgttgatagggtgaattttatatacattagagaatgaaagatttaagtcacaaaataagttaatcgttggttttttttttaatatacaaaactggttgaggatatatttctttaccaatctgctcaatctattagccctaactcataaaataaaccagagcatctccatccatacaatttttagagtttcttttgataaagataatataaataattaataaatgaggagagagaatgacaaaaaatgaagaaacgtttcttgagaaattttggaataatcagtgaaagactatttctataagtgtttgcttataattgaatattttttttaaaaaaaaataattacaaaattaaattacagtaattttttattttattttaaaaccttttaaagtatcttacagatgaagatgacctaatagtggaatactgccaattaaaatttaaaatagcaatggtactagtagttagcagcagcagcagctaatgaatgatttttcaaaataaagcaatctcatattcggatggatacaaattctgataaccaacacaataaaagtactaaagttaacaactcgttaacattataattattacatcaccatttataatccatttacaacgaaacaacacacttcagaccaaaaaaaaaaaacacaaaaacacaagcatatgtgacaacacgaactacattcatgattcatgcatggtcatcatcaccatcattatttattattattaccatcaacatcatcaaggtaacatatccatagacatcatattgacatggtcacgtgggattcatcgattatgagtttcactcatccaaaatagttatcaatttcgtcaaacaagtcttgacgttcatagaccggcgtcacatcaacgacgtcgttttcatcctcgtgaagaaacctcgtaagttctttcatgaacgcagtgttttcaacacaagactcctccaacatcatgaaatcttcatcattcagaaatgtggagaacccgatagtatcctcatcatcaacgttgttattaccaacgaaattatcgcagtacattagaggattgttaacggaggaatcagagaacgtggacgaagaacacgtcagattaacgttaccatcaacgtcaaagttcgatgaaactggtgttgttgcaacggtcccatggcagagaagattcgaggttggtgcgaaggaagaactcgttgacttaactgattcagagtcaacggaaacacttgtagttgtagtattagtagtgtgactagtagaagcaagtgggcctccacttccgataatctcagacagaacactctgattgattctctttccgaacctattagctactttgttcaagaaactagccgatgataatccaaaattcttgttgttcttcttcgccttgtcattatcaagatcatggtcactagttgtcagattaacattttgtttctccgggaggttttctgatttgtcggtaccggaggttatgcccttgtgtgtaactggatcaatacctttcttgatcaaacgttttttgatatgagtgttccagtagttcttgatctcgttatcggttcttcctggtagtccacgagctatagcagaccatctgattaaaaccacatataagattacaatattagtaaatgttaatgcaaacaaaaaataagtataaaatgtagaggtagagagactaacttgttgccgtgaagggcgtgaagagagatgattgaacgttcttcgtcttcagtgaactctcctcttttgatgtcaggtctaagataattggcccatctcagtctgcagcttttgccgcatctcttgagtcctatccaattagaagaattatttaagtaaaataattgagcaataatgaccaataaaggtccaacattgaatattcaaacatgacggaataaacataataaaaaataatacataccagctttttcggggagagttcgccatccaccttcaccgtggcggttaaggtaagagagaagcttctgatcttcctcgggagtccaagctcctttctttaaccctagttcagctttgcaacacggtgtccgcaccattcttgattcttcaaacttagctttcttgatcgagttcaaagggggttgttctcaagtgaaacaaagagggacaaaaaaacacaaaaaaaaaaactgagaggtgaaacaaagtgtgaaatggggcgtatgatcatagagattgagcacaagatcttttgattaaagaattcagacatcggtagattcttcgaatagacatcttgttcttttgtgatactcgagatcgttataacattgaacgagcagaggagaagagagatctagttgctctgttttcttaccacaaagagagacacaaagagaaggttttatagagagaatctttttttctctaaagagaactgtttgtgttacactttgcaaagtgggaaacttataggaaagagcccatctctatttatgcttgcctgaggctgtacgtgtggctgctgccaacgtcgtcgtttaaatatgactgacacatggctcattatgattccttaacgcaattttttataatcggattattacataaaagaaaaactgctaacttttgtcagtggacattttgacactagacttttgatctttcttaaactaatttattttattttgattgtcaataaaaaaatactacgaagacatctattatataatatcatttttcataatcccatgcataagaaccgccacatctgatatgatattgatagtagcaaaaaaaggggaaaaaatagaatgaatatagcaaaggttgctaaaaaaaaagaatgaatatcaagcatgcaaaatatgtaacgtaaaattgtcttgcctatgtaaatagctaattacgtatcaatttattttgaaatctatgtctgctatgcaaatagttttgattatgcaatccaaaatataaaatttattgaagaattataatacggcgccggcaggtccggaacaccaattaaattaaaatcctgttgaactttctcttcgatctttggagatattttgtattgacccgattcttgaccaaaattttattttagttttttggtattgaccgtcggtccaaagtatatatgaaactataatttctcagcaagtttttaattttataacgagtaaaaaaaaagctttattgaaattggcaacaaattttaaccaatgtaaaaaaacattttgaatttatcagaagagttaaaaaatgtctatcgaaatgaaaaaccacaaaggtacgtttccatgacagaatgaattcaactttaaaacttggagtgcgaggacttttcaaaatacgactgaactcttagtatttttttctctcaaatatttaaatatgcttaaacaatcatagagacgacaaaattataaagaaacaattggcaaactagcacacgaattgaaaattcgaggaaggtaaggtagagaggtacaacacaaaagtagtcgtatttgaactagattaaattaaagcaacaacttggtcactcaaacactggacttggacatatcgatatccattataccaaggaaaaatctaaggtacaaagaaagagataagctattttcttttttcgtacaactaatttccacttttctagttagacagaacccattaattagtcaacattgtgtttttttttctctctaatatgatatgaaagtacatacggttatgaagaaagctaaccagcttggtttacatcaacccaactctaaattcaatgattcatgctaaaagtatgacaactaaattacagtagttctttagtacaaatactaaaaaataatctcacctatgttgttgaattttttctaaacctccggcagaattatcagcggccacggtggcagctaactccattagtcgttcatagtcaatctcactacacttgtacttcagtttcataccagcttcaatccatgatctgatacaaataacagattgtgtgctatcatgaggcatgcaatacttctgcttatcaatctcttctcctttaccacaaaagatctcttccggtgcagcagaagtcgcctgaaccgcaaggaaatcccgagccatgttggaaagtcgcgggtatcttccactgtttaccttccaccaatcaagcacatcagtctgcattggaactatagactctgataagtactgagtcagttcatcaacaacattgttactcatacttcctcttcttttccttctagcgatttcctctgcaaatgagatatttcctcctccttcatctacctcctgaggacgatacccgctagtcattgaagatgtgaaatgagaggaagaatagttacgaatgaaatgacttcttgcttcatctatatagctctcgagattaatcgtctctggaatgtactctgttttgatccgcgggtcaagaatggctgtaatgtaagtgaatacgttgcacacttgagtgttgtaacttctggccttctgggccatgctctcagcacaagttcttagccagtctgggttgtggcatgatttctggcaagttgtgatcatctcggatatgttatccatgaagagcagtgctagaccaaccgtgagatccttgttcgtgcacatatcgttagtggtcttgtgaaatgaatccaaatccaagtaattgtggacaatagtcaccgcgttcttctctacagaactcaacatcattctgttctctagagcatcctcgtttttcctaatcaccgagtccaaggacttgctagcctgcagcaatataagccatcacatataaatatctcagagcttgatggcttacaggtcaaagttatagacatcttaccttgcacaagatgttgaccatctggtaattgccactccaacgagatgaagcatcgatgggtagtttccagttgccttcttgataagctgttgtcaactgaatgaaatcatcagatagctctgtggacgcgtttaactcttgtgtgaattctctaaccttagagataatgggctttatagttgctaacccctcatcaataatatcattcagagtttgagcggcacagggaatgtagcagaaaggtaagaccttttgaccatcaaagtactccttcaggctatgacaagcgtgaatagcgttttcgctgttgtcatgtgtacaacatagaatcctgtcttcaatggcatatgtcttaaggactttcaaaagggagttataaatctcagaacccccagagggataaggaatccgacatatgtcgagcagcaacctatgagacgaccaattttcatctatccattgacccgttacgctcatataaaaaatgttttcatatgaattccagaaacttaaagtgacagaaactttggactggatatgctccaaggttgtcttcacatctccccgcatacttgtgaaaacctcatcaagtatggctttatatttttcagccggccataactggatggatggcttaagaaatttgaaggagtttcccaaccatgtttcgtctacagtagagggaggaagtgatgacaaagcaagccacttgagaactaaccagttaagatgatcataatcgagttgtggtactttcgactgggattgtgacggtttaacaacagccggtggtgtctgtggtactgatgagctggtgacaacatctgctgctgccttatcatagcctggatgtcgattagtcagatgccttccaagatttccttaagagcaggaaaacagaacaagaacaaaaaatatgttgttagtaaaatcaaaaggacttggaataaaatgcagaggatataagaataataccagtagctgttgcaatggaatagctttgtccacagaacttgcatttccgagttttgctgtctggtgcagtctcgaaatatttaagataaactgatgtcattgtcttcttccgtttagggggaaccgaatttgacttatcagaagagcctaatccaatgtcaatgggatcagaatgtggaactagtgtcatgtccatcatggctttaggttccatttctacaccaagaagcagccacaaaatatcataagtggttctagtctcaattgaatgaacaaacacatacactgagaccaaggtaaacaagttccatactttatcacaaattatcagattgatgaatcttcatattcagttttcaatttacctttgtaggttttgaatgcattatttacattccactccattgattccaagcgtcttattagtctctgtgaaacgatccgtagagtaaaaaccgttgcgagagagagagggaagttatttttttggagggaaagcagaaacagcagctagagagaaagaggatcggcgctggatctatgagccacagatctgagccgatttaagggatatgaccttaggaggatcggcgagtcgggagattcgtcgatctgagagatgggttacgacggcggatccgttgatttggccggaggatttgacggaggagaggagctagggtaacgaggctggctcaataatcggtcggctggttttgggaattgagaagttgagaaagtaaaaggctcagctaaatgactccagcgaatggctcaggtctggtctgattttcggctcggataatatttaatttattaattttcggtttaacataccaccaaaattagtcatgattattgcttattggctcatcaggattttttttatgttttatataaatattaaatttcagttataaggctgattattttttattccgaagtgtatatatcttggaaaaagtgttcaatgagttggttttgctagaaagaaattataagaaaattctaattaattacataattcaaccaaaccgaaccgaaatagaaccaatgtatatcaactagtacattttatgattttcttaccaggacaattgaaactatttctttgattataattacttttcttatacaatgtgaataatatgatatgtcatggatcaacttaagctaaatttagtctctaacatcctgattaatcacagaaaggatttagttcttatgttttgtttggttttatttaggacaatcacaccaaagttacataccaaaccaaaatggtagatttaggcccaaatcaaaacggaaaacccaaatatattcgcatatttagaatttatgaaaaaagcaattatgttcccaatcgcacacctgtcacttatattaaaaaacaatattaactgggcccaaaaaaaagctatttatgaccgttacaataaagtttcaaaaaactctcatttttttttcttaatttgcgtttaatctaaagagtggaaaatagcaagcaattaatctacactctctcaaagctttttcattttgaccaacacacacttctccagtccaatcaacggcgtttgatcaatcatatatttcaactctaaagatcttcttctttgctgggttttgtattttggatggtgagaaaatcttagattctgaagaacgaaaaaagatgccggtatctactcgatctaaggtgatgaaacaggagcgaaacgagcaagagaacacaaatctgaatcttccgttgagaaatccacatcaagggttgaaggaaaagatgagagctttgactctcttgtacgagcagcaaaagagagcctctttctctctcaggaaccctaatcataatcagtctccgaaacctgaagatcagagattcaagactcagctgcttgattcttccaagaaaggagacagatttcatcgcctggacggtaaagattctacctttgttgaagaagataccaaagagaacaatgtatttgaagcagatcggatttttggggttagttcggttcctgttaagcctagtggtgtgattaggaagctttcaatgggtaatggagctagaaacgtttcggaagctgagaaattggagagtcttaatgcttctgtgagtcggattttggtgtttgttaggcttagaccaatggggaaaaaggaaagagagaatgggtcaaggtgttgtgtcaaggttttgaataaaagagatgtttacctaacggagtttacgaatgagaatgattaccttaggcttaagaggctccgtgttcgtcatttcacttttgattcttcatttcctgaaactaccacacaacaagaggtttattccaccacgtaagtgtaattcaaccatattgccttgaataatggatcttttgattagcattgttcttagatgtctttcccttttgatttattcagaacaggagatcttgttgaagcagttcttgaaggaagaaatggttcagttttctgctacggtgctacgggagcaggcaagacttatacgatgttagggacaatggagaatccaggtgtaatggttctagcaatcaaagatttgtttgctaaagttagacagagaagcttagatgggaaccatgttgttcatctttcttatcttgaggtttataatgaaactgttagagatttgctttcacctggtagacctctcattctccgtgaagataagcaggtaaacataaaactgacattacattttgtctctttgagctttagataagaattaagaacacaatggtctcattcgttttcatttctctgaatgtgaacgaaaacagggaattgtggctgctggtctcactcaatatagagcttactcaacagatgaggtttcttcttgtaatctatacattttccatttttaatgatcttgaaaaacaaaagctaatatataagatttgtttgttatggtttattgcaggttatggctttgcttcaaaggggaaatcaaaacagaactaccgagcctactcgttgcaatgaaacatcttctcgctcacatgccatccttcaggttagaatttgcattcttctcagtttcatattgtgtcaaatcaatagtgtatcatcgactttgaggccaggaatgtcttaggttgatcttttgttgcggttctctaggtaatagtggagtataagactagagatgcttccatgaatatcatcagccgggtaggaaagctatctctcattgatcttgcgggttctgaaagagcgctagcaactgatcaaaggacgctcagatcactggaaggtgcaaacataaacagatcacttcttgcattaagtagttgcattaacgcgcttgtggaaggcaagaaacatattccttacagaaactcaaagctcacacaactactcaaagactcactaggcggctcgtgtaacacggtgatgattgctaatataagtccaagcagtcaatcttttggtgaaacacaaaacactctccattgggctgatcgagccaaggagattcgtgtgaaggaatgtgaagtaaatgaagaggtggttcaagtgggtgaagaagaaggagctgatcaggctaagcttttgttagaacttcaaaaagagaatagtgaattgcgtgtccagctagcaaagcagcagcaaaagcttttgactctacaagcagagaacatagccgctgctaataacaacaacaacatttctctgacacctccatcaatctcatctcttatgactccaccgtctgcattaacagctcagcagaagaagaaaccaaggcattcgttgttatcagggacatgtttcacaccagaatcattgaaaaggacaaaagcagaagaagctgtgaaggaacttcagctgactgttaaggcattgaagatggagatggagagaatgaagagggaacatggtttgcagatgaagaagcaaaaagacgaattaatgaaagatctttgtagtagaaagagcgagaaaactccagaaagatgcaaagaaacaaggaggattgtcacaagagggagcttgagaccaaaggagaaggaaaaggaactgaaaagtccgagtcatcggtttgcatctccagttgcagcagctaaaaagagaagcttttgggacataaccgttgctaatactagtcctgcgttggatagaaggaaaacgagaagccacggtcttgttcatcaagaagctccttcaaaactgcttcaggtaactttactacaatgatgctataatcaaaacactctaaaacagtgaagttgttcatcaagaagattctgtgtacatacacttcactaatatgcttgtttggtttttggtgcagcccgggtttgctcgtccacacatgaagcattaacatgtttgaagacagatcagatctgatgttgactctttactacatttatttttttgtttgtttcctccactattttctaacatctgtattctataggaatatacatgacaatcacacaattattttctccttttcactaattttatttttactattatttcatcatttagcaatgcctctttcactgtttttcttcttttaaatttataagttagtgtctttattttttaaacgtaaatgttaaaaaaaatacttttatgtcacaaatgttaaaatattctaaacaaggatgatatgcactaaaaatatctatgaaccattttgtcttattgttctcttgtaatttattttcttaatatgtagatttatttagtgtatcatataagatagtaaaatacatgaatatgttttttttaaaaataagcatagttaacaaaataaaaaattacacaaaattatttgtttttaacagaattatttgcatgccactagaaacccatatcaaaccattaagggtagggaaggacgctatgcagaggtgcaattcacatcggagaaccatgcagccaagattgttcagctagcccgtctatcttacaatagaaacaagctaaaggtttataatttggagttagatctctgccgtgaggatagagctacagttgaaaacatgattgagttgaggaaaagtttatttcggataccaaactacgcggaaatattctagtggctaaggcggggtgtttcctctctgggaatatgccaaactattagagttattttgaaaaattattcacctctccctaaactgggaagcaattccttatcgaataaagtttcattttggaaacattagagtagcgatgttgcattaaacccatataaggcccattaggttttatttttgccgctatcgtccttatatttaaaaactttcgactgtcaattagggtttacgccactaagagatgctggcggcaaaacagagaactcccaaaattaatatagaaactttattttaaaatatataatatataaaattttgtatgttgtagcatgggtcgagatacatatggttttatatggttttaatttatataaaataaaaaaactgtacaaaccaatcgtaaccaaatcgaattacatacagtttctatatggttttagtttttataaaaccaaaactaaacctaaccgaaaccaaaccaaaccaaaaaaattgtacccctatccctataacaagtaaatatttgtattatgtatagaatgattaaaattgtattataaaacagacaataatccaactttaaataaatatttaaaaattaatttttctccgtgctaaaccaaaacagattatgatctagtgtatactttatgattctttttcttatacttacgtttggtgtcgtgtattgtgttttttaaagctatataatacgtataagatataattgtaactcttactttatgtattatatgatgattcaaaacaatttaaaaagttaaacaaatatgatagaaaagtcataattttaaactttaatcaaatattctaagttttaactatgtatattgttaaatatgaaatatccggtgtaagagttggattaaatataacttatccaacaaaatttttatgaacaaaattgtttaacgggatggataccatttttatcaagaaaacacttttacttacccgccaaatagtaagtacaaaaatacttcatgtaaggcccaatgttttgcaataaaaacactttggtactaaaaatatcgagacccccatattaaagttttctaaaccatataagggcccattaggttttttattttctgctatctaaaagctcaatttagggtgtttagagctacaatggatggagttgaggaaagtttacttcggataccaaactacgtcggaaatattctagtggctaaggcggggtgtttcctctctaggaagatgccaaactattggagttagtttgaaaaatattcacctctccctgaactgggaagcaaatccttatcgaatggagttttcttttggaagcattagagtagcagtgttgaattaaacccatataaggcccattagattttatttttgccggtatcgtccttatatttaaaagctttcgactgtcaattagggtttacgccactaagagatgccgacggcaaaacagaaaaatcccaaaattaatatataaattttattttaaaatatataatatataaaattttgtatgttgtagcatgggtcgagatacatatggttttatatggttttaatttatataaaataaaaaattgtacaaaccaatcgtaaccaaatcgaattacatatagtttctatatggttttagtttttataaaaccaaaactaaacctaactgaaaccaaaccaaaccaaaaaaatcatacccctatccctataacaagtgaatatttgtattatgtatagaatgattaaaattgtattataaaacagacaataatccaactttaaataaatatttaaaaaataaatttttctccgtgctaaacaaatacagattatgatctagtgtatactttatgattctttttcttatgcttatgtttggtgtcgtgtattgtgtttttttaaagctatataatacgtataagatataattgtaactcttattttatgtattatatgatgattcaaatcaatttaaaaagttaaataaatatgataaaaaagtcataattttaaactttaatcaaatcttctaagttctaattatgtatattgttaaatatgaaatatccggtataagaattggattaaatataacttatccaacaaaatttttatgaacaaaattgtttaacgggatagatatcatttttatcaaaaaaacacttttacttacctgccaaatagtaagtacaaaaatacttcatttaaagcccaatattttgcaataacacacttttgcactagacccccatatgaagcccatattaaagtattctagaccataagggcccattaggtttttactttctgctatataaaagctcaatctagggtttatgtctctgatagattttacaccaccgaagccgaaaaaatgccggcggcgaagaggactcccaaggttaaccgtaaccctgacctaatcaggggagttggaaaatattcgaggtctcagatgtaccacaagagaggtttgtgggctatcaaggccaagaacggtggcgttttccctcgtcacgatgctcagccaaaggtcgacgctccggttgagaagcctgccaagttttatccggcggaagacgtcaagaagccgcttgttaacagacgcaagcctaagcctaccaagctaaagtatttatccatcttcttcttcgattggtttttaattttcatttgagtttgattccgctagatctagtattagaatggttttggatctactggtgatataagagagaccatacaaattgttaggatttttagaaatgtaggattcctagagattatggctatgcttcatttttgatatgaatatggttttgtttatctctgtgttgcagagccagcatcactccaggaactgtgttgatcattcttgctggtagattcaagggtaagagagttgtcttcctcaagcaactttcttctggtttgcttcttgtaacaggtgaactcttatctctcgatggtgttggtttgattgttcaatttggaacctatgttaatgtttgtctttgttgatttggtcatttcaggaccattcaagattaatggtgttccattgagacgtgttaaccaagcctatgtgattggaacctccacaaagattgacatttctggagtcaacactgagaaattcgatgacaagtattttggaaaggttgctgagaagaagaagaagaaaacagaaggcgaattcttcgaagctgagaaagaggtatacaatcatcttatggatatttggttttatccaaaaatggttattatgtgttttcttgtctttgtaccattacctaattgaaaactttgggttgaacaggagaagaaggagatcccacaggagaagaaggaagaccagaaaaccgttgatgctgctctgatcaaatccattgaagctgtcccagagctcaaggtttaccttggagccaggttctcattgagtcaaggaatgaaaccacatgagcttgttttctagatttcgtattgtttctcaaattttaagaatatctgtttccctgagtattttcatctttaatcgtccttggatcttaaagactattttctctgattttatatatcaaattttcgagcaatctagctttaagacctggtgttatgaattcgattttctataaaaatgaataaatgaaaaagcataagaaatgatcacgaattaatttttaatccaaagtaatcaacagcagattttgccataattgaagcaaactctccaaagcttataacaccatcaccatttgtatcagcttctttgatcatctccgttaattctttatacgttaatggttgacccatcttggccattgctcctgcaagctcagccgcacttatgaacccgttaccgtctctatcgaacgatttgaaaatctcgagtaattgctcggaattgattaggacctcttcgttaagatcaggaagaattgtaccaacgagctcatcgaattcgacaaaaccgttgccgtttgagtccatgctagctaacaaaacatggatttgatcgccggaaggtttgagaccgagtgaccggagaagtgccgcgagttctaagattgttaagcttccgtctgcgtccatgtcgaaccggtcgaaaatgtctttaagttgtcttatctgatcctccattttttctttctttctttagcaacacaaataaaaatcgattaatcaatgttggcgacgagagagattgatgagacaagaggttatgattgtcaatgaagggtgtgccagaaaggagatttaagattgaagttttgtttctttttgagcacgtagaatttagaattctggatcttttctatgttttaatgttttgtttgttcttttctttttcgttggtttgttaatggttgctgataaaaatagataagaccacatattttttttttgtttgagttagattggtactgctattgaaatgtgaaaattcataatgattctttttgcctttttggtaaagaaaatcatattgattgtggtgaa

SEQ ID NO: 1133 - DNA, 87508 bp, Arabidopsis thaliana
gaattctcctttttattagcaaacaagaaattctcaggtttcaaatctcgatgcataactccattagagtgacacatcatcacaacctcagcaatcgttctcgcaacagctgcagcagcacgctccgtgtaatgtcctctagcaacaatccgatcaaaaagctcacctccttcacaaagctccataaccagatgcacgttctcgttatcctcataactagccttaagcttaactacgtttggatgctcaggtaaagtagacataatcgctacctcacgacgaacgtcttcgatatcgacagctgttcgaagctttcgctttgaaatcgatttgcaagctaaagcttcgtgggtttcacgatcagtacagaggtaagtgattccgaattcgcctcgacctaattcacgacctaagatgtatttgtcgctgatctgagtttgattgctcatagggattacatctttgagaacacgtattggagctggggatctggtgaaatctccggcgaatgggtttaatttccgatctcgattgggttttttcggctttgaagatggttttgattcttttgagtctggccttacacaggcgttacagttacccatggctgagttaagaaactcagcaaactcagagaaaggagatcaaggaagaagaagaagaaggattatagaagaaaaaagcttatctctttagttcatatggacgccggaagtgacggtggcggtgattttccggcgaattggagagttgggttgggagggggagagaaaacgcgggttcaggtgaggaaaagtcggacctttcgaaatttcggattttgtttgattcaattaaaaaaaagggagtctttgatttttgtgtatagtaatatacagtattagtttatgatgcatttaataacttgagagatttttctaaccattgcaccatcttcttagaaacttgtaattttttttcaattttttttttcttctagatggattttttggtccaagcttatgactaatagaattcacttctttattttttggttgaactcagtggattaactcttgcatttttcagtggttttataaacaaacaaacaaaatcatttgtattttcagttattattattataagtttatattgatcatattatagttctatcaagatgtacaaatgataaccgacaacaatgattttagaaaattcaaactcttagatttaacagcatcagaaaatttaaaggttggatttcaccaaattaaaacctaattaaaagagcatttattgaaaagaaatataggcagacttcaaaacattacggccaaacgtataattaacagtttagcgaggaggacaatgttagccgttggtgtgaattaatggtaatgaaatgaagggataagattgaagttcgaggaagagagttttgttgaagttgttgaccagcgtggtggatacggtgagactctgagattgtaagacaaaacaataagtgcgacgttgatcccaaactattttttaaaaattattttcttctctagagatatacaatgtacgtaaaatagaagaaaaatcataataatattttatttatagttttgaatatattttttttggagcaattttttgtttctaatttgcattattttgaagtctagttcttttctgtttttgtatgtgtacaatcataatctagatgctaggatatgaagaaattcccgacagaaaaaaagaaaggataggaaaatattgtgtgtatagacttcctcaattatgagcaatacttattgtgttgtagaaaataaagcaaagttatataggtaaataaaattcgaaaagaagaagcaaagtacgaaatattccattaatggaagtcaacaacaaatttaaaaacactaaaaatcaatgaaaactatgtttctttggcttagaaagtagaaaccgcaagtcgtcctatcctgacttcgctacaagttcaattgtcaatgtcatactcgttttctttatcttggttttacattacattaccttggggatttggataccattcaatccatatataagaaaatgtgtgttgcgcgtctatattccaaaagacctaattaatatatagtagtaagaattttcacaaaggattagagattgaaactttattttgttcaatgaaaatggtctttgatgatggatgtactaccatgaataaaattttagactttaattttaacaaaatgaaatgtgtgatttaatgtcaaccacacagagcttaagtgcttttgtttcaagggacatgtggtggattaagtatgcatatatcattgcatacgatgaaatattttaaagcaaactacatagtttttatatggataattttatatatgtatttttttcaatgattcgatcaaattaatatttggtaggtcagaaaaaagcggtttcaatttattgcccaactagagaccttccaccctcctatctatgaacctactaaaaacaccaacaacttattcgtggaaaactttatcggttttttgttcattcaagtttcaaaatggatatttatacaacataatctcgaatttagattattttaaatcctctgattaatcttccgaagaagaaagaaacgatggacatgcttttgtcgtcggcaactttaaagctggcataacttaaaatttaaaacagtaaaagtgacaattatatttggaaagagtgtgtctttttgctgaagagaatgattatgtttgggaattgtgatgatgtgttctattcaaatgctgtggctgcatgtgttctgtatgtatcatgcatgttgttacgccaacttttccatctatgtataagttcaatcacttttcataaatcatacatacaaattatattacagctccaaaagttcaattatactctaaacaaaagagatgtaatccttaattattgccagaagtcgaatttattagtattttagtttcagctgtaacagtctttataagttactctaatatttttctaaattgtttttgattttgttttgtgtatgagacctctcatcatgcattttcagattgcagtacataatctaatgcatgtgtgcatctgtgaattttctcaagtaagtgggcttttaactttgtaaacataacgggctaatgggcctaactagattgaaagatgtattgaactaagcctagtatgcagaggagactttgcaccttgcttggagaagaggattagcaaactctacaagacaattattcttctttgattatagagtttttttaatcatataatgcttattccgctaaaagttctcgtttctcaacttaccaccaaaatctgaatagtcaaaatacaactgaaaaagaaactttctctgaccactagagtaacaggacagtcacgggcaagacatgaaagcaacgccacgtgtaatagcgaagacttgcggaacatttttgttgaagacttgcgaaacttggggagggcaaggcttctacgttgcaattaagaactaaccaaagtggaaaataacaaaaagaagctcaatttcttcttctttttagtcaaagccatatattcttctataactccataaaacacataatcctttttaaaaccacaaaaaatacttcgaatttatcatgtatcaaacaaaatagaaatatttactggctaattgagagaaagaagttatgaaaggggaataaaaaaaactattaagaatggggagaattcttgtaagaataagactattaggtgttatttggaaactaattaaagatgaggggtatatttgaaagtttaggtaagagaaatgaagtgaaaatataaaaggagagcaaaaaaaaaagttgagaccttgaattggcagcagcctccgtgtgtgtgaccaaatatgcttggaggagagtagaagaacgcttcttctctcaatttcgacgacaacgtgaggaagaagacgaactcgtctctctctctatttattttcaatatcacctggagaattctgcagggacatcaataatcataacctaacaagttaacgccaccgtttttcaggtgacttttgtgttctattgatcctgcttaaaatctcacctttgttactaatcttaatcagtgcacgacgatttctgtttttcgttttttgcgtttccattacgatgggaataatgccgagatgggtttctgggtttaacgcgtttctcgagactttagctcaactttgtaaattaaaaaacttttgatgaccggtagtgagattcgaatgtgatcaagtagattctaatgtgaatcagatgtcgaaaaaggattcttatggtgacaaaatcgaaattttgagcatttggttagaattgaatgttctaatgtgggaagcagagaaagtataaacatttgctcttatttcgaagtgtatgatgctttacttgtgagtgtatgcaagaaagttggagaatttaaattgttgggaggaagctagtttttatagtaatgttcaaagtttggagaagagctaattgggtatgtttttctaatgtatcttctaattcattggttggttctatgcttggaaaccgtcagttttagagtatgtttgataatcaattgctgtgaggttgtctgaatctgtgatttttcatttgtaattttgcagaatgatacgcgctaagcatattagtaacctttcaagtacagcaagatccttttttctgaatggatcgagaacaagtgtaactgatgggaattcttgtgtgtactcggatgatgaaaattgtgtctcgaaacgtcagcaacttaggaaggaagctggacagactgaaaaacgaccatccagtatcctcccaaagccttcagttgtgggatgtatattaccaggagaggtaacaaaaccagtggttccaaagaaggttgatgattttggtcggccatctctattgccacagcatgtttcttcttcccctgccttgccgcttaaatcacattccgttaactatgcatcaaccgtcgttagagaggaggtggaaggtaaagcttcttcagaacctattggggatcagattttcaaggctggtattgttgcagtaaattttctgtcagatttatcgaattgtaagattccttcatatgatggaggaagcgatgcatttggattaccgaaaagctgtatggttgatccaacacggcctatttcaagtgtcaagtcgtcgaatgtgaaagctataagaagagagcactttgccaaaatttaccctagatcagctgcaaaagagtcgtcagttggtacaactagaaatcccagtagcaattttcgaggggccaaggaagctgaaagaactgggtttgttaaaggattcagacaagtttcaaattctgtggtaggaaagtcattacccacaacaaataacacatatggcaagaggacaagcgtgttgcagagaccccatattgattcgaacaggtttgtgccaagcggtttcagtaattcttcagtggaaatgatgaaaggaccttcagggactgctctgacatcaagacagtattgtaattccggacacattgtggaaaatgtttccagcgttttacgaagattcaggtgggggcctgctgctgaagaggcccttcaaaatctaggtttgaggatagacgcataccaagcaaaccaagttcttaagcagatgaatgactatggaaatgctcttggtttcttctactggttaaaaaggcaacctgggtttaagcatgatgggcatacttataccactatggttggtaatctcggtcgtgctaagcaatttggtgcaataaacaagctcctcgatgagatggttagagatggatgtcagccaaacacagttacatataaccgacttatccacagctatggccgtgccaattacctgaacgaagctatgaatgtgttcaatcaaatgcaagaggctggatgcaaacctgaccgtgtaacttactgtacccttatagacattcatgctaaagctggatttcttgacattgccatggatatgtaccagagaatgcaggcaggaggtctttctccggatactttcacttacagtgtcataataaactgtcttggaaaagctggacatttacccgctgcacacaagctcttttgtgagatggttgatcaaggttgtacccctaacttggtcacatacaacatcatgatggacttgcatgccaaagcgagaaactatcagaatgcgttgaagctttaccgtgacatgcaaaacgctgggtttgagcctgacaaagtgacatacagcattgtgatggaggtgcttggacactgtggatatctcgaggaagcagaggctgttttcaccgagatgcaacagaaaaattggattcctgatgagccagtttatggtcttttggtggatttgtggggaaaagcaggtaatgtggaaaaggcgtggcaatggtatcaagcaatgcttcatgctggtctgcgacctaatgttcctacatgcaactcccttcttagtaccttccttagggttaacaagatagctgaagcttatgagttattacaaaacatgctggcgcttggtctacgcccctctttgcagacatacacgttactcttgagctgttgcacggatggtcggtcaaaacttgatatgggtttctgtggccagttgatggcaagcacaggtcatccagcacatatgtttctcctcaagatgccagctgcgggtccggatggcgaaaacgtgcgcaaccatgcgaacaatttcctggatcttatgcatagcgaggacagggagagcaagcgaggactcgtggatgcggtggttgactttctacataagtccgggcaaaaagaagaggccggatctgtctgggaagttgctgcacaaaagaatgtgtttcctgatgcattaagggagaaaagctgcagctactggcttatcaatctccatgtaatgtcagagggaactgcagtcaccgcgctgtctaggacgcttgcttggttccgtaagcagatgttagcttcaggaacttgcccttctcggattgatatagtaactggttggggaagacgtagtagagtcaccggtacatcaatggtgagacaagcagttgaggagctgctgaacatctttggttcaccgtttttcacggagagtggaaactcaggttgtttcgttggaagcggagagcctcttaacagatggttgctgcagtctcatgttgagaggatgcatttgctgtgagtttttgtatcacaatataggctttttatatttatttattttatcttttggccgattgtgtcttatgaaattgttttagctagtaagtcataagttaaggttagagctagacaggatggagtgtctctccagtcttttgtcctcagcttctcagttgtatcttcctctcgtaataatttgagattacttgaaacgatcgaggtgtaaacaattatctagatttaataatatgtagagtattttttttcatacaaaatcaaatgcttccaaaaagaaaagaaaaacttgttaaaagatttgcagatgtacaaagaagaaaacaaagaaggaaaattggagaaggaactagaaaagtctggtgttgtaggaggcacaagaagaacacttgtgatagagccaatggtaaggagcattcccctttcttccacagtcattacacagtattacctgcatccatttatccatatgcttaagttaaatttagacaatggaactgataatttgcattaagtatcagtgtgtgagaacgaaagatgaacctgagtttggtttaagtattcatctggcatcttttgttctgcaagcagtgcgtctaacattctaaagtaaacctgcgtgagagaagacagttctttgattagtgaatcacctcagtgtttgatcatcactgtatacgttgagatttttctttttaggagcatttgataaaatgctcccattagctatcttttacgcgactattattagtaattgtttaatgagagaaccagactttggagtatctaacctgcatatccccgagcgacttgctgcaaatagggcatgtgtaatgcgaacatgtgtactcctacaaccataaacatcacacccttaagtaacattcttagcaaatgtgtatcaagtgtttcatcattgcatataacaaaccgagaaagtaaagcacctgaaagcatgttgaatgcatcacgtgaccgcatggaagagccttcaccggagaatttgaggtaaatatgtattcatgacaaatcggacaattatcttctaagcacttttctctgcatacatgttctactatgagtcgcgacatacaagcattacatttcatgcaatgaaagtagtctatgctcagtccttttcctagccggcagagattgcagtatggacaatgatagatttccctgcaaagaaaacctttagccgtcaaaaactactccagttttgaccagacatcagaaatgaattgccttatgaaatagtcgtagaagatttacctatcatcgtcaaacaacttgcatattttacagtaatattttcccattgatgaactacatgaaatatttgagcaactagcacctactggctgaattatcatgcatttcatgcacatcatctttgtgatctgttttctgcacaagtatttaagaaacttaaagacagatcaaggtgtaacaaaagttgctgatgtttgatacaagaaaatgaagcacctacctatccaataagtgatcaacctcttcatcatggcatcgtatacatgtgtagagcttgttgcaacaaggagcaagaagtttgcaacttctcttgtagtgtttgcaaccaaagatcagtttgtgaggatctcgataagatggattctgccccggaactgcttccctattgcttgagagaatggatggttcaagattatatatccgttgtgtagcaatccaacggctgaaaaattacacaacctagtgtaagtcaaaacaaagaacatagacaaagtgctttgtaaagatgattcttgcaacatctacttagcacagagttatttagaaagtatattttttttctaaacacatgtgtacttacctcattaacaagttttgaatgatatacgatttcttctgaggatccagggaagaatctcgagatattcttcgaattgtagcttccacatcctcttgactcattgataacagacactcatatctactgtcttggccagattggctagtattatgcgacatctgaaaagcttgcgcgttgctgtcagtttgttctttgtacttcgtttcatcagctcctgtacacacctttttacttcctgagatctcaagatgattctcctctttgtttccaaattctaccttgttattaggagcagcctttccaagaggcttattcatgataccttttaactctgtctcttccagaggtttgctgcaaatgctccctttgtactcatcagcagctccttcaaagagataactccagacaacgtctaatggatctgaattctcagatggatccttatttgcttcctctgtttcctcctcgacagcatgagaattgtaccattctgttagccattcaccaaacatagttttccttgttgcttgtctccacaaggacatcacagcatgttgttcatcagggatcaaagattccattagccatggaatcatatcttgcaatatttctccacttattcttccaagcatgcatgctatgatcttttcttgttcttcaatagtgaagcagtctctgaataaacaccaaagctcagtttcttctcggtggagatgctcagacaatagcttgtgaatggatttgcatatatcctggaggctcatacacaacttctcatacttcacattcttgtggtctagtaccagcatgttcaattctgccaactcattcaaaaggaatgatactttattgaggtgctcaacttcgagttcgtgatcgatactgtatgactgactaatgttttgtagtttaccctttgcctccaaagctggaaatgcaatctcatcttctgcatctgaatgtatctgatacaagaactttataagatgaaaccgctgttgaaattctccaaggaagctataatctgttgcgagccgagctgaaccacgtacaaggtagtctagatctttcttcattgccttgtggaagtagaaaatcagatcgattggtttcaagtccatagttaagtgttcaccaatagtcttgtcaccaaaaagatcaggaagatgcagaagtggcctgagctttcctgggataagtatttgctgattcatcgcacttgagtaaggtgtctcattcatgtaaccagcaggtggatccatagaatagggatcggatactttgaatagtttctgcggtgattgttgaaagaaagatccagaagcttcttcagtgagttcctcttcaaaagaacatcttggtttgaacataaaggacagctcattccagaaactttcaactggtgttttgcctgaataaccgaagcgaaaccactgcaacaagaggtgcgcaaaaggtttgttgggaaaggaatcttcagagcttaagtagtgaataattgattgacattcatcttctggtaactgagcagagaaccacattatgacacacttaagcaatccaagaggcaggaaatggatgcttctatatagtagttgcctctgcatttcaatgttgcagttcttgctgatgatcgggaatacctggagaagaacaatgagtaaatactttaaatgtaatctctgaagctaaatatgtcaaagtgactagtcttcaaaaacatgcaattctattttagacaaaatccaaataataaatcagctcacctctgtttcctctatagagaactgcttagctactgtcaatataagagactccagtttctcctgaagggttatgacaaaattgtcactccctgctctagtttcaaggtctagtgacttcttgaagttttccacatgtccatctatggtgaattgtttggaagaggaagagtgttgttgatccaccatatcttcaaacactgggtaaaagaacgtcttaaatgcattgctgaaatgaagtacgtcaccagtttctcagagaaaaggaacaagacaagtccaagagactacacaccatgtcaaagtgaaagaaacaaaatcaaagttccccaaattattacctataaaagataaggacatcagcaaggaagtttagccgaaccaccagaacattgaggtccaatgaaaggcttggaaatgtcaattggcatagtcctttttgaatgtctaccaaatcttttctaattgcattatgccaaagatggataccatgaaccaaaatgtgtcctgtatttggactagaaaaagacatttttttactccactgccaaaaacgttgaaacacaccacttgatgatgaatttgtctgagagttggtcatattttcagacacttctacagactgaactcctttcataatctttgtaagagccgtcaaagaagattgactgtcatcaatcagccaagagtttatgaccttcagaaataatttagtcttgtcacaataacaaaaaatgaaagagactaaagccatatctcagtattgaatataccataccagttgcaaagagagttcatttgggacaacttctttgaagcaagtctcaacttcagatttctccttgggagagagtaaagacgtcatccatgggaaaatctcttccagcaccatcactggaacactacaaatgaattgccacactaacgatgcctgttcttcaaaggagaagttctcaatcatcaaaggaaacacctgcatcacagagtatggtagcagaaggagctataagatagtttctgagtcatatgcaaaagaatgtgtaattgtgacaagcaaaacctgtatatacctgtcgttcttctttaagcatatgttgacatatggatgactgaatggttccaatgcataaaacaacttcacgaagtacatcggctctgttcccttgttcctcttcaagaacattcagccaatgaaaaactgaagtgaaaagatcatctgtggcatcatgttcaagcgagtaattaaaaacaatgttcttcacacgagtgtccaacgctgaaaatataacctgccagttaaacaaacattaagtaagggattaggaaaactaaatcagaatgattcaagttcttgatcttataaactatgtgaactcactcgttgactttttagctctatgtaagatggtttaatcttttgttttgccaattttgacaacaaagacaagcagagaatttccagaatctaatctactagcaaaaaagattacatctatttaactctttattgtcctaatatgaatcatcagtacctaaaatgcattttttttgctaatttctacaacaacaaaagttaaccgttttgtattatttccgacaatactcgctagaaactggtgaattagagagtatatcctatgttttactaaaacgattttttgtttttttttaatctccatgttaagttctttagtgacttttagtagctcaagatctaacctcatcttcagctgcggaatgatacttatatacaagcttaagaaactcaaacttagagcggagctccacggccagatcagaaccggaccggactgtatcaccggccagaaactggagctccgctagctgcgcacggaaagccttatggaaataaacaaacaaaagaatcggagcatcggacaaccgagcattattcaccgccgaagcggaggaggaggaagtcgacgcaatatccggcggtttattaacctcccgacggttcttttccggcggaagtggaagaggatctccgactcccatccaccatgaacaggagaggaggtggtggagttggaagacaagagaaaaacgaggaaagaagaagaaggaaacgcgttgacgagaagagaaggttatttaaagggtcgatcatattcatcgtcgtcaagctcttctcttctctaacttgtctcggatttgttaattaatttttgaggggttttagaggttttttattataataaaagagtgatggagacgttattaaacgtaacaacaacaaccaagaaggcttttatcatacattggcgggatttatttacttcttgtccccatgtgatcccccatttttctatttgtcctttactatttttctttcttccaattgtaaatttatctccgacataaacattattttatttttaatccagtgtatggatccaatttgccccaacaacaaaaaaaatgttatgaataaagatggatgcccattataaggcccatcatctaagcccatcatctagatgtttctagggttttacccttttccttgtactcctatataaagaaccctttatctcaatggaataacacactcatttcttctatctctttctctgtttataacacgttatcagcacgctctaaaaggtagatatagagattcttacatttttaagaaccatgtttacttatcgactcatggttcataatacttattttctattattgaaacaaaacaatatgagccgatcgatgattatagtatagatcggtaaaagcatgttttcaatgattcaataaagaagagaatcatgcttatcatttgtttctataattactatcgcatgattcaatgattctacaaagaaaatcgttaaagaagagaatcatgcttgctaattgttaatttttgtgatttactattacaatattgaatatataaattaccaattttataattatataactaattttgtaactattcatagcatggtggtgggtgatgcaagcatgtattaatgttttagcattccagttttgaatagttgcatctatattcaatatcattttataaatactatattgtctaaaatccatttatgattgatatgatatcccttatttaactcctttgattaaaacgttatacatatcttatcacttttagatattgacttttccatattaaatatttgatttccatatatttgattgtgttattattatttttactaaaaacgttgcaagataatttttctttttataagattccatatatctaaatctttgtgttattattatctaaatctttttataagatttgcatatatttgattgtgttattattatttttactaaaaacgttgcaagataatttttctttttataagattttttttctctaaatctttgtggtatctaaaaaaaaaaaaaaaaaaattgttcatggttttgccctaattttgcacgaaattattttacctaaattttgcacgaattcatattaccctaaataaaagttttgtcaagatatatgtaaaatccagattttgcacaaaatagttttattctgattggttttacaatattgcattaaaattgtattagtatataatacttgattattttatgaaataaattgattgataaataacttaatttaaaggtataaccacttatagaaattttcatgaatgactagtttaatgtattttaagaagatatcatatttttgatggtcaaagttttttcaaaaacttaaattatcaccagaagttgagaaaataaatataaaaaaagaaaaaaaatttctaacgatgaaataatctagtatatcaagtagtataaaatcttattaaaagactctagaagagcatatacattgttttctatgggaatacaaaattaaaatcatcgatgcggtatagttctccaaatctcaaagttaatatgataagatataaatacattatgattctagagtggaattcaatacgagatggatgaacttgaagtttcatcatctcgagaaggagaagtaatgaatggataataagtgacatatccagaagattatgttcaatctttgactactaaagatctaaaagttgtataaagcaattcttatatgaatttgttattagataaaataaattataattagttattactaaaacttcaagacttgaagtctctttttgaatataactcacattgttaagagaatatctctgatgcgaagatggtaaaacagacgattaaacttttacgcaagtatcgttgtcctgtagacacaatatttgaaagaaatttaagaactattatgaacttaaatcgagtgtttttcaaaggctaaaaaaaaaaaaatatatgagttatctatgataagtaatactcatattctgaagtgaatataagatcttacatagttagacaaatttaatatcgtttatactagaatataaaattttaattattatctcgttattgttttattaacatatgattgattattaaaatacatggaagtaattttgattataagatctcattaagggagtaactgataagcaatgaaaagtaaattagaagttttgaaagaactacaagtttcaaaagaattaaaagtttcaagagtatatttggcttaaccggattggtcatcctggtttaatgatgatgtgaaagtattgagaattatgtggacattaggtgaaaaaccagaagattctccctaatgatttatcaaatgttacttgctcagaaagcaatatgataatgtgatttttaccagtgtaagtaatttggactttatctattcgtaagtatatacaaggagatgattatgggttgatcacccactatatgacatttagatacctaatgggtataaaagatgcatcgattcaatggacgcattgactcgattgttgcatcgacaagaaggtcatatttatccttgttataaacccgcaacatagagtttacgagattactttcttgattaaagtacaagagtatttcagtgtttatttataataaccattattggatatccgttgggataagtgtttaacattttgaaattcatgttcatacacaaaatggtttagtaacatcgatacgcatcaagccaatgaataattaatagttttccccattattattggttttgggtcagaaaccaaatagttttcatctaaaagctttgaatgtgaaaagtgctccaccacagcacgcagagatgaaccctcaaaggaggataaaaatacatgttggatatgaatgataactaagccatcctagaaggatttatataccgctcgttttgaagactatcatattatatagtcagctattccaacataagggggaaaatgtatacagctggtgaaaaagataaatagaaatgaattatcaatgatcctcggagtaaagaatgtatattaagagtccaaaagataattcaattacagaatttagcgttgtaattgccagacgcatttgctgacccaaataaagtgatgaagtcacttataccagttgtaaattaaatgctccagaatataatgaatgtcctgtaaggaccaatttcaaactgctattgagtcttaagatcgcatgaagcgtaatagaccttggtttcaaatataaatatcctcgtaaaagtgaaggagcacaaaattaaaaatgaccaaattgaggaaatatatattttgatgatctcttgaagagagtgaatgatctctaaaagagacataaacatgacaaatgaaacattcaagtacttgacaatgaagagatctagctagctatgtcatgtcaaaatataatggaatcaaaagcaaatcgacgtcgtaatatatttgcatgctatgagcagttgatattatagacaaaaggaggattatgaaagaaagtctattgaaaagtgtacacaaagtaatgattagccaataaatggaaaagaagaaatagacatataattataatctctagtagagatatttggactagtagtctatgcacatgatgtgtaaaaccagtggaaaataaatgagtctttatgtgaaagaatagtgaaattaatgagattttcacaaagataagaaatgtattatgaagagatatattctcttgtggtggatgtaatattttttaagtatctaaagtctgacaataagagacggaacactggatatgacatttatatgaaattcttgaaagatataatctctgaaggattaattatatgagaattatgttctctagaactctactcgatcgaataaaaaaaaaaaaaaaaaaaaaaaaaaaaagaaatatgtaacatgacatataatcatataaatgtatatttatgttgagtttgtcaaaatctattgatcaaactaatatttgttttgaaaatcattaaaactcctacagagttatcataagtaatacgatgacaataatgtatgataaaatatcactagataatgatatttataagtctatatgaaaaccatataatttggatcattaagattatggttattaattccaacgagatattgtatttgattgaaaatcatctcctgaagaagatgtttccgagggggagattgaatgatatgcgtggatgtaccctttttccttatcatagtttttatcccacatgatttttctatgacaaggtttttaacgagacactaaagaacacgcaaataatacacttgatgaatattaggaaattctatcaatcatccaaatgaatattatacactaatgatatttagagaaataaataagatggtcaagatgaatcatctaaaagattcatgagcagcagaagaatggggttgtactttatccagaaatttgttcaagagaagaattggcagacttattctcaaatactgtttaatcatgcagagattttaccaattcatgaagatagccgcgagtgtgtatggctaagatccatagttcaccatatacaagaagactgtggtatgtatgcagaaaaaagactccaacaattatgtacgaagacaatgcagcatgcatcgcacaactcaaagacggatacatcaaaggcgatagaacaaagcacatcctaccaaaattcttctacacacacgatctacaaaagagcggcgatgtacgagttctacagatccgttcgaatgataatctggctgacttattcaccaaggcgctacctactgctactttcaagaagttagtctatcgtatcggattacgccgtctcaaagatctcgacgaatatactcataagggggagtaattgtatgttgcactctttttcccttaaccatggtttttcccattgggttttcctggtaaggtttttaatgaggcagcatttcaaatactttacgagttatgatactataatggtcatcagggggagtgttatgaataaagatggatgcccattataaggcccatcatctaagcccatcatctagatgtttctagggttttacccttttccttgtactcctatataaagaaccctttatctcaatggaataacacactcatttcttctatctctttctctgtttataacaaaaaagaagttaaaatatttgaattttgctaaatattttgacgtggccaaatacaaatgagtcattaaaataactgacgttcattggatgatcccgtgaccatccccgttaactccgtcttcctctcctacacgtgtcatttgtggctgtagcgtgccaaacggcgaaccaaatgggccctaatccaatagtcatcaatgagcccaataatggatccacatttgttcaaacaaatctcaaattcgtgcatgtcagtttgcgccaagaggtggaaaaaaaagaagtaattctgtctttttcttctccggcggaaaaatggcgacggagattctgagaacgaaatggatggcgatgacggcgagtatatggatccagtgtagcgcaggaggttcatacaccttcggaatctactcagcgatcttaaagtcaactcaatcttacgatcaatcaacccttgatacagtctccgtcttcaaagacattggaggtaacgtcggagttttatcgggacttgtatacactgcagccactttcaatcgccgtcgccgtgatggacgggaacgtcgaggaggaccttgggtggtgattttgatcggagcgattttgaatttcaccggttatttcctaatgtgggcttctgttaccggtttaattaaacggcctccggttccggtcatgtgtctatttatgtttatagctgcacagtctttaacgtttcttaacaccgccaatgttgtgagctccttagagaattttgctgactatggtggcactgctgttggcattatgaaggtaataaaagactcaagctttatgaaattttatttgcttagtgttgatatcttgttactgctacttctctgggaccttaagactgattctgataaatcagataaatcctctgttttgggttctgttttgcaaattatgtcttcgctttcgttctttgcagggttttgttggactaagcggagcaatgttaattcagctgtatgaagtcgtatgtcctggagatccaaagacttttattcttctacttgcaattgtaccttcacttctctctgttttggtgatgcctctagtcagggtatacaagacaagcacagtggatgagaagaaacatttggatggtttatcaactttgtcacttatcattgcagcttaccttatgattactattattctgaagagcactttaagtttaccatcatgggccaatgctgtcacacttgcagttctacttgttctgctttcatcgcctctactagttgcggtaagagcacaccgggacagtatcgagaaaccgttgtcatctgtttattctcctttggtagataatctggaagcaacaacctctggagagattttgatgctagatgaagacaaaagcttgaatcttttacaagctatgtgtaatgtagacttttggttgttgtttcttgcaatgatatgtggaatgggatccgggatttcgacgataaataacatcagacaaataggtgagtctcttcgatacactagcgttgagataaactcattgttggctttatggaatatatggaactttattggtcggtttggaggtggttatgtctcggattggttgctgcacagaaaaggatggccacgtccgttgctaatggctacaactcttggaactatgaccataggtcatctaatcatagcctctggttttcaaggaaatctttaccccggttcgattatcgtaggcatttgttatggctcacaatggtcgttaatgccaacaattacatcagaactatttggagttaagcacatgggaacaatctacaacaccatttcaattgctagtcctatgggttcatatatcttctctgtaagattgattggatatatctatgatcgcaccattatcggagaaggtaacacgtgttacggtcctcattgtttccgattggcatatgtggtaattgcatctgtggctttcctcggatttcttgtctcatgtgtgttggtttttcggacaaagacgatatatcgacagatctttgagaagatattgcatcgtcgataaagagttgtgacttgtgaatatcatgtacacaatgttgtacagtgccatttgtgttttgtatttacatgcgattgttcaaatttattattgattgaaaaatctaaactgtgtaataaaatacaactacataacatatacttgtaagaagaggttctttgttttttggagaagtttatttgtaatttagtccatggaatatagttgtgtgacataaatgaagtaattaatgtaagaaccaaagttagatttttttacctccttggtctgattgagaagtattaatgatgaggtttgctatttagagatactttacttgagatggttccttttaatgggttacttcaatagtcatgttgatacactacatctagttatgtttctcaaatcaatattttcataaaattatctttgtaatatttttaaaatgctgtagtaatttttttaaaaaatctaacactattataaaaaaccaataaagtgcttttactagttctataaaaattaataaagttttttttgttgggttaataaaaaaaagaagaagaaaaaaaaacacaaaaaatctctctcgagccctaataaaactgtgagcccctctattttctcagaccctcgtgtttcactctcgcttaacgagtcgtttcctttcctctgatcaattctctcagagagacctatttgacatttatttaccatctcaatcttctttttcctcagattttcttcttcatctctctcacacaaaccccaaaaacgacagcgttttcaaaacccaaacaccagtcgacgcttttggaccttcctttcttcctccttgtctctctctgattaaccgatttcgatttccccacaatgccaaaagggttttgattctctcttcctaaaaatctcaaatttacacccagaaaaaaaccctaatttcgatctttaatctctacgctctctaatgggttcctcctccgatatcgtccctgaccgatctccagctgacgatgtagctccggttacagataccaaaattccaaaggaggagcctttgacgcttaggagaacgcgtccttctcgggcttgtactgttagggctcagcagcggcttcaagagcttcaagcggcggagagaaagcttaagccgcctaagaaggagtataaacgagagcagcatcgacggagagaagaggtggtggaggaagatgaggattcggaggatgacgatcaagaggatgaagagaacgacggagatgatgagagtaatccgaagcaatgcgttgctggaggaagttctactaaaatcattacttctcttgttccgccaccggaaccttcacagatgccgcggtggaatcttcgttctatgtgggaacttgcttctgtgctcaatttcttgcatgtgagctctctgttaacttcaattgtgtttcgtcttctggttcttagctgccaatgagtaactaactctcaaagttcgtttttttgtttctttttctggatggtgatgaaggtatttagaccgcttttgaaaatcaatgcggagttttcagcggaggagtttgaaacggctttgcttactccaaacgatactttaagtgatattcacattcctctgctaaaggttggtgctttggtcatccattgttgtgtttattcctactcatttagtgtacttctcgtctcttattgattgtttcctaattcttgttggtttcctttggtttctgtttgtattaacttcaatgtactactagaggttgtctcattgacatgaaaataacatgtttaggtgctctagacctgagtgttggctcttattagtactacaactagtgataagacattttttggcgtactgaatggttctagaatagaaaattgccgttttgagtgagaagattctgttaaagtttagatattatatagaatcctgggtgctgtacccagtgagaaatagaaggggacctggtaatgtgttagtatcctatatgttaactgcaatttgcttgcaaagtgatgtcacctctacttcatataaatttgcttctctttgaatcctgggtgcatcttcttctgcacttcaaattaaatattccaaggggtatgactaatttttttggtaagcccctttgtaatgcgacttgggtagactacaaccaacttgttcaacgatatcttgagcttactaagtctttctcagttcggatgaaagggactcttagtttcaaatcattttggctgagcggctggttgaccaagatatagcatctatgtttttggctagctttcctcgtaggcaccttataggcttgtactgcccagtatagatcactagtttttctggaacatcttcatgagttcttttagagttccctgattaaagtccttgatcattgtcatgatatcatgatttttgttgttgtttgtgcgtatttataattgccatttttctctaaagtgctgcagttacttttggtttatgttgatactaatcaatcatgatttggaatcaaatatattcttcactactatgagatgttcaaattgcttaataatttctctctgtgagcaatattcaattttcttcctttcaaattgcaggccattccgcctgtaactcgaatggctctcacccgtgatacctgggtaactgtcctgtgcagaaaaataagagattgctggcattgggtaatgattgcttaacttcgttgtcctgataaatcaagtactttttgcattatatcatcttctgacatgatcttcacctactcatttaggttgcagaaggggaccttcctattgttgccttgcaagggttagttgtcataattttcctgaatatcatggtaacggattagtgatccatttatgagcttctcttcttaaccttgtaggcgggagattgaagtttacaaaaatcttgatccagccatccgtgtggtgattttaaaagcgttatgtgatattcgtgttgaggtattgttgctactgtatgacgatctattatccaaatcttgataccatctgtattgttttatcctctaaaactttttgttatttgtgaaacgcactagagttgaaactgaattttcattatgttgtatatctgtattgatgtatatagggtaccatgtatatatgtttacagtttatgatgtccattattaagctctggagctttctgatgcgatgctaatgactgacttgaaacaaagtggttttaacacttatagttttgattggttttgtgtatttcttacagcaagaggatatcaggagctacattgacaactctcttaaaactggcgttcacctgtcagtttttcgcaaagatcgtgttgggggtgattcacatggagttaatttttggtatggagcaaagaaaaaagacctaaaggactcctttgtttgcatatatctgatattacctgtttgtttcttatgtaaggtatgaggaagatcccttaattggtcaccgtttatatcgggaaataaggaaagcagaggtgttgaaggtcaaaacaaagggttccaagattcttcctaacataacataccaatgggaaactgttgccactaatttcgatgaattccaagatgtttctgtaagtctctttacaatcaatgattttgaattaccagataaattgcttaggatacttctatatgctgtctgtttagtgagtctgtaattaattcttgctatggaatatggttagatagcatgcaggctagtgttaaccatgcactcgaatattaatcttctttaatggattatactctataggttgagaaaaatatatgtggagaatcagttattttcagagaatttttactcaaagaatggtgcatacgattgcttgtaaattatccttgatatctttagttattgtgagtgaatcatattaaaatgttagcactgctaagaactggcttaaaagggctcatatgcaatagttggatgttaatgggttagagtatgttgtttgtgttagtgagtccagtgtctttttctcgagagatgtcctttcttgttgcagttgatcatagggtttaacaaggtgaacacaaacaattttatactgtggatctgtttcaatgctttagtacctccttttgcggtttcccgagggagatcctatatactattctgtcgaaacttatgtttcggactgaacttctttacttttaactgtcaatttctgtgaaggactaaactaaacaataggtataactttccatgtctttactactgatttgagatgctctgtctctttgtttttcaggaaaaacttcttcagagtagtagtagaattgaagtttctctagggaagaagttagtaaaagatatgcttcctgagatagaaaaagaacacaaggttccaatctgctctatacttttctattttttttttgttttttttttctgtttttcatggctgaaaattctcttcaactgcatattttcataatggaattttttccactgtcagaggaaagaaaaattgttgaaaaagcaacacagacaggctcttctccttgataactttgtggttgttgatggtcttgctgggcgatctctccgtgataggaagccagttagatacacttttggtaatgttatgaccttgttggaaattcatgcccgtggttcttcctttttggcattttttcctatttaaatccatctaaatctctactggactgaagtattactaatttcaaaagttattgcagatgattatgataagtccataaatgatgctatcaagataacaaagtacgtctgagtctcccttgcattgaatcatctctgttggttttctctaacattgttattggatgactatcttctattgtctcttacattctgtttgttttcgtgatactatctcaggaagaaacatccatcaccagaacatcctctccacagaagagaatctgccaggttggacgctcttgcgaatggcagatcgaccagttcaacccaccctactgagcctgtgaacgatacagcatctgggagatcttctgattttgctgattatgatgatttcgatgagcatagagatgaatctttggacagaaggcaagatacagtgtatttttcttctctccttaaatctcccctctggaactatgcaaacctttagcttaattaacaagtataatgttgtggcagtaacaggcgcagacaacgacctcaacgatattcagctacggactttgttgaaactgtttcagacaatgaggtagaatttcaaagtgacgatgacatttatggggaagcagtttatgatgaagaatatctgaagaagcgtaaacagaaaaagctctctagcggttctgagggagatgaagaaaagggagatgaagaatacaaatgggatgaagacaatgctgagtatgaggaagaagaagaagaggaagaagaagaagattccctaagtgcaagcgaagaggatagtgatgaaccccggagggctaagaaaatgccacggagagaaactaagttaagatcaagatcaaatgattttcggccaggcctgagacgaagtaaaagagccacgcgaattgattaccaacaatatgagttctcagactcggacaaagaagcaacaggactggcaaaacgtaagcggtttgttgagccggacgaaccttctgatgaaacagggaatggggatttcacaatgggaagtcaggactctgaagaaaatgcaaacgacccagaaacaaaatctggtgaagaagaagagccgagagatgtcaatgacaatgcagatacaacaaatggaaaagagaataaccaacttaacaaatcaaacggcacaacagaccaagaagaagttgagggtgtagtaggcaaaaggcgttacctcgacttaaacgagctggccccggtatctggttttgatgatggcccaagtacagtattgaaggatgatgataagacagacaattcataagcaagaaagagagtttgccttcataaagctccctctggtcgatcaccattgtatgataagcaagattttcacgagttatttctggcaacatccccttgcagagaaaagttgaaacggtaagagacactccattggctttttcttcattcaagcatatctgccttcttgttgttttaaagtaattcaggcaaattcggctgataagtgaagaggagaatgttatggaggccgaagaggtatgtgtagattaggttagtcattttttcttaccatgaagaaagaaacaatgaagagggtgaaccagatattcctaagagctgtttaatgttttatggaattattattagtgtacaagtaactttctctaacttttttgtattttgatcataagaacaagttcaaggtctcttagattttggttaaacgacgcagctttgagactgctgaatgtgattatggtaccatggagcaaatctttctaatggctgtgaaacaaactattgttgctttatcccaggtcatattgtgagcttcaaagctcatgaaactacataccttcaaattaataacttggattttagatatatataggctatatatatatgtacataaatggttattaatttgatcaaaactacaatttactaatgtctatgcatatgtatttaaattatttggtttgtgattgcacaaacttgttgtgatcactaaattcattgtcatagggaacccaaatgggtttacaaaaaaaagagaatccaagtattttcccttttacattggtgctaatttaaaaataacaaaaaactgttttaattgttaccacttactactagaaaaacttgtacaatatgtcaatcactcactaaaagatggcttataccctctttaatttcagtaaaagttgttatagattatattacgaaacaatttttataacctaaaatgaattgtgctatagaacttggccaaatgtttattctttgataaattttggagattttggaaccaaagatgtggcaaaataaagaaaagggaaatgataattttatattgtataattaaagaatcatgcatatgtaatttaagaaagatgaaaatatatattcatgcctttcttgccacacacgcttcttatacctccaaacccattttgcctaaccccttccttcttcacaacactccctttgtattattattattacatgcctcattctcaatctttctaaagaaaagcttttaatacatttctccaatactatagctataaacatcctttataattttgtttcttttaaaggaaaatggtgagatcttgttcttcaaaatcaaagaatccttggacaaacgaagaagacacaacccaaaagtttgtgtttgcgtctgcgtccaaaaacggatgtgcagctcctaagaaaataggttacaaaagcatttctctttttcttttaattgtatgatgttgatatgatatatctatgtatatgtgtttttaccatttataggacttaggagatgtggaaagagttgcagagtgagaaagactgatcattcaggaaccaaacatgagagcttcacttctgaagacgaagatctgatcatcaagatgcacgcagcaatgggaagcaggttgtgtagatatcgcgaatcactcgaaaactctttgagattttacagattctgatgattttgtttgtgtggatatatagatggcaacttattgcacaacatttaccaggaaagacagaagaagaagtgaagatgttttggaacacaaaactgaagaagaaactgtcggaaatggggatagatcatgtcactcaccgtcccttttctcacgtacttgctgaatacggcaacatcaatggtggtggaaacctaaaccctaatccctcgaaccaagccggatctcttggacgcaatcactcgctcaatgatgatggtcatcaacaacaacctaatgattcaggagatctcatgtttcatttacaagcaatcaagcttatgacagattcatcgaaccaagtcaagcctgagtctacgtttgtgtacgcctcttcgtcttcttctaactcgtctcctccattgttctcttcaacttgttctaccatagctcaggagaattcagaggttaacttcacttggtctgacttccttcttgaccaagaaaccttccatgaaaaccaacagaatcatcctcaagaactagacagcttgtttgggaacgacttctccgaggtaacagcagctacaatggctaacacatcaaccgtaccatctcagatcgaagaagaatctttgagcaatgggttcgttgaatcgattatcgctaaagaaaaggagtttttcttgggatttccgagctatctggaacaacctttccacttttagttcatatttcagttacaaataaataagcgacctaataaagagaaagagttgcttcttataaatcttcgacttttccattatacaaattaaactgagaaaatatttcataaacataaatcaaatagcaaacttagacttgagattgttcctaaacgttttggttaaaacttgagattttccattattgttaataagttgtctctttggtttgttttgaggatattcttttaacttaaaattcattgcatgcaacttgacttaaactaatgtttgaggatttgagtgtatcatttgaataccatcacagttgctaacgtaggaagttttgataattgaattagctgataacaaagtaaacaagctaagagttgttttatgatataattgaataccatacgttgacaatgtctaaggttgttaagagagacttttcacaaataatttgagtatttcactaagaaaaactgattacaattggtatcaccgtatcagagttttagtttcagagaatcaacaaaaatctacaagaacaatcaacttgttgaagaataagttctttaaatcaatttcagtggctaccaaataaaatatacacgagaaggatataattaaaaaaaaaaaaaaaaagagagagaaagagatcaatcttattattgttttgtttcgaatattcataccgattattacagagacaagtgtataccaatattgctataaagcttattgtgaaaaattattttagaaaacataaataaaaagattcaaacagcaaacttggacttgagattctgcacagttgtatcatcagtcctaaacgctctggtcaggactgcgtttggaatctcaggtttcgagccgaacagagtactaggcaaaacaactgctcctgggagctggctgttaaaagcggttatcattcgcgctttcacttggccaacgttccattggaaatgaaccaatcctctagggataacaaacgcctctcctgcattcaaaacttttgagaacaaagtgttgttggtactcaagaatccgacaaacaccgagccttcgatcacagttcctacttcggttgcacgcgggtgcaagtgaggcggatttacacctcctggagctagctcaacgttattcatcgagattcctaaagtgtttagacccgggaaggttaagacgttggcgggagcaacggttactccgttagggtttgacgtgtctaaggggccacctaaaccggagtagaagaagtcagaagcagaaacggctgatttgcatggaaagccattgatggaagcagaagctttgagatcgccaacgcagaagtcttgtaaaggatcagaatcagatgagagagatgggattacaaagagacaaaacataagaaggaaagatcttaaaagagcagaaggtatttggagagtagccatagcttttgatgagaatgatgaaacatagcatctctgtattgtagatatatagtggttattctggtcttcggaaaattgtattttgactcattctaggttttgttttgtaagaaaacaataaaagttggagaaagctgagataattttcaagttttatgttatgttttacaattttactctgttttctaaaacttcttattgattttgtcgtaagaagcaagcaatagaaaatacaagtactaagcagaacaattcaaaccatatgggtgacaacgtagaagaaagttgtaataaattaattagttggtaagaatcttaataagagttgaattgtgaatttcattgactaccatttgttgaaaatgtctctcaaggttttattttccaacggaaaaacaaatgttgttactgtgtcatgcaatgtgtaacaaagaaaaggaatatgtaaaatattttttcgagaaaatatcaaaataaaactactaccatacgcgtgtaaaatacaaaaccacacgcaacaaatgtgcgttgagcgcgtgagaatagaatccgtggactataaccctcttttttgggcttttttgcacaaatgaaatattaaaaggagctccagcgcgtgggtcgggattctcttttgtgttacatctgctgaatacaacatgggccatataatatacaacaaataggcctttaaacccggatccaaatcagttagtttcgggtcgatttctcaattctgaaccggccggtttagatttttaattattttgatcccaaaaatactcaaataatcggggtatattaatcaagtgattttgtgttacaatataaaaaatcaatgttattcaatcatatattttaaaagtcttaataatatccaatgtttattgaaatagtgatttgaaaatctactttaaaatctcctgttattgaaaacattttcggattagggttttaataaccttaaaagatttaagtgaatttttttatataaaaataatcaaaatacagaattttaagtccagtggtttttgttgggatttgagagaattttactataactcataacaacttcttcaaatctacccaaattcatcaatataaaaagaaaactcaattaaacttaaatcactcgaaatataagattgaatacatccacatataaccaaaaagaacaaaacattttcaggaaaaaaatgatagatttatgcggaattagagcttttgatcttaacggatgaagagaaattgcggtgagagagaagccttctccctccacgtaatgccagcacagtgacatatctcagatggctcaacggcgacataatcgacacaattagggctcactcttcttcttttcctagtgcacacgtttcaaattgggtgttaaatagggtataatcggcacaattagttagtgttcgctcttcttcttttcttcgtgtgaacgcttcaaatggggtgttaaataaggttaaacggaccttctatttccttttatctctctatcctgttgggccttaattattatcaatgaaaagacccatgaaagtgcccaaatcatttgaaaggcctttgtcattttctcagcagtcagcacccatcaaactccacaaggttcccttacttccttacatgaagcatctatattacattttaggcaatgaagaggaaagagaatctaaactatggacagtgatattcttaggctacaaacaggagcattagccaaagaatatcactatgtctctaaagtttttaagagagacttttgcacaaaatgatttgattagtaaaaactgattacttgacatcagagttttagacttttagtctaagagaatcaccataaatcccccaagagaaagaaatgaatcttattaatgttttttcttttgtttcataccaatcgttacacataacttattgctatgctatgaaatcgaagcgaattaagaaagatcatttgagaaaacatgataatataatatcaaaagattcaaacagcaaacttggacttgagtttgttcacagtaacatcatcagtcctaaacgttttggtcaaaacagcatttggaatggtagggtttgagccaaacagagtactaggcagaacagccgatcctggaagctgactgttgaaagaggttatcaaacgcgctttcactttaccaacattccattggaaatgaaccaatcctctagggacaacaaacatctctccggcattcaaaaccttcgagaacagagtgttgttagtagtcaagaacccgacaaaaaccgagccttcgatcacaactcctgcttcggttgcacgcggatgcgagtgaggaggatttacaccgcctggagcgaattcaacgttgttcatcgagagtcctaaagtgtttagacccggaaaagttaggacattggcgggggaaacggctacgccgttaggggtcgaggtgtttaaaggaccacctaagccggagaagaagaagtcagaagcggagacggatgatttgcaagggaagccattgatggaaggagaagctttgagatcgccgacgcagaagtcttgtaaaggatcagaatcagatgagagagatgggattacaaagacacagatcacaagaagaaaagatctgaaaagagaagaagagatttggagagtagtcatggctattgatgagaaatataaaacagagcatcctctgttttgtagatatatagtggtttgtgttggtctttggcaaagtttcttttgacttcttctatttttttagtctaaaaaataattggagattagttgaggtaagcaaatggacctgaaaatattgtttgtttattacttatggttcaagtttgatgctctgtctaacacgataactatgttttctaaagcggtctattgatttcgtcgtagaaagcaatctgaagaacatttcaaagttaatggttaaaatgtcttttgttaaacagagaagatttcttacttagtcataagttacatcatacatattgacttcaagacttaagctaatgatgtcttttaagaaaaatgagaaattagaaatctttttggtatgttaattggtgaatctttggtcgataatgtacgattttccatgataaaattagttggtaatattggctgggtcaaatctttatgggtttgttaaagtgggattttcataaatactatttttaattactaacaataattacttggcacagggtttttagtttcattcaatgaatcatcaaagaaagattcaaccaagttctataagaaaagattcaagattgagtttgaagtaagtgataagttagaaaaaatgttttttgcttgttctgtaataaaactgtcagtatcagttacatacagattagaacaaggatgttgttttgatttcttaagtaaaacagattcatgattctgttggcatttcaatgaaactacgaagcatatgcagattctgagatatctgtaatagaattgcttctccttcactaacatctaaaacatctgaaatttgctgcaacaattcaccttttgattcaattgcatttagtctctctgtaatctctgaaatttccttcactaacatatcttttctgcttccattctctgtaacaagacaatttcaaaaaatctattttaactttcaagtttattaaagaaacatatgaccaatgaattggctttacctttttcttcctctataatcatcacaccattattgcctatagaatcctcagctgaatctttcatttgttccaaatcttcttcatgatttgaagaacaaacaggcaaatctgaaaccggtttagtttcttcatcaagaaactcctctgcttctcctctttcttctctcaacaatccatatctcaatctataaacttcaattccagcttcaagctctttcatttcctcttctctcttaaccaacaaaccattcatagactgcaaagcttcttgatcatattctgcttgctcatccatcattctctgatactgcaatgcctccatttgaaccgcagctttctctgcttgaagtcttgtgatcatagccattgcattgtttgctgcaacagctgaagcactcctctcttcatctaactccatatacaaatccatcaacgacttgcgatccaatctaacctgtctatttagatgctgaagtatcgaatctccatccaacacttcgctctccaaaccattctgatcaacgaaagatttcttcattgatcgaacagaccatcgcggactattctgagccgagtcagaaagcggaatgccaaagaacttattacctccttttacaaaactcggagttctgtcatcaactgcatccaacgaagcgcctttcgtgttcaaagcatcatcatcctcaggcaaatccgtgtatttaatgttagacaaatccaaagttctttggttaaatgaaactctaggagatggactaggagctccgaaaaaagattgattattgctcttaggtttatcggatttcagcttcattatctgcccacaacaagaacaacgttgctgcctctgaaacctgtcattgctattgttagttctgttctcaacctgatagaagttttcatctttcttcgaacccgcaaccggaaacgccaattgaagctcacgttcatcgtcgataagaagctcaagatccttatgcaagattccaataagagacttgtaagtatcaacatctgtttctttctcggtagcgaaagagagaagacatccttcacacatacgtttgatctcagagagtttcttgtgcacatgacagtaagcgagagatgagacattcttcttgtgagcatcgcatatcgagtcgttgtaatagaaatcagggtttctgctgacaagaacatggtcgagtctagtgcagagaagacaggggattttgaggtcaaagaatttagcgatttggttagagaagaaagcgaggaagccatcgatgaagaggataatgatgaggatccattcaagaagagcgtagattaagaactgtgggaatgttccaagttcttcttctatgaaattcttgaaggaacggttagacattattgtgattgcaaaaagcgatcacgaagataagaagcaaacttcagataaattaacaggaagaagaaaattatcttaaaagggttacatgaagattgaaatggtaacaggaaaaggaacccaaaaaaaacagaggttattagctttattatctagtcctctatatttggattgggaaaagaattaatttgaccaataatacctgaaataacggctaatcgcagacaagtaaaattgacaaaattagattctttttctttaaaatttactctgttttttggattgtcatgtactatagggaaaaatggtgtttgctagggaaagagaaaaaaaaaaatccacaaaagtcgaagtggcatatgaaattggcaacattattatgacattagagataaatgataaaatattcgaagaaccatacatagttacatacagttttaggcttttatcttatccccaaaagataagataatagaaaagcctaaaaaccccacaaatcaccaaccattgattgagatgggccacatgagaatcacgcttgtttttaacttacatcaccacaaaacaaaacacacacagcagaaaatgactcataacagtgtgtgtgacaagagttttacaaacaaacaaagatgatgaagcaccctagacacagtttgtccatcaatctctatagccttcctctgtttttgttctgttttttttttcccctgattatattttcagacaaaatacataaaagtttgacaaagtaaggcctaaagaaagatcaaaaacaggactgagacttaatagggttcttttttcttatctgtttatacctaatatgtactactagtactacaacaacagagaaacaaagaaagaaacaaggtcttgtagattcaccttgggtttaagctctaagcaactctgatgatgctgctattgctatctccatcgctgaagcttggcatcatcgtgaaagccgagtgtcttgagttgggttgctcgttaagattaaatgaggatgccagacaaaggttgagagaaagtggagcagcatctgtgtttagattgaatgttggctttgcttggaaggttactggaaccagatatggatcgttgagatgaaatgtctctggtgcattctcagtttttgtcggcacgtcagtaaaaacttgcatcgcttgctgtccagagctgatgttggtttcaggtagtggtgagttctcctgagtaggatcttgctccatggccatttctgtaacctgatcaaaccaatcacacctaactgtcacacacttaccattattgtttataaactacaacttaaaagatatatacccaattagaccaaaaatcattatgatacttctccatattactttgtctttaagttctaaagaagaaatactaaaaacctaagaaaggaaagagctttgagaaagcagagaacaccaaagaaagtaagaaagttaagttctatcaactaagctaaagtctagaccttttcattcacatatgatttagctaacataaaatgatttaggataagagtagagatttaccgtctcagtagtgatatcaaaaaggctagatcttcttcggcgacggttgaggttggttcgtcggaggaagtatttctgagcatgactagctacttgagtaggagtcctactcttcacaaagtttcttgatattcctttccaatctccttttcctactttctgcaacccaatcaagaacctcttatgctcgttctctgtccatggaacccctgttttgttcaacacaaacaaacaataatcaacgacaacgaatccatagctcaaaaccaatcaatcaccgacataaattccaacatgcatagattcaatcacgaattggataagattcaaattagagacattctaataatacaatcaatcagaatcctaagctcttatcagaatcagaaaaagagtagtacctcgtttcctcccgccggaagaagacgaaatctggacagcgtcattggcggaggcgtaaccgtcagcgacaatcaccgtcgcatccgtttcgttcttatcttcaccatctccagctccggcggtgactatcttagggatctcatcctccggagaagacttttcataatcagagagattgttcaaactcacacactttctcatcggatcaaccacgactctaactccgaacaacatgatctcatctctctttcccgtaacgccgcagtctccggtctccgacgaactactaacggcggccataaataaaacactttttccgattttgccctttgcgtcgcttttggtttttaccctttcgaaataagaaccgtacagattaggagacgaggtgtgagtggatctgagctacttcttctgtcttgtctttataaaaactcgataagccacgtggcattacttactctgttgtgtgttattacgataacatgacacgtgtttatttatgatttgttcgtcactcgtttcctctgtgacctgcttgtctctctatatttatcatttcttccatttggatttattaattaatgagttattttctttggatatattctgataatgtctctctctctattcattatttttgtcattttaattaaatgtgtttttttttgttcaagcaaagtgaatgtgtctcgacgtccttctctcacgtaaaaaaaatggtttctagtgtgattttcttattgatgatttgaatatagaaatgagaaaaaaaaagttggtaaaggaagtatggtgtgtcatgcgcatgaagatgaaatgtgatttttgaatggtagttcataattaaactgtataagatggtattataagtgtgttttataatgtaatgttagtgttaaacgaatctggtcaacttacttagtgcgattcccgattacatccaacctgattacctttatataaaaaccattatcttattttagctagcttgtaacgaatcacacaagcaaccaaaaagttaccttgataatctcaatctgttagtactctttatttcatccttcgctttaatctaaattaatcctccaaatcccttttagaacattgtttttattgaaatacaaattacttctggttaggattaaatgattgataaactaatcaaaagaatattccaaattgtggcatcaaaatatttgatgaagacatggggccaatgggagcacatgatatcctcatcactttaaatactagctagtattttatgtatccatcaattctcttcttctttttttccttttccccttcaattaatagccttttaaagttttaatttcccttgcaaattgtccttttaaaaccagatatgatgataatcccttacaagttacaagcatgattaacgtatgaatctcctcatagtttacaaactgattgattcacattcacaccactagtgaaacacatgaccgattaattcgactgactaatcatgttttaagggatattgtcatgtggatcatatcactaaactctattttaattgaaaatatcacacaaaagtatagtataaccacattcttgcaaatatagtgaagaaataattgaattcacacaaattttggagaaggttgttgctgatcggggttgactttatatgttcgcaaataaacatgatattttataagaattatattgtacgattaaatgaccgttgttgatcagttggttaaatattgttttttgcaaattaaataagagattacaagttcaatgtctataacaaatttctttacaaatcacaatgatcataaaacttaaaaaaaattggagtctagctaatgatgtaacacggtttaacaaaaagaaaagagtatatgatgagcttctccaataatcttggttcagcacatgaacttaacctttctatctctatcgactctctctggtttatcttcttaatctttggtcgtcttaactcaaatcattcaacattagaagtattccattgtaaaaatgttttgttgttgcaattagtgatttaaaacaaactagagacttaaaacttttacgctttatcttgttagttttttttttttttaacttaaaaattaacgtggtgtcatgatcatatcccatcgaagtttaagcatgggggtttaacaacatgcatgctgcatgataggaaagatataaaaatcttctaattattaatcaaacattttcttgtggaaaagaaaaagaaaaggaaaagcacatatattggttatgaatgaaagacaccattaccttttcttggttgcacacaacaaagatgaagttaaaggagttgtttagataaagccactataaagagacttttctccttttagttttcgctttagccaatttggatgagtatgtgactttcccaaatcagaattttagaaaagggtggatcatgataggattgtgtacttaaacagaaaataatatttgttcaaataggtttttaaagattgaatgatgttctacctcccacttgacaattccaagccctttatggtatttgaaaaccttaagttgttccacactcacacggcaacaacaagacattattgactcatacaatgaaaccacacaatgtcaatgcgcctcacaccatgaccataggtaccttaatacgtatcatactagattaattttgttctagcttgtaaatttctctatgaaagctaaaaaacctaagacaaaacaagtaaattaccgtttggataaaacaactaaagattggttttaagatcgatttgaacattcttaagattagttcaaatggccaaacaacgaaacacatatacttagtctatgctacacaattcaccttaactaaataacacttattgctaataagtgattcgtaccaatatgaatgataattctcaaccggtgacgttttacattttgtgaaaccgtcctttaacattttgttaagtgaatgaatgtggtgttcctgtaataaagtagaaaactcaggggtaacaacgtaattaagtggaaaactcaggggtaacaacgtaattactatcttttccgttcctaactgacagatttcttcaaggaaaaaagcaaaacaattggaagaaaaaaacaaaaaaaaaaggattgctctcttctctacctcgttctttttcttcttcacgacttcggtcgggaaaaaattcccttgccgtaaccgcattttcaaccctaatgactgacccagaggtaaaaatctcattttcaatccctaaatttccgccgtgttcgacttcacattcccaattaaaaaaaaaacaagttttttttgtttcttctctgtttcttttaggtttcatttctctttatataaaggattgttgtctctgatttcgtttattgatctggattggtatttcggatatgggttttgattattccgttctgggattgcgatgaattgttttgtgtttttaatggttagcagaaattaaccgccttgaagaaggcttacgctgagacaatactgaacacagccaaggaagcggcggcgcgtgttatgattactgagaggaaagcgcgtgggtatcagcaagagcttgcgtctgttagagatgaggctcttcgtgcatgtcttaggcttaaacagatatatgattccaaggtaaattttcaatttttagatttgtttctgtggattctgtaaacttgaagaaacttttcatcatctaaattgtttcttgagctaatattttgagtcttgacattgatttgaggataaagttttgacatttctgagctttgtgtgatgacaatgagcttatatagggtatcgaggacctaggtagtatgagaaactgttctttggtttacacttatttcagtaactcttgttttgattatagctttgggaattgagattgtggtacattttcttgaggatggacttcaatgtcacttgtgctgtatttttcctttctgttgcaaattcttcttctactctatttcattaaaagaatttgtggttataggtcaaggaggcagaaatgatatctttgcagaagcagcaaaagattgaggaacttgaagctcaacttggagaagctgaagatatagtaggagagttaaggacggagttacgagaatcgcggtatctcctggagaaattggcaaatggttgtcaaacaaatcttagcaaagaggagaaagcccccaatgaagcagtttctttagaagtgcgtgaggactctagcaaccacgagagatcagttgtggctagtgttattaaaccacatatgagtgacagagatcttagtattaaccggtgttcttataaagagaataaagatccttgtctttatactcttccttccatactaagtagatgcagagaagctgaggtggtagaaaggaacactatcaatggagattgtgctgatgtggaatcacttacagaagcaaggaaggaagaagcgaaagagaatgatattgagctttctactacacctttgtcgccttctgagaaacagtgtatcaaattctcgtataagaggaagcataataaggatggaagtaacagccctgaaggaggaggttcctcctcacaagatgatgatgacgacgatgaaagcagaagcaggagacataagactggtgagaaagacaacgcgtatttggattctttcaccagcactgaaccatctcgtgatagtcgacgtgtagctcaggtcgctcgtcaggttagtgaatctagataaattttcggtttcctcttgctgtgacagtttctgatcactgtccatgtgttttttttattacctttatgcatagctattatcttgaaagttttgtgggtttgttctataaaatactcaagattctgaccttttttttgggtttttttgttggcatagcttttaccattctcagagaagaaagggttgcagcagagccaatgtgatgatgttccttgactcacaagtcacaagtaatcttcgaaggtcctgtcatcaaattccatttgatcttctgggaaaaatggttgattagagaaattagctgtagttgtaagattgttggcatatataaccccatttctcagcttattaaactaatggaagaagctaattttggtcgttgagttagaatatttctcacactacttggttacatttttaatcgtccgacttttctataccttgactaatcccaaagcacaagacgatcatgtttattttactcagagcctataaaacagagcattttctgattatccacctattagttctcttatctcctcgattttaaattctttacccaaatgagaaaatcagatttgttcgagaaccttgagaaaaaaaaaatagtcgttatgcttgagtttctcaacttcagagtcgtcaagtcaaaacattgaagagtcttcgtctagactcggggaatttgaagaagtttcctcaatgtgtacttgattctataaaatataaagaatttacttcaattttttccacgagagattcttttaatgttccagaagattatattgagtgtgacaattcatataaaataaagttaaagaagaagcaaatcaatagaagtcatatttgttcacgaacacaaggtttgaccatacataacgcgtctcttgaaatatgaatgtgtatataaacaaaacagaggaaccgagagaacatcacaaataaacttcaaagtacaaattccatttcgattttaaaacttttgagaagacgatatacaataatgaacggaacatcgtgggctgaccagtgggacaatagcggcgactctgccaaaggaggccgaatcggcagcggcgccgtcgtgagaagcagcggaagtggagcaacgtcaaacacgaccaagtacaaggagaaaatgggacaagggttagacaaaaccaaagctgtagcttcttctggttttaagaagctcaagactggttctgctattggttttcgttgggtcaaggacaagtatcacaaaaccacacacaaacaataaagatttctgtaaactcctttgtatatgagtattagtaatttattcacttgccaaatactgtattatgtctgatctatatttttctaagcttgtttgatttgaatgctttgtttactgtggtaaattgttcgagtttgggtgggttcatggattaattaaattgtttttctctttaatttttaaattattacatctataataacaacgaattatcgtttagacaaaatcatattatgcgattaaatcataaatatataaaaataagaaacgatttatttcgaagtatataacgtgtaattttataaattttacttttaagatcggagggtaattttccctcgcttctgcagaaacaatttttatccgccggatctgaagtggttcttcttcagagtaaatcaatcggagaacccaaaaccctagaaagcaaccagaatcacatttcactctaaaattatcggcggaagcagaaaccctagtcattggttatatccgtcgccggcgttagagggccgtgatgtcgatagagatgccaagaggtttaccatttgccgtcgacacttttggaccatacacggagacgaagagaagaaagagacatcatttcttaactcatgctcataaagatcacaccgttggggtttctccttctaacattgtcgtcttccccatttactctacttccctcaccatctctcttcttcttcaacgtttccctcaggtttttgtttcctctatctcttatctcttcgtgtttccttctctgtttcctcaataattgtcataattgtgcagcttgatgagtcttacttcgtgagagttgaaattggtcaatcagtgattgttgatgatcctgatggcgagtttaaagttactgcttttgatgctaatcattgtcctggtaacttcctttgtaccttttgcttttgttaaagtcttagctttttccaaattgtgacgaatttcataaacttcaggagccgttatgttcttgtttgaaggaagttttggtaacatacttcacactggtgattgtaggcttacactagattgtctacatagtctacctgagaaatatgttggaagaagccatggcatgaaaccaaaatgctctcttggttacattttcttagattgtacatttgggaaatcatctcactctcagaggtttcccactaagcattcagctattagacaggtgatttggctttaatcattatgcattggaatcgtttctgtgtaaagtttctccattttcattcttgttcaatgaattcagatcatcaattgcatatggaaccacccagatgcaccagttgtatatcttgcttgtgatatgttgggacaagaggatgttctcttagaagtttctagaacgtttggctccaagatttatgtggacaaagctacaaacttggaatgtttcagatcgttaatggttatagttcccgaaattgtctctgaagatccttcttccaggtttcacatattcagtgggttccctaaactgtatgaaagaacaagtgcaaagcttgctgaggcaagatcgaaacttcagagtgagcctcttatcatccgtccttcagctcagtggtatgtttgtgatgatgaagatgattggaaaagtggaagcattcaaaagcagagaaaagttaggtttagtgaagctgtcaaggatgagtttggcctttggcatgtgtgttactcaatgcattcatcccgtgcagagttggaatcagcgatgcaacttctttctccgaaatgggttgtatcaacagttccttcttgtagagcaatggaactcaactatgtgaagaaaaactgttttatcagtcggttttcgcctgatgatcctttctggaagcttctagacatcgatatggaagcttctccagttgcagcagctgatactcaaactgtagctcttagttgctgtctcatgagtgaacagattattctggattcgggaaaatcgaagttagaacctgtgatagaatcgtctagcacgaagaagaagcttctgagtttatcccctgaaaatagtcttcctgtaactctgtttgggagagcaaggcaaagttctcaggaatgtgatcaactacatgagagaaaagtcatacacactcaatgtgtatacaccaaaacctcgccggtattggaaaaactgaatgtaaaggtagtaattgagcctttacaagatgatactaaagaagaaacagtagagaaggaatcttgtacaatcttttctacttctacctcaaaggagacttgcaaggatcttagtggggatttgagaaagctatacagatcaatgaacgcacctgtgcctcggccgctaccatcattgatggagcttatgaacgctaggaaacgctctcggaatcacttgagtttctagcttgcggttgacatcttagcctgatcacatcattacagtctcaatcccttataaatttttatacagtggagagaatacagtttgtaatgttttttatacacagaaattgatacatttttttgaataaaagaaattgttgataaaatctatttcagtttttgataaaaggttgataaaatcttgcacctctataaataccacgttgattcttccaataacactgccgcagcataaaataaagaaccctaccttttttttttgtttttgctaagaaccctaaattattcgttatgagaggtcggatatattttcgccatgaaatcgaccgtaatcctgaagtctcagaagctggcacaatcaacgcatgtgtaaccatggtcacgatggatgaacctgtacgaacattcccgattacgtggctcgcggattacgtcatggaagatgaaggatttagtagtagagaagacattaatgatcttttgatgaaagaaggtttccctctcgaacccgatttgtttatgttgaccgaaattgcccgcaaaggtatcattgaagtgacttcctcacgtgattatagcccagaatatgctctgtttctgaatttgacttttcgtgatggtatttcctttgatgagattgtagaggatgacgacaccaatatttatataccctattattgtataccctttagacccgcaagcgagctcgctgtcaggtcgctgaccaaaaatatatactacaagactagctctatagttggtgataagtgcataatttgtttggaagagtttaaagaaggagcaagaattgtgactttaccatgtggacatgagtttgacgataagtgtattgtagactggtttgcgaccagtcacttttgtccattgtgtcgcttcgagttccccacgtgaagatcgatgatgggatcgaggattaggtgctaagttttctaaactctaaacgttttttctttttttttgttacaagtaaattcttaagtttgttgacacagaatttgtctaaagttttgctctcttagattttttgccaaatcaataattcttcctacttgactcgatttcatataaatatttgcttcattattcagcggattttgtcaaccatgaattctaactcgtaagacaaatattcgtgttctgcttttttatggtcaggttcagctttaaactctcggaaggtgaaagttgcatggtctgaagtatgttctccaaaacaagaagggggtttgggattacgctcgattgcagaagcaaataaagtctgtgttttgaagttgatttggcgcattctctcagctaggcggtcgctttgggtggaattggttaagaaatatcttattcgaagaggctccttttggttagtgaaagagaatacaacttgtggttcttggatatggaaaaaaattttgaaatacagagacacagcaaagagtttctatcgagtggaagttagaaacggcgaagcttcttcttttgggtttgacagatggagtgagatgggttgtctttatgacagattgggtgcaagagggtgcattgatttgggtagcccgatgactgctactgtgggtgaggtaatggcaggggcaagaagaagaaaatatcgggtagctattttgaatcaagtcgaaaacgaaatagtaaaacagaagctcataagatcgaatgagaccgatgtagcattatggaatggaaagcatgaccactatcgaaaagagtttcacaccaaagagacgtggctgcagattcgcaccgcaaagctattgatggagaactacaacggaatctggttcaagcactcgactccgaagtactcactcatcacatggctcgttcaaaaaaatagagtagctacgggtgacaagctgattaagtggaacccgcaagtaactccaaactgcattctctgtcaacacactttggagacatgggatcatttgttctttatgtgcccttactcatttcaggtctggacgaagctcgcaaagggaatcctccacgctagcttcaccgcaaactggacggaaactctcaaactgatacatgacaataggctaagcaagacgaagtgtttcattgtagggtacatatttcaaaatgcaatccactctctttgaagagaacggaacaaccgacgacacaatgaagaaccatccccatgcgagagactgataagagtgatcgataaaatcattcggaatcgtttgagcacaattcggagtagcggagatatgaaacttgcaggaggtttgcaagattggtttgaatcaagacaaggagagaagatttttttgtttttgttttgaatgatgtcttttaaaacaagtatgtataagttgtagaacaatttttttttttttaatataatttaatattaaattcaaaaaaaaaaaactaatattttgtaactccctttactcacttattattttatttttcttactattttgcagttctacaatattactaattggaatattatgtgagatttcattggctatatacttttgttatataatttgcaccgggttaatacggtactactactattcgatcaataaagcaagtagtttaccaattatgatactatatctagttgatttagtattctttgttgatgtataaatattacgttaccactatttatcgggtctctccaccttagttttctctcgctccggtgatagtgtggttggattccggcgagcttctcttgtggaggcaaatcacgagatctttttggctctctggtttgttctttgcggttagaagtgttgtggtttgttattggtggtcaacatctctcctccattggtgggctgtagagggtggcagcttcctcagccatggttatggttttcccgtgaccatttttcttcgtcccttcgcctcgtttttggttgcttttaggtagatttttgttgtttttggtgttgttggtgtcggttctttttatgtatgcgagaatatgggtgcattgataaggttaatagagtgttgaatttatggcagcaaataggtctaagtggcatcgctatctcattgaattagtgaaaaagttcatgattgcttaagtatttttgcgttaattctcggagaagctatagacttttatcacgaggttttgaggacagcttcaaatagatatgctcgtggcaactacgatgagaattccggttattcggtcatgtgacaaccacgcaaatttctgagttttgcaggctcagaattggtatttcacctcgtaacttatccttgaatgcctagaagcaaattgtaatgttgtatttattatttggagactgctttaatcagctttttgtcaaaagtcaaaaatgatataaaaattaatcttttgtcaaaaaaaaattttacaccaagtctcaggttcgattttgcagattattgatgcataacttatcgtaatctatatcgagtactataattaggtcaccgttgtggtctcaaatgaagcagaaagagtatgtccatcatatatcatatatgcataatcgtttgtcgtgtatccgagtgttgcgagaagagctgaatggtagaatcgttatctataaaagttgttcgtcataatctatattgcaggttatcatcaaaatattattagacgagatatatctagatatgatgttataaatgacagaaaaaggagagaaaaaatctaattatttttagggtaatattagaaagtagaattgaaaagaatgtagtaactaaccattgttaatttgtatgtgagtaaataaccttatgacggcataagaaaatacaaaaatatccttgcaagttgaaccaaaagcaagagtatgagaataacatgatatttataaaaaaggtgacattttataatatgttatgagaataaataatgtgttatatgaaaaactagcatgttgacagagaaagatttccagttatcacgtgtaattcgaaaaagtaacatgatacaaaagaaaataatatacaatttaaaaagaaaacataacgatgaagattccaagaaaaaatcaaaatcgaacaaaataaatagcacgatatttatcaaaaaagtgacattttataatgtgctatgagaataaataatttgttatatgaaaaaatagcatgttatttgagagagattttcaattataacgtgtaattcgagaaagtagcatggtaaaaaagaaaataacatacaatgtaaaaagaaaacataacgacggagattccaagaaagaatcaaaatcgaacaaaataaaatgagaaatcttctgcaaattgaaggagagatgatccgtcaatataaataacgtttagcagcctagatttatcgaaaaagagactgatggttgtgatggtggaagatgtggtggttgtggtggtggaagaaagagagatgagtggtggtttgttcggattcatcaaaagtttttcgccatggaatcatctaagtgttttgtgtgattttgtaaaatagcgtgtaatacatataaaattcgataatgggtataaaaataattacaagtgatgaaagagagtgtcctctgataccatagctactttgttaatttttttacaattcatagttattttgtgcatattctcttatttttatctataaatgattaaaccagaaaacatgtcataacattttcttaatttgattttcaggagaatttatgaacttgcccatctttgtgggatttcccaaaaagaggctttgagttaaaggtcctaggaaaaataatcagtaatagaacatgctactaaatattttaaaatgtaaaatgtgaaaaaatactaatagatttcttaccaaaaaacagtggtgctcttttgtttttattgatttttttttttagtgaattacagcccaataaaggaatagccacttcgatagctgggattacaaaatttgccggaacgcggagacattccggcgaagctaatcggggaaaaggaaaatcttttaaattatatatttttattaaaaaatcatcttcagtaaaaaaacaataaaaggtttctatggaggagacatttttgaaaaatagtattaaaaagatgcattttttttttaaaaagtcttccttcaatgtgtgttttcaaaataaatccaaatatgtattacatagtctttgaaatacctaggagtccgatgatgagaaaatacatatcctagaaatatatataatttcggaaataaaagtcttaaatatgatatacagtccttttaatttaacaattgtgaagatgtttaaaaaattataattttgaataaaatacaaatgatagtattagtgaagtcggcgaagggggatttatctttaaacacattgtaattgttattgttgcgtatccgttggcagcaagaaacagaaacacagagtgagtccaagatcgctttagaggaacgcttgaagaaaccactgaacattgatattaattatcaaatattcgagtttcttcttcctgcattcaaaattcgtcaccaagattgcaattttcttatcatcttcgagcgttcatctctgttagattatcacggtttgtttgaagtctgttctctcgtggaagaaattgtcgatctctctgttatccaactctttgtcgcgtttctttcagaatttctatatctgttgggtctctgttctctactagaagaaatcgtcgatcattgattcaggtaagttctcgttctttgttatccaagtttctgcttcaagcattcatcaccaagattccaattcgttattggggttcttgcagaaacttcttcgaacattcatatctgttaagttttcacgtcgttgggtctctctgttaatctgctagaagaaatcttcgatcattgattcatgtaagttctcgttctctcataatcaagtttcttcttcttcagcatatattcgtctctgttacactttcacaccgtttctactgctagaagaaatcatattcattaccatgattccaattcttttactgggttttcttttagaataatagatcactgtttgtttttagagatcgagtttgatgaatttggtttctcgtttcttggatcagaagcaaaaatgtcagaggtgttaacacgcgggtttcgatttcgcccagctgatgaagaagtgacagactaccttatgcggaagacacaatcgccggagttcagctgctttatcaaaaccatagacttgtacgacaaggatccgtgggtacttgggcatgtgagagatccgtgttacaatcactatgaatggtattactttgttaagaaaaaccccctcgggaatgagtacttagataagcctagattgaacgggtttgaacatccacgcttgaaatgggatgtgttgaagcagatacatgatgctctgagttctggtcagaacgtcccaccaagtgtctttacttacggattccgatttcatccgactgatcaagagctactctctttgtacctcactccaaaggcccattcaccagacttcagctgcttcataagagagagagagagctatatgccatggagccatggcttcttgaacatgttagatctcctttttacaaggacagtgaatggtactactttgtgagaaagtgttcgtctcgtcgtgaaaagctgaatttgatgttctacctcaggggcaagaagaaaacatggagggtcaatggtgttgttacacaaatcatagataatgacatagagaaaaatgttctgggaactaaaacaagatattctttcaatctcgatgtggggcgtgtccactcaatgaccgggtggaaagtagaagaattccaattgtcttcggatcctgtttgggcggtttgcagactcacttacctgaaaaacgattcctgcgtgattgatgatagaccaatacttccgggagaagagcatcctaagcttgagttgcaagcattgaagaatttacatgaggtgtaagtcagtgtgaacctaacatttgattcttttctcttttttgttttgttttgtttaagcaacatcatgagtagtgtgatgactctctcaaacattgtctttcttgaggaatattaacagaatggttttgctaaggtcttggcctctatacatataattcaaagtagagaaaaaaggttttcagattctgatttcattcgttttgaacatgaagagtccttgatagaagtatcatcatgacttgatgatgatgtatcactgtcttcttgaagctttctcttgttagaatggcttaagattttgcattcctcagcttcattcctcattataagttgtttgattcgctttacatctgctagcttcaccggtttcaacaagaattcctctgctccttctttgagacatctaaaaacaagaagaagaagtcgataagtttagatcacagtgtagacacaaatatgatcccatctgtatcactacacattacacaatcagtacttactcttgtatacgaggtaagatgttctcagatgacataatcactactggtacttctctgaatgctgaagattcctgcacatatcaatggagttttgtataagcagcattaaaaaagctttgtttaagtctttctcagattggtaaatccattattattgttattaccttaatctttttaaggagatcatatcctgaaagtcctggcattgagtaatccgtcactatcaaattcaccttcaaatcctgttatgatgaaaatcacaaacaaaatcaaatcttaataccaaaacacataaatcactaactagactagttcatttctaaatctcatttgatcataaagacaagaagaagcaatagccaaagccaaagttgcaaaggtttcactccttcggtctttcctaaatatacaagagttcttctcagtagatagcaaaagagggaagatttattcttaattaccttaagattagaagcccctttgcctccatctaagccaagatactgcaaagccctagttccactctctacagtcgtcactgaaataacaaaaaaaaaaagacacttgtaactaaaaaacagaggagagtttgttaatgaagaagaaaaacagaggagagttaaaaccaacaaaaacagagcagaaaaagattggttttgagtttttacctttacaagaagagattctaagcaacctctcgatgactttacgatccacaatactatcatcgacggcaagaacatgcaactccggagtagtaacagtcaaatctccaccggcgggaatctccatcctcatgacctcaccaaccgccattgtcaaactcagaataaaaaagagagcagattggttccaagaagaggaaagctttggattgaagacaaaggaaatgaatgtgataaaatgaaagaagaagaagttaggttaggtgacataaataagaagggagaggtggtggggtttaataagtactagtatagtagatagagagagatttggaagatcggatcttgcggggtaagatctttgaagaggaaacaaaatcttaaaaatgggtcaagtgttgatgttatgtgtttgggaagtgtcagaaaacacaaataatcaaatgtgtcttcaaaggtcaaaatctttgggcaccgaatcttttttaagatttcaaagatctttgtttggtctgtttctttcaatccgacagcgactactccctcgtgacctggaactttccttctgcttttagtaattttattttagttttacctctctctctcttcttttttctttttctttgccaagtcggctactactttgcattttacttacatatcaatcaatgatctaaaaccggtggttattgctcaattaatctacttctatattcattttaacttcaacattgtattttgtattttcctatacacgtgattcgtttatactctactaaattttatttatgtgtaatggtatgatggtgatactaatacaatttaatcctcttgttgtctttttttttttcttttttaatttgggtaagaagtattttacaaggttatcttaatttaattttctttacgtcagtaagggttattattttatttaaagacaaaagggacattttttattttttattgtcatcgttttcagttgagtttcctttattaaattgattgaattttgtatgcaataaaggcactctgtttagtggaccattgtgtgtgatttgtgagtctcttttgcttttggacaaaatcttgagagaaaaatatggacaaagtattgcgggtggatccttttgtctcaatcataacatcttctaaacgaattgcaagaggactaaggcaatagtacatgttatttggtttcaaatcaattaaaaaacgtatattatacgatccctaaataagtgtcaaacatgaaattcctaaattaaattggagaaataataccaggacaacagccatatcatataaggatctctttgcagatttaaaaggtttttttttttattttgcaacaaaagggaatagttttgtcatcatttcatttaagttgtttagtgattttttttagttgaccatcattgtgtgattttgtgagtcctttttggacaaaatctggagagagtaaaatcttcaaaagttgtggaggaggatcctttatagtttgtaacatcttttagccgattgtgagaggacattgacaaaaacattttgtaaagaaaactggtttcttagcattaatttagaatctagcaaactttttgtaacgatttgatagatatctacaaatatcaatgttgagatctacaagaatctagcaaaaacatgatggtcttcacacctaacacttacgaaaaacattattttgaaaaaaaaaaaaagagtcagtcatttgaagagaaaattattacaatgttgatccacatgtctaaacatttgatgatcgtgccaaacaaaacattggtgataagaacattactgaaaggaaaaggaaaaaaccatcaatatgtttcacattttcttattttcattgcaatttatatatggaacaaacttgctttcaaatgtttttttccacctagattttaatgtcttatgtttcaagttatcaagatctttgcatacattttgaataataaaataaacaaatcaagagacagtcatccatttgctccgtacctaagatttatgaaaagaaaatcctaaatccaatttaaaaaaacgaaccacaaccaccaaagtctttcatgtattcagttattttttagaagtcaataatttgattttaaacataaacgaacagttcctgaataatagaaacggactattgatgatatagtcacgatagctacaagaggagaaaaaacactatagtcataacaacgctaaaatatatataaaagtgttctccgtttgttggtttcgtaataaataatgcttcatcatatagtcacgtactgatttgtttacaaagtttgcttacaatctcaagatacgatgaccaaaataccaaagatattactagttatttttcaagactaatattattatcgtatataaatatactgtttttctcataacaacattattttcagctcattgttaacatgcttatatgtgacagtaatatatacacaaattgatacaatatttttgtcaaactttaattttatgacttatcacatagaacagtattgatttgtctatatgcgtccagtgcgataataatcaagtttgactctaaggtataatcaactgggaaaaaattagttccactaaaacaagaaaatatgactcgcttccacatcatcaaccggtaccaactaccaaagaggagatatttgaaaaccaaagtgttaataaaatcgtttagtcatcgaacaaatcagagactacgaataaagttaaacatcaaattggactacgaggattctctttatataggtaacgacttctatattattaaatatcgaggcatggtctgagtaaagttgtcctgatatgcgagagacattgtctcgagaccagatcgaagtaagcgaggagatccaagacttgcttggaaaagtttgtcctgttttggtaggactatgtttctttttgtaagacacatatacaaatacatccgcgagtatgatcaaaatccaggcacatatatacacttgggcgaaacacatatgtcgtcataaacactgcatattcaatagatagtcatagtagacacttaacaatccacaagtagtgcattattgattaaatatttagtagtagatacttcaaataaaatccacaaaataactggttttaatctatctgatccatggaccctgttcccgccaaaatatccatccagggcgactccggcggcagctcgtgagtgatgtcttctagatacgcgggagagttgaaataagtaacagggtcaatgtttacgaactttttctctccaatcaaatcaccaaggagagacaagtgacctgtatgctcattgaagattcttctaatgatagctttacgttcataatgctcaccagcagcaatacgagcattggccaatcccttaaaagttatgtagaccactgcagttttggcgttgagtctctcatttgggggcaccatatcttccttggtttctatcaccgctttcacaatcttcagcttggacagatcgctctacagcagcaaaaccacacagttttggaacaacaaaaaccacaagttaatgattataaccaacagttgcactgactcactcatggtatgtcatcatttgatatgcagaaaagaaaaacaagacttacatctgagattctgaccttttgaattgcacagagtacaagttccaaatacagattaatccaatcattgttttgcaattccgactccttcacctaaatgaacaaaaaaaaaaaaaaatcactgcttaaaaagaagagaacaaaaaaaaagtgttgttaatctatcttaccgagtaaaatcgttttctatcattgaaagaatcatgtgacggccactgaggcaacttatcatccactgaaaaacaatcacaaggtatgaagcgctcgttggtggtcacacctatgaaacattattattcatcagcaagagtgttatttctatacttgtatacaaagaaagaaaaaaagaaaggaaagaatgtttacctttaggtctagcaatcggaacgattatattcaacttgccgacacttcgttcattaactagaacctgaaaaatttgatgcgaaccgctaactgaatcttgtgcaagcaaagtgatgtagtaaggggacaccaatgcatgacagcctcttgttgaatttcattacgtacccgagcttgaagtttgttccctgagaaagaagataaaatagaattgtgatcatgtgtacaagaaacaaccagcactgcagaagaaagttttcaggttgatagatgagaagatggaggagaaaacaaggtgttacctccaacatattgaatcgatgaagccccgcactagcataaagcttgacccagagaggaagaggatggaaactattaggcagttgacagtcgtagggtatcagtgcaatggcacctggtggtgcttcgattccctcgatatcgaaacactaatgaagggaaacaaaaaaaactcactaagtaacagaacaacagaagaagctatgagtgaataaagatgagttaaagggtcagggttgatttaaaggaacatgcaaatagtcctcctcttcaacaactccaacacatatacctcggattcattcagtcgacgccagtaatccctcgccgcatggagactttcatctctagaccccgaaatcatggtccaatccatattctgcggatgctctttttaatcgattttaggttatatttatattcttctttttcaccccctaaattcatttatgggcttctgttgggccttctcaactataaatcctaatcttatattataaacacctgagattcacaaaattctctaaagattgtttgtttgtttggtttaattattgggattttttttttacaaaacggctgcgtttttcattcaaaaacttgacaaacaaaaacacaatcatgtcgtcgtcgtccattgctttgctaaaattcttttaactttttcataccaaacactgaaaaaacactcaacaacaacaacatgcgtattttaactgaaatatttcttcgtcttcttcttctactactactactatgggtttttgaaacaacgtgttatgggtttttaaagggacttattgagaagagttttaacgaaataacaaatgttttccatatagcatggctgcatggataaactcataaaagtgttgagagcatagataaaagaaaactataacagtgtattaggcaatgttttaatgggccttgtactgtgaataaaatgggcccagttaaaaaaagaagagtcccacgtgtaccctctcttttcttcttcatctacacataggttttgcagagtagcatcgagagagaaaattttctgcaaatttggaatcttaaagttaagaaaatttattttcttcgaaaggtgaatctattcctctgtcgtatcgtctaaaagctggtaatttgtgtttcttctcttcaaattttctatatttcttcagattctcacaccatttttgttcttaatagaatttgattggggtaatttggtcaaaggatggataggatcaatggtctatcagatgagataatctgccacattctatctttccttccgacaaaagagtctgctttaacatctgtcctgtcaaaacgatggcgtaatctgtttgccttgacaccgaatcttcatttagttgatgatgatctagaagtgggtggttgtggacaaaccctcatcgattttgtggatagagtattggctgtgtcaagcaatttgcccattagggagttttcaataaaatgttgaacacaatttgaattttcatagggtaaggaaggaggtaagggcagagaggagggaaagtatgggtctttagaggttgacgataaaaaaaaattcaaattgtgtttgattacataaatttacttactgaatgagtagatttaacagccatttgtgttaactacaagagagaggttttatgcatttggacttcactgttactgttctaaactctctagatgttgaattgtttttgtaaatctgaaatctcagatttgagtctgacaatgtcaatgtcaatctattaagaggttgatttttgagtgtcttttggtttgtttttaactccccgcagaccgcgaatttaatctcaaggttaaggtggtgtggaatcagccttaggggatggcgaagtactttgacattgatgacatacttatagaggaagaggtcacctttattctccaatagctttgctttagactctctttatcaactaagaaatctgatctctattgttaccttgttgcagtttgtaccggttttattccataaaacagcaaacggagtgactattgatccaagtgcagaaacaaattgtgtcagtcttctcattcctagtgcaaaagtttgtaatggatatatcatattttcctttctgatatgatttttgtgagattttctggtgcaggctgaacaaggctctaaagttgaacttcccttctggcttgctcatgagttgcatctgaggcaagctgttaccataaaccttcctccctgttttgaccaaaagtaagcattctgtagcttaactgtagtgttggcattgtgtattttcaaggatggagtaatgtcgaaaatctagattgtcaatttgattctctttctttctttctttctttttcttctgcatccatggtcagatgtcctttaagcagttgcttcttttgccctgtaacagtctttttatggctttgtttgttttgtgcaggacgaggcttgaagttcaggctgatgctgcatacgtcgatcttagatcgcgatgtccatacttttatgaatttggatgcaagatagagccactgtgagttcctccttttaagactctgtccactcacttccctttcattttgatgttgtcttatctcttggcttcaagaacaaaagtgtctaatttttgaggcagatgaaaactcgattattacagtgtctggattaaagtaaagctattttctgtggtggtaatcatactgatttttggtctaaacagggtcacagatagaacactggggatcttgctatcgactgcgtttaagatcagatacaaagaggcactgacaaaagtatacacagcagctcacataacagcttccaagtacttgtcgtttttaacaaaagaagaaacaaactgtaagcctttatgttttgaactctaatggtagtgaatttagtgtttaaccatctcaagcttgtaccaaaatgaacaatctgtttttgtttctgtgttctttttgaagtgtatgaagcagctcacttgtcgatgacagccttcaagaagtggagaacaggtggtcctagattccagagagcttcaatactcggaagaaaacgcaaggattctaattaagttccctaaaactctttatcctcatccttaccaagagggtgattgtgttatattagttataacatgtcaaaatgatgcaatggcaacatattatggtctgaatcaaattgcaaatccttttgtgttatgttctcttcagtaaactcaaaatcatatccagatggtgttatcagttatgccatatgatccagttacgttcaaaattgatcattcgttctctataattttattcaattcttcaaaaatattgaattatagattaaccaaaattttccacttcaatttatggaatcattctcttctgcttcgtttaaaattataatatttcttttccccggaacagattcagattaagaacaccaaatccaacacaacaaataaaagaaagtatatagtagaagggctcatatcaagtgtaacttggaaggaccgtcatcgagggaaatgggatgaaagaaagaaccctaaatcaaaaaggggaaaaaaacatttatcaaatgttatttctccttcgatttcaatttgagttttttttctccatgccatgagagttttgttcacactcctctctaaagcctctctctttttaatcaacttataagattccgaacaaagcatttttttctttctctgcctttcatcgcttacgtggagaagaagtcatggagaaagctttatcgaatagtgtcgtatcttcctctaagctatgcccttcgtatgttaccttttacctttgagtctcctcgctggcttctagtcaaaggagattcaatagtcttttcgattagttactatccatactaatttacaaggaatttgattaatacatgttaaatttaagtatatgtactgtaaaaacaataacacatgtaaaaataattttgttaagtttctttttggttaattattttttttcaatatatatagacatatatattagtatatgtaaatttgttttcttattctactttttttatttttttaagaaaataaaaatattatcttaaataacaaaagtaaacatctaataattagatctgacatatgttaggattttatgagttaccaactttaaaaaccatattttatataataagatatatatatatatatatatatatatgtttaaaaaatctttattccaaacagtttataatttaaattagttcgatactgatcaaatttattgtagtgacttatttatttaattcagtatttgatgaccaattaattaattgcaaccgtaattgtaatgaactctttttatttgccggcattaaaccaaaggtacaaagtcaagaagcttgctcgacttgtagagtcgttcccacgcacttgcatgtggtaatcttttcaagagttttcgaagttagaatctaaaagcatctccgatggagagagcctccatgatttctctccattttctaagtataatttttttttaaattgttagaagaaaactttagttttttctttttttttcatattccaatgatagttctcttaatgaagttcccagaagaagaaaaaatattatttgaaaattattttatttctttatttcataaaatttaataatcattgtaattaacaaaatattaagcatacattattttgaaatattttaaaatagatatgaaaaaaaacagaatatattattgaattgttgatcgagtaattgatcaaagcattgttctatgatatcatcgaataaactactagacgaagaagtcatatcgtttgatagcttgtagtataaaagaatagagaacaagaaatttaatgaatgagaaagaaataagtctccatttgaaaagaaaaaaatacgcgtccaatcacaaaataacacgtgacaagatccctcaaattatcaaagctctctagagaaagtagggtctctcaattataatgagtttagatttatttttttaaaataaatgtactctcaaattttttgaaaaaaactctccattggagttactctaacaaagttagtgtggttggtgcaatcaggaatataatctttgtctttgctcacccgatgagagtaaaaagtacttcgctgcaacattccagaatggtactctggattttgcaaacgaccatcaatggtctcttaatagacaatcacaaacttctaatgctaacgctattaatacggataatttgaacaaatacccttggatcttggagaaccaatccgggatcaaataccaatgaactcgggaggaggatggttcgtttgtcgttattccttgttcaaattggtatgggcgacgacaatgctttcttctttttggtgattaggcagtgaaagtgactttcccttttcttgttttataggtttgggtttgctcatggttcccgacggtcctcagcctacgactgaacaagttgaagaaaccatggagaaatattgtgaacaaggtgacaagaaaattgaggaaatcaacaagcgcttgaggacgggccagagaaaaccaatatccactagtgagaatattgagaaaggtaaaagcagttcaagaaattcgatttgttcatcgtgaaactctctttagtggaatgaaaattcgttttcttcatctttaatggaatgtaactttgtaggagagcactgggatcatgacactagttgctcggatgatgaggatgttggtgatactgaaagctatcatgttccaagtgcaatgagggtaagtctttttcaaatatacaacttgctaaaatgatatcttacgaaagttaaaagcatgctatatatgtgaatataggattttctagatatagatagcgaggcattccttagcaattcaggtagagacatgaagaacattcttaacaaggtcaaggaatctgagaaaaaagtccaggtaacttatctctgctctggtttgtttgatgagataagttcagagtctttcttattcgagaaaaggtttatctaagagctatgtgtgggagttgaagaattctgtttactacttgttttgtttccttgtgttggtttaatctagaacaactttgcttgttgtttgttttttctgtttgatatttatctctgtcttattctatgcttttcatggaagcaaatttgatgagaatactcccatcatttgtggttgagaaagccttatttagatcttgtttcatgaacgttggggttgaccaacgaacaaaatacttctgttttgaatctgggtttatgttttttttttttttatactcatcaattaaataataattaaaaagaaaaaaagtaggagagaaagagagaaaagtggagagacgtttctggcaggagagacgattctcagcatttattgagagttgtcattcaactaatggttcatttacttcaaactaattaaaatatattaatttgattaaaatattaatttatttattttttgagatactctctaccacttttgccgatggagatgctctcagtttctgtgtgtttggtaacttggaaagccaaattctggcactgcaaaagcttatttaaacaagtatatttcaggaaaaaggaagcgggagaggggagcccagtacttgaggacaggagaaggattgattgtacataaatctctttcttttttgattgcctacaaaatcggcttcgggactaaaattagaactccattggagaatgagttagtcaaaaaaaaattccctaaattaagacaaatgcaagcacaagagaagcaaaatctctctgtctcttctctgaattcaaaacaaaggtttttcaatctgtcaaagctcacaatgaaccgaaattacagagagattgactcgtcttcttcgatttttcttatctccttttacgacaaagtacctaatccaccttctccacccactcgccgttgtggagagggagagacacccggcggagttggagtgggtggaggaagaagaagaagacgagagcagaaacagaggattcatcgatgttatactctatcaaaaattgcagatttgcatatggaaagacttcttcttcacgattcatgatcacacgtcgtccgatttctgatgcaaatttgtgcttcgatcgctcaattcctcgcttgggtttcattccttgtactattagcgacggtgggctcttcttcttcttcggaatctctcctaaattgtcaacctttagatcaccaccttgtaaaccctagtcgtctgcttggtttcctcagagcaatgtcttccgtcaatgatttcataaccaacgacaagctttgggtcgtttcttccatcaccgatgtatctccacctatctatgtgtttctacagtgcagagaagatctctctgtttccgattgtcgacattgcttcaacgagagcagattggagctcgagagaaaatgttcgggttccggtggtcgaatccatagtgatagatgcttcttacggtttgatgatcgagatttctctgaggaatttgttgatcctacatttgataaagctaactgtgaggaaacagggacagggtttggagaattttggagatttcttgatgaggctttggtgaatgtaactttaaaggctgttaaaaatggagggtttggtgcagcttcagtgattaaaaccgaggccgtgtatgcattggctcagtgttggcaaacacttgatgagaacacgtgtcgagagtgtttggttaatgctagatcgagcttgagagcttgtgatggacatgaagctagagctttttttactgggtgttacttgaagtattctacacacaagttctttgatgatgctgcagaacataaacctgacgctggtatgaaacattatgaatgttgacttgacatcactcttaagagcttattcacacatggatcttgtgtttctttcttgtgcagatcagagaaactttataaggtcatcgttttttccacatttgagtgatcgtgatgttacgagattagcaattgctgcgatttcgttgtcgattcttacttctcttggagcctttatcagttacagacgggtttcaaggaaaagaaaaggtatactgtgactaaaatatcttacaacaccaaatatatgtatgaggttccttgtctcgttgattcatgatcttttcttgtttagctcaagttccatcgtgtgtaaatttcaaatacgagatgcttgagaaagcgaccgagtctttccatgactctatgaaactaggccaaggaggggccggttctgtatacaaagggattcttccagtggcagaatcgttgcagtcaaaaagctcttctttaacacacgtgaatgggcagatcaattcttcaacgaagtgaatctgatcagcggagttcaacacaagaaccttgtgagactacttggttgcagcattgaaggtcccaaaagtcttcttgtctatgaatatgttcataacagaagccttgatcaaatccttttcagtaagttgcagcatcttctataaacttaagtcatttatcgaatccatcatgttaactttgttatttgaattgcagtgaagaacacagtccatattttgagctggaagcaacggtttaacatcattataggaatatcagaaggtctagaataccttcacagaggatctgaagtaaaaatcatccatagagacatcaaaaccagcaatattctccttgatcgaaacctaagtcccaaaatagctgattttggactcatacgttccatgggcactgacaaaacgcaaaccaatactggaattgctggaacactgtaagtgtgtgtgtacttctcgatcaattcttcttttagagtataaagttttggaaattgatgttgttctttggaactgtagtggttatctggctcctgaatatctgatcaaaggccaattaacagagaaagctgacgtttacgcatttggagttcttatcatcgagatagtaactggcaagaaaaataacgcattcacgcaaggaactagctcggttttatactctgtaagtaatatttgtttccatgttaagtcgcagatataagatacactcacaatcagttaactctatcatggctttgtcatgacttgttggaataggtatgggaacattttaaagcaaacactttagatcgctctatcgatcctcggttgaaagggagtttcgtagaggaagaggccttgaaggttcttcaaatcggattgttgtgtgttcaatcttctgtagagttgagaccgtcaatgtctgagatagtcttcatgttacagaacaaagatagtaaatttgaatatccgaaacagcctccgttcttgagtgccagtgttctaatgccagatgaggagactagagtctgatattatcagtttcttaggattgttaatgttcttctgtaaatgctcaaaaatggattttacaccatttctttctccttttcaaatcttttatcgttcatattttattatgaaggtcaacaaaaatggaaccaaggctagattctaaaagttttgattcgtttacatcattattcattttacaatctaaatcatgtgagttattataattttttggatgtgatcattgtgggaacataattcaaaaccttatggatgggaaaaagctaacaacttatgttttgtatataacctctactagcaaacaacaaatttggaaaacaatgattaaatcatatcacattgagggtccaaatgattgtagcggttaagacggacaaatctgtttatgtttgtagtgttgaggactcaaaaaaaaaaaactcattgctgaccaactacaaaccgcttttacatacaaatagagttgctccgcaatggtttgttgtctaccctaaagataaagcggattaaactgttgacggatttgtctactccgaccgtcatcaccattcaaactctgaataaaattgtattattagtcggttgtatctagacaccaaatcgactaaagaaaagaagtgcatatgcatttaaataaagttgaaaatagagcaaaaattgtcgacgaaaaagaagagaaaaatatcatgtgacatttttgaaagataagaaaaaaattgtattattagttgcatatgcatgacgctagaaatagaatctaccaaatattaaatgcatatgtaccaaaaaaagtgcaaatgcatttaaataaagttgaaagtgaagcaaaagttgtggatatgaaaaaagagaaaaatgtcatgtgacatttatagagaataataataataaaataattgtattattagttgcatcatttaagtaaaattgaaagtgaagcaaaagttgtggatatgaaaaaagagaaaaatgtcatgtgacatttatagagaataataataagaaaataattgtattattagtttgggtagacataaaatctaccaaatatttaatgcatatgtacaaaaaaaagtacatatgtatataaataaagttgaaattaaagtaaaagttgtggatgagaagaaaaaagaaaaaattatgaaatatatatagagaataaaaaatgcacggtagaataaaacaataattcatatagagtaaaaagataaaaatatgatgtgacatgagagagatttaattattttttggctaaagatgagtaagaaaagataaaatgagatatttttagaaaagtaataatttctagtgagaaaaaaataaaagtatgatgtgaggttagtgagattttttttttttttgatggaaatgagaaaaagtaaatgaggtagtttacattttattacttagtgtgacatgtttgacacgccttctatccaaaacataagcgtttttttgtctttaatcaaaaataaaccgtttcaaatcactaactctcgattgtcaacaaatgtagttttattcgctttctagtgatcacgtcattcactttagttcattaagatcaaacagaaaagaggatttttgaagaccatcactaccacaaattaactattaactgttcaaaaacatttgactttcataatgctatggtacaatttgctcaacatttgggttaatacaaaaaaaaagtaagactaatgtatatttatcctttttgttggtcatcaataacatcatcattagaaatatttaatataatttattatagtgtatattactgtgggtttattttttaaaaagagaaaaatataaaatctgatttttttggttatatactaaattatttttgaataataaaatttagtttttatcaactaaatatacagttttcactaatttttaaattttttaacactattcagtataaaccaacaatgtttccaatagaaattgatattcgtaccattaccttttatttgtactcttattttcaatatgcaccacgaaatcaaacaaaatcactataactagtattattattttttttaccgactattattcttagggatggttcgttatcaccattgaatcaccattgaaaccctttatattatcgcaatcgaagccactgagggaggttttacatctcaccaatattgttttacctttttggtaattgcaatatcaaaaaaaaaaatttggtagttttcaactaatatttataggagaaaaaaaacttaggtgggcccacattgttcttccccaacttcttcccctggaaggcaaataaacccttccctctccattttcccaccatcctctcctttctctcaacctctccgcctcggattccgccctatctccctttcaccgcctcagattcgactctctctctctctcacaaatttttgatctatttcactctccttgtcgtggctttgttttgaccggaacattattccggcagctacccaagacctcactcctcgactatttagtttcctcgctgtcactatctcaacgccggaggaaaaacttaaacaaagagtgataggtcgaagtgacaccggtgttgtaatcggtaaacccagaagaagccctaagagtaccgtcgatttttgtgctcttatcttcttctgctcaatctatttcgcgcacattgtacagtggaaagtaacagtagctttgcatgagcctgattttcaggtaaacttaaaatcccctctctctcggcctctgtgattcgttatcccctaattttattatctaggtcgttttagctgagtttgagagtttcgttacttggattgttctagcaagtgaggttttgaggaatttcttagggttcgtactcaaaagaaatacgaattctggaatttgtgatctgtgatctctctgaatttcgtttgttatgttgcttccttccagataaacaaagatgagtcacgatagaagtgttaacgtttcgcatgatgctgtgattgctaaacccgagcgtggcactatgcttcagagcttctcacctaggagccatggttctaaaggatattctctacctcaagattcagaagaaaatagaggatcagtcggccaaagtgctggtcagagtagcactagtgtcgttgatcaggtccggtcgccagctgatgatgctggtgtcacttcttcatccaccatatgtccagctcctgtttgtaggcaattttggaaagctggaagctataatgatgaattgagttcaaagtctcagcagccaagtatgctatattgctacttatctattatcacttacttttatcttactctttgcttgcatgagtttgcttttctctttggaggttatactgttttgagttatatccgccagaatacatcgtctcctttgccttttttttaatggttcttgacttatgttttgcagatggaaaaaattatcttcatgtgcaccctatgttccttcactccaatgctacctcacataaatgggcttttggaggtatgcttaaacaattttccttcttttgtatgtgttattcaagcgttttaacaagacttatttgcttctctctatctgcagctgttgcagaattgcttgacaatgctgttgatgaggtgcgtcctttcttctgatgtgctttatgttttgatctgactacctgcttgttcattactgcaaattatttgaataagactccttagaaccttgtttctacaaatcttaatgtctttgcttaagcagaaatgttttgaatcttaaaattcttgaatactaaatatattcttgatagagaacttttcccttccggaacccaagtgcttactttctgagtccattctgtcatttgtttaattaaggtggaagtgtgcctaaatatttgtaggtaatggttctggatgataatctattaatatgttttgtgctctgcatcttcatcaccctatagatccaaaatggggccacttttgtcattgtagataaaaccacaaatccaagggatggtgcaacagctttgctaattcaaggtaattttgcatgacgtttcttggattaaaaattccgtcccaattcacaagggggagtatgcaaaagaaagactttctaatcatctctgcataaaactttcagatgatggtggtgggatggatcctcaggcaatgcggcattgtatgggttttggattctcagataaaaagtcggattcagccattggaagatgtatgaatctttcgcttcattctctaaactctttatctttagttatgattctgcaacacatatctctgattctcattttgcattacataccattagttatgattttgaaactcagatctttaattatgattctgcatctcaccttcattattatctttagatggaaatggtttcaagaccagcacaatgagacttggggcagatgtcatcgtcttcagccgccattcgaagaaccagtgagtggtcattgttggttatcctatgcgctaatgttctaacagttttccatccagttatctttctaaacaagcaattgtgctaaattttttctattccatctgactagaacattgacacaaagtatcgggctcctttcttatacatacctgacacgtacaggccatgatagaatagttgttcccattgtgagttttcttctctcacacatattaatgtaccttgtttttctataatataaccgtgttaccttatgaatattcagttggattacgagtttaatgcttcagctggcgagttcaagacattgcaagaccgagaacattttatatccagtctctctattctactagaatggtctccattttcaacagaagcagaacttttgcagcaggcaaggccaatttttttttttttttttttttaattttctccatgcaacccattttgtctacactctatacattctggttacttggtttgaaatttggggtctttcatgagtgtgatattccttggcattgtactaattataaaagcttttgatgagctttaagttctgtatatagtaatttgatcataaccgtgaaagcatccatgattgctctccatttttggatgttgtcgtctaaggtagtatccttcaagatatggatgaatgaatgctcagataagactagagcaattcattggagactttagtgtgcgcttaaattaggcccctacatgttggtcaattctctatttgtgtttgccccatttaataaagtttttccctttatttgatatgttgccaagttcttctcttcaatgaccattactcttttttatttgtatcagtttgatgatgttggaccacatgggacaaaggttatcatctataatatgtggctcaacagtgatgctaaattggaattagactttgattcggttgcagaggtgatattcttgatctttgctatctttgttcttctcttcgttcccaagtattattatttaattgagatcttgtttctttccttgttttttttgtaggatattctcattgaaggaagcataaaaaaaactggatctaagattgtgaatgatcatattgccagccggttttcttactctcttcgtgtgagcttctatttctatttgtcaataatgtttagggaactgtgtatgcttatgttcatgtgcaagtggttatggtgatattgaatcatacatgtatgtgtgaatgtactcatgaatactcttgggaaatacgtaatacacatagacatagaaaatgctgcagattgctgtatatccgaaagaaatacttgtgcaactgtgtttatactaaacctagataactggcatgcaactgaaatcctttccgctgctgatacctttgtgcaggtttacctatctatattatacttgcggattcctgagactttcaagataattttgcgtggtaaggttgtcgaacatcataacgttgctgatgatctcatgcatccgcagtacatcttgtataagcctcaggctgctggatctgaagaggtgcgtaaagtatctgtaggcttttgtttttcttcgtttaaaacttcttagtttttttcctttcttatgatttgaatctcggtattcaatgagcaggctttagttgtaacgacgattggatttctgaaagaagctcccaaagtaaatcttcacgggttctgcgtttatcacaaaaaccgccttattatggtgagttttgaaatattaaatatgttatagttcacatttagtggaaaaaggattctcacagactgggatattagttataattttgttgttggacctctctacactgaacctggcatgcagatttataggtattttgaaaaaaaatcttcttaactcgaaatttgcctcagaaattttcttaccccagttaaagactacacaactcagtatcatgtcatgtttctatcacaaattctacacacacaatcttgtatgttactgtgaccttatctcatttgctttgctcttttcagccattttggcaggtcataaattattcaagcagtcgaggaagaggggttgttggtaagaaactgcaaaatggatcaatcaatatcacaagacatgtccactgatttgttttttttgtagcacacttctttgatgggtgaatttatggtaagttgtatatgtttccaggtgttctagaagctaattttgttgagccaacccataacaagcaggattttgagaaaactgttcttcttcagaagcttgaaaaccgtttaaaggaaatgacggtggagtattggtaatttcctaagcctcatctttttggtagctgttgtgttcctacttttatatattccttcgccaaagtatataatacagagttttcctagtgtatggtaaaagaccatataagatatattgttctcttgctgagcatggggagttctgtcttttgatttgcctctaaaagtttccctattacctctggattggcttgtatcaattcccagcgtttcttactgcttaatgtgattaaaaatctttaataggagctgccattgtgtgttgattgggtatcaagtaaataagaagcctcgtcttcagatacctcaaaaagttcaacctgccggtagacaagcattaagtcctcctccaggcttccaagcagtttttccacaaggaaatacaacatctctccctagagtttcaactcagccaggtaaatgtaactaaaacttgaaccgttatgtaagtgggatcatagttagtctttgacttgaacaaaactagagttctaatattggactgcccggtctgacctggattggtccaggactatgcccaaattaagaaacatgaaaatgatagtgctgtgaatgctctatatagtgactgcaacttgccgctttttcaactcacttacttaagaaaatagaacaaaataatcaatatcatcttactgtaaagctgacacacttttccaaactgattgcaagtgcttctgctatcattttgttggacgtcgttttgtactgtatatttccccgaactctctctgatgctgacttatgatggtttcattattattgcagtgctgttggagaagaggaaagaacatcctgattctgttgcaagtgcagcgttaaaaagaaaggttgggaatgatgactttactgtcccggggcatattcgggttgaacaggtacctcaatatatgtttcttctctttgattttctgtgcaacatgtttaaccccaatacctagagatgctgacaaaactgtggatattactgactagagtttcatctaagcgctgtttgtgataaaatatgacatttctcttatgtgatagcccatgcacatgtgcccacatagaaaacatgatagtaactttagtttgtgactgcatctacccattccgtttctctaacttcattgtcttttgcactctgaagtttattcatggatcagcaagtcagtcacaagatattgaaactgtcaagttgatggaagaaaacaagaagctccgagcaaagtaagataaattatgtaatatatattgccaatttccgcatttgtttgtgatttctgccagaaatttattgtatttcttatactcagatgtttggaccgcaaggtgcgaagtcagaaccttgaagtcaaggtatatccgtcgtacattaacaacccttatttagtacttgtatctttcatttgcttaggtggttttgacttaccattgttcctgcctaatcccaatctcctctaaagaaatcagatatatggagctagtttagcaactagcttattggcaatttccatcaatcactttagtagaaatactaaatatcaccataggttcctccatataccgttgaatgaaatacaacgatgagtttaagtcatatgattgcagaaacgatcttgattttgtggtgatacaatttgggtgttttttttgtctgcgcaggccatgaatcttaggagtgagctcgagaactataaaagtgagtatgaaaggttaatggtagagctacaagctttggatttggtgaaagacgagcacagaagaaatgtaaatacgtagaaacttcctctgcacttaaaaaaacactcttttttggctggtcgtatccatcttctaggtatgaaaactagagatccttagtttatgggctgtctcggaaagacaaaacaaaatgtgtaaaaacaggattcatgtttatgaatctttttgtctagaagattcagcaaagttatggaaaatatataactttctaaaatttttagttttactcacaaaaactctttaaactaatgaccatgacttggcgctgtgtcaccgaccatccgagagtaataacgagttttggtaattagtttccagcggttacaatatagtgagaatcatcactaataaaaaacgttattatttctgtaactggtttgcaaatttgtaatccgaccattgactattcataactattctacaattgtatagcaatcccagcaattattgtttaatcataataactccacctacgtattctgatcataaagtctttgatttggttagaccatattaccaaaatactaaatgaggaaataatctctgccaattaaaaacataaaaccaagaaaaataacaataatccagccaaaagtaagtgtaagtgatacgtcacagctgatgataccaacaaccacaatacgcgcatggaaagcccatgagccaacggctagtcacgtgagagcgcacaaacatccatgacattttaccgttgaacaacgttaaagggctaaatcagatgcttcaaccacattccacaatacgttctcttgccacgtgacgataaatgattcgttcacatggatttcataaaaatgaatgagaatgtagctgattcgcgccactttgtcggcatgctcaagtgactctaaaccgttggatctcaatcgcgccaaaaaaggaaaggggtagtttcgtaattaaccgaatttagattaaattaaacgaattagtgacaaattatgcgctggaaaaaatagtcgactctgattgtctgtctgaagaaagaaaccgaatcgattcaatttcaacgtctcgtccttcaattttcgttttccgagaaaatttaggaaagaaagagaaagagagggcagagacaaaaatttcttcgccgtctgagtgggaaagatggcggaggatttcgctagagcggtagacgatgggcttaaactcgcgaaacggatttatttcggcaaagaccgagccgttgcggcgccgagaccacctgctccgatggacagatcttccactacgcagccttaccttcctacagcacctatggtttacgccgttatacccgacccgggaattgtggataacccggatttgcctagctatcagcctcacgtgcacggcaggtgcgacccaccggctttgattcctctgcagatgaattcgattgagctggatgttgattgttatctcgacacggctcttgttactgtcaccggatcgtggcgggttcattgtgttatgggaagcaagagatgtgattgccgaattgctattcccatgggagaacaggtctgtcgtgttttttttttcccgggaaaattgagatttctcgtaatgaaatcagttcactgttagggtttgaagataaaatgtggaattggggatatgtgtagggtttgtttataagctacaatgtttttgttttcacaaactaatatagtaaaatggctgacagggatcaatactaggtgttgaggttgagattcctagaaaatcgtacacaacgcagttgatcacagcagaagatggaaacgaatttgagaaaacggcactacctgaaactggtggctttttgaaacctaacattttcactcttactataccacaggtgatttggagttaaatgttcttcctcttgtgtttttctttattcttcattctgattatgtatatcgtttctgttcttgttttcaggttgatggaggtaccaatctctctatcaagatgacttggtctcagaagttgacgtataaccaagggcagttttttcttgatattcctttcaactttcctgagtatgtgactcctgcggtaaagaaaatctcaaaaagagaaaagatttacttgagtgttaatgctggtactggaacagaagttctctgcaaaggatgcagtcatcaactaaaggtttgattttatagatttttctgaatacactccataatatttcaatttttttgctctatcattttaactcttattcctttcttttattacaggagaaattgcggagtgcagggaagttgaggtttgcatatgaagcagatgttttgaagtggtcgaacactgactttagcttttcttatacggtattggctttaactggtggtgctccaacttcgcgtatgcacttgcaaaaaatttggattgaatttagttgtaaagagtgcttatgcttttatttgttttctaataaatcgtaggcctcctcaagtaatatagttggtggacttttccttcaatctgcgcctgttcacgatgttgatcagagggacatattttctttctatctttttccaggaaagcagcaaaaaactaaggtttgatttttaactctttcttttctctagcaataaattcatttgcattttaatcttaagttttgttttgtcaactttaggcattcaagcgggaggtagtatttgttgttgacataagtaaaagtatgactggaaaacctctcgaggatgtaaaaaatgcgatatctacagctctatctaagcttgatcctggagattctttcaatattatcactttcagcaatgatactgctctattttcgacatcaatggagtcagtcacttctgatgctgttgaaagaggcattgagtggatgaacaagaactttgtcgtcgcagatggtacaaacatgctccctcccctagagaaggtctttccgccactcatttgtagcttaacattttggtgattatatcccctctgattgaatcctgacattaattcggctaactttgttcaatactttcaggctgtggaaatgctttcaaatactcgtggctctattcctatgatcttcttcgtaacagatgggtctgttgaagatgagagacacatttgtgatgtaatgaagaaacatctagctagtgctggatcagtgtttcctcggatacacacttttgggttaggtaaacttttctccaaggttttgatgttaaataacccggatcgttttatttaccttttcgtttttggattctttgcaatatttcaggtgtattctgtaatcactacttcctgcaaatgcttgcaaatatatcctgtggccagcacgaatcagtttataatacaggtgaaactttgactctgtttggtgaattaaaggaaaaagttaacatctgtaatatagtttcttaaacaatgttcttcttctttgatgtccagatcacattgaggaaagaatggacaaactgtttacaaaggctttatccaccattcttgttaatatagcaattgagccccttcagagtctagatgaagttgaggtgtgcctctatgcttgcttgacttttctgggatttttgtttccttccgattctgtgaagttgatgcctaaaactgaaactgttacctgtgactacaataataggtatacccttcaaatattccggatctgacgtctgcaagtccattgatgatatatggaagataccgaggaaagttccccgagaatgtgatagccaaaggtctgctaggagatttgagcagcttttcgacagacttgactgtacagagtgcaaaagacatgcctcttgataaagtaagatctacgtcctgctcagtatcattcctatggagcttctttcgataaagacttctgggtttattcataattcatccttttccctaaattttaatgttcaggtatttgcaaagaatgttattgacttgcttactgctgaggcatggttttctgaagataaacagctaaaagagaaggtttgtctacaattcacttcccccactgcctctttcaggatttgcttcttcattttgctttatcttcttcgcagattgctaaactaagcatccaaaccggcgtactatccgagtatactcgaatgatccaattagagaacacagaagaattgaaacccagcgaaactggcggaaagaaaaaggtaggtactactcatttatatatctagaagttatgaactaaaatcgccacattcaagcaaaacctagtgattaattctgttccagaggaccaatccagactcattataacatatattcactaaatatttcaacagacaacaagcaacggcgagaaacagaagatgatatcaagaacgatcccgctacaaagccttgggataggatttggggataaaacagccaccagagagaatgttccgccaggatttggcgagcagaaagctcctgatgctgctgagaagttcgtcaaggctgcttcgagctgttgtgtctccttgtgcaacaaatgttgctgcatgtgttgtgtccaatgctgctctaagctcaatgatcaatgtgtccttgtcttcacacagctcttcacagcgattgcttgcatcgcctgctttgaatgttgctcaactgtttgctgttctggagacgatgggtagttagttaaattataaaaaaaaatcggttttgaattcgagtgtaaagctttaaaagtttcaaagtaagtttgtacattttacatacacactgcatgtaatttctgtacggcctgatcaaatataaaagctgtgggttttctgtatagttgctacagggaagagagtgtaaaagaagggacaaatccatgtgtttccttcacaatttactcgatttcgatctcttaaaatggtccacatattataagtatataacgcaattgtggtgtaccaacaaagtccacaaagatgggatcaagtgctacaaaaatggtgacttgaagtcgtaagaaactgatatcgagggtgtatagaaacttgaacccaattttctaatcgctggctttttgctggcttctgggacttgtgtttactgtgtctttaaaaacatgggaccacttgatcatctttatctcctaaagctatttcaagaagtaaaagatcattgacagaaaaagaaaatttcttggagaacattgacagaaaaagaaaatttcttggataaacacacacatacatgtgcttttatatatgcatgtctctgaaatatgaaggttggttttcatatatgtctaaatcaaattaatagtgttgatctttctttgatcgtgcaaaaatcttgatcttgttgttctacacagatttttagttgggttcaaagaaagcttagcggaaagaagcgtgtgcctacttcagattcttgtgagtaaatattcttattattcatagactacatgaacagtcttcgcataaatcatttgagcatattttcatatttttgtttcatatgtttgatgatgtatatatagctcaagaaccatcaagtcctcctttgagtaaagaagtccaaggtttgcctcaagacgaagaaaccttcttagccatcggaacacttggaaacaatatcttccccaagcaagaagaagaagaagaagaaacagattctagcaaagatataactccggttaatacagatgttactatcgggaagaagaaatcgctttcttttcttctcaagaagatgtttgtttgcacaagtggcttcaaaactccacctcctcttcttgatttatctagaggagattcattgcacaacacacgaatggaaaaggtaagcatatatgatcaaattattcaatctttaaacaaaatattatttttattatgaaaagaagtgaattcaataatagttatgtacactagaaacattttttccatatgttattttgtgtgtagatgctaaggacaatactcaacaagaagatacatccacaacgttcaaattctatagcaaagaagtacttggaaagtaatcataagattatggatgaagctcgttcaagtgttgacgccaacaaatgggtcaagactgattctgaatgtgagattttctaaaattatatatatttggtttttcaggtcgcaaaaaaaaaaagttttattttaaacatacagatggtgtaattaaccaagtgaatatcatgactggctttattgcagtatttagttaggtcaaaagcatataataaacatcataaggactgaattaaaatgcagaaagatgaaaagtaagaatttaaaaatagataaataaacaaatagaaaaatgtaaacaagaataatggatagggtaaattaatttaaatttctttgatggttacagatattgtcttggagatgtagatatcaaccaataagctaaatggacctgattgatagtcatggtaataatagaatgtaaataaaaaccaaagttttttcttattaaaaattgattttctatgtaaaatataaaaagtagcaaacaaacatgatcactgattcaagacaaataatcaaaaatatgtttttcaggtctcaattgagtgatggtgtaagttcaactgttcaagatatgaagaataacattggagaagggtcataaaaatatctctgataatcagtgtttacagatgtatatttacttgtcaaactccatttttcatcatagatttgtttttattttttcagattttaatgtggtgaagaaaatctgtttgctcatgtaaactacaaaatattcatcttatcaaataattttatttgtatttatgcagtttgaaataagtgatgaataatgaagaatgactgagatttcttgttaaataataaaatgaaatgaaggaaaacccaaatgcaaaataaaatgggttgattatgcaatagttacgaagttttggggttttaatgtatttttcctaaaattgaaaaaaaaactcagtctgaccaaactttgacagaacagaatcgtgcgagccgtcagacttaacgaaaacgatccatagatctcaagtctctctctcttagtgaataaattagggttcgttgattctctgttcttaagctcagtaatcgaggagaagaagaaaagggaagatcgggaattgggaaactgagaagtcaaaaaggcaaatgcgagtggaggagattgagttttagaattccaatgtcttgggctgctcctgatgatatcttcttctccacttctcttgctgcttacctagacagtaatctctctcactctctttctcattactgattcaccggcgatgaattctgtaaaaaaataagattttgatccccaatggttgttgaagatgttatcttcttctacatgattcaatagtctcttaatgttttgatttcttgttgcagagaaacttcttgtgttgcttcgtgatggtaggaaactgatgggtctacttcggtcctttgatcaatttggtacttgtctttctcttttgcaccgaaaatccaaagtctttgaaatggttttaagaaatgtttcgtttgtttttggttttcttgaagctaatgctgttttagaagaagcttatgaaagagtcattgtgggtgatctctactgtgatattcccttaggtctatacattatccgtggagaaaatgttgtcttgattggtgaattggtaaagcttttactaaacaaaccaattcctcttgcattttgaaatgaaagtttccacttttaagaacgatttcggtgtttgaatcgggtttctgtgatcttaggacgtggaaaaagaagagcttccagctcatatggttcaggttccagaagcagagataaaaagggttagtgcaaatatccttctctcccttgttgattgctttagctctgatttgtgagcttcttgcacaaatgtactacagctgatttgcttttatttggtttagtgttttggattctactgactcctcaattactctcttccgtatactcaggctcagaaagcagagaaggaagaaatgcttttaaagggcacaatgcggaaaagaatggagttccttgatctcgattagggcattttcctatgtgttgcagcattgtagaaactagaagatctcaagatggaggatacagaagatccttaaacgtcataatgttagttgatgtgtgtatgtgtggatgacattgatgaatcctcagaacttagtcgttgcagatcctctgctctgtttatggaatgaaattgttgagcctgttctttactggccatttatttgatcaatcacaattcagtaaaaacaaagatacaaagatgaaaagtgaactcaaagtacagttacaacctttgtatgattcatatgaaaagttgaagtaacaaagcaaacatagtatccttctcttagtagttaccaaaaaccattgagccaataaggcgtctcctctaggtaggccctttcactccgggtaagatagcattgtgatgagtgactcgtgttgcggaaaccttgataagagatcagagcgtttcgcgagctcaaagtcctcgaactggaaagcaggagcgcaggtgcagccaacaagagagaaatggttctcagagtctctagcctcagctttaagcagagccccgtcttgagaaaaatgaacatcctttgtaggaaacgaaccaaaccagacgtttggagggaccgtgtactgaggcttctgatcaccttcaaacaagtcaggaccaagacatgtgaatttcaacttcccatcatcgtagagttccactacctgatcaaggcaagaagaagaagccatattcaagaacatggattatattcttcttctcattatacagttttgttcactcactgtaaagacaagagctttgaacttacagtaaggggttcacccaaataaaagtgccaggtttcagccattggtatgcgatgaagacgagaaacgctcccagatggaagcaagaagtagatacttgtgctcacagctctgtccaccttaactgcagagattcagaaaaatatataaaaaaggatcaaacttgcgagatgatctgcaataacccaaatccaaagtttaagcattgataataagatttgtgaatagaagatccaagcaaattcacaagacaagcatttggatgatcttggtaacaggaaagacaagaattctacggaagccgtgacttatgtctgatcagatttcggaggatcataccgctgaaatctcaaaatgcaaaatcggaaactaatgaagacactatatcaacaagattccaaatcaaaggaagacatagatagatgcaaataaacgaggaagagagctacaggttggagggagctgagaggtggagaggaaaacagaagaatctctgaaagtttcagcgaaaaagcctccttcttggtgtgccctgagattaagttttccgacgatttctgaagacttcaccatctttgacgacatcgatctctctcaagctttgtcgaaactccaaatctcaattctaacttggcatgagttcaggtttgttgttactagtctttactctttagtagtctgctgtccaaaattgacttctccaaatctttttggggtcaaagtaaaagattaaaaaagctgtctctacaataagtgcccatatgtttgttttcgaacaataaacaccctaccaaattgaagtagaccaaaattacaagtttccaactctgtttacgcacagaacaaccaaacacagaacaggtttcatccttatttacaaattaaagatttcaaactcaatggtttattcaaacgtagaagataatatattagttcatatgccttcacttcaactcatataagtctaatctcattattatagtaaatcccaactcaaaatattggagaatccgtaaggagtgtgaagcagaatcatgtgtaaaggtgtgatcttttcaaaacgcagagccaccacttcttctggacattgtctgcataactccattcatcagtccttgaaccgacttcccaactccagctcctatgtcttctgcaaaatacttggcctgccaaaacatttgtggatttgtgcatgagaagatttcattccaatgttgtagatttgtatcaacaagaatgaagcatagcgagaaaggttttactttacctcttgtatgctcttcttaagatcaaaagcatctttgactctgtcatccaagaatgcccatgtatcgcgatgttctgctcaaaacgaaacgatatcaaactttgaacattttctttgacggcatagcaatgcatccaagagaggaagactaaaaaccaacctaaggagtcatcggtgagcatgtaaatctcggtagttgagtaaacgcctccaagaatagtacgcttgacataccaatctaaatccgaggctccatctccaacagcatgccatatctcatcaactaacattgcccgttgcttaaaactcgttgggacattcagaggatgcgcctgtttcaccaatgagataatacattaaacatcagaattggcttgagcttaacatgaaacagggaaagtcaaatacttacctgaatgctaagagcttggggccattttgacatgtaagggacttgcatttctagacgaattctaatgagcttggagatacgttcacttggaatcagattttgcaaatccaatccagagtctattctatccataagcaattgaaggcattcatccatgaagaactgaacaagagtaaacacaaataacgaaacttaagaatagaaccaccaaaatccaagctttcaaagctcaaaatctacagaatttactgattcccgagacgccattacctcaacaagagcagcttctttcctggagaaagacccaacaatcgaaggagacacaccaacatcccttgaaccagccatcatcgcttcttccgtccaacctaacctcggctacacaaaactccaaatacagaaatgaatcactaaaaggacgaaactttgaggtgaatctatgaaatttatacacaccacgtgacggagagacgcagagagaacacgagcctgctcttcttggaactcagctctcggctttctgctctcatgtcggcgttgtccttcccctgtacccgtagaagacgacgccgttggacccgattgattagggttcacagactgcttacccattggtgattcagtattaccaccaatcgacgaagtgcagagaccggaagtgtaagaggaagggatgattgtagacctgagcttcggtaatcggaggagacgggtggtagtgattccaccaccggcgagaagacgcttcgccgccgttcggtacatcgttcgccggagtaagagatttgagttttcgtgacacgtagatgagatcgttgccacgagaatgtaaaagagcttcctttcttcgtaaccgaccccgctaacgaagtgaattgggcgttttcttaatttattaattattttattggcccactatttctcatattttcttaaatgaccaaaacaaatttaaattttataaagaaccccattaccattggagaattc

SEQ ID NO: 1134 - DNA, 56438 bp, Arabidopsis thaliana
aagctttgtcgaaactccaaatctcaattctaacttggcatgagttcaggtttgttgttactagtctttactctttagtagtctgctgtccaaaattgacttctccaaatctttttggggtcaaagtaaaagattaaaaaagctgtctctacaataagtgcccatatgtttgttttcgaacaataaacaccctaccaaattgaagtagaccaaaattacaagtttccaactctgtttacgcacagaacaaccaaacacagaacaggtttcatccttatttacaaattaaagatttcaaactcaatggtttattcaaacgtagaagataatatattagttcatatgccttcacttcaactcatataagtctaatctcattattatagtaaatcccaactcaaaatattggagaatccgtaaggagtgtgaagcagaatcatgtgtaaaggtgtgatcttttcaaaacgcagagccaccacttcttctggacattgtctgcataactccattcatcagtccttgaaccgacttcccaactccagctcctatgtcttctgcaaaatacttggcctgccaaaacatttgtggatttgtgcatgagaagatttcattccaatgttgtagatttgtatcaacaagaatgaagcatagcgagaaaggttttactttacctcttgtatgctcttcttaagatcaaaagcatctttgactctgtcatccaagaatgcccatgtatcgcgatgttctgctcaaaacgaaacgatatcaaactttgaacattttctttgacggcatagcaatgcatccaagagaggaagactaaaaaccaacctaaggagtcatcggtgagcatgtaaatctcggtagttgagtaaacgcctccaagaatagtacgcttgacataccaatctaaatccgaggctccatctccaacagcatgccatatctcatcaactaacattgcccgttgcttaaaactcgttgggacattcagaggatgcgcctgtttcaccaatgagataatacattaaacatcagaattggcttgagcttaacatgaaacagggaaagtcaaatacttacctgaatgctaagagcttggggccattttgacatgtaagggacttgcatttctagacgaattctaatgagcttggagatacgttcacttggaatcagattttgcaaatccaatccagagtctattctatccataagcaattgaaggcattcatccatgaagaactgaacaagagtaaacacaaataacgaaacttaagaatagaaccaccaaaatccaagctttcaaagctcaaaatctacagaatttactgattcccgagacgccattacctcaacaagagcagcttctttcctggagaaagacccaacaatcgaaggagacacaccaacatcccttgaaccagccatcatcgcttcttccgtccaacctaacctcggctacacaaaactccaaatacagaaatgaatcactaaaaggacgaaactttgaggtgaatctatgaaatttatacacaccacgtgacggagagacgcagagagaacacgagcctgctcttcttggaactcagctctcggctttctgctctcatgtcggcgttgtccttcccctgtacccgtagaagacgacgccgttggacccgattgattagggttcacagactgcttacccattggtgattcagtattaccaccaatcgacgaagtgcagagaccggaagtgtaagaggaagggatgattgtagacctgagcttcggtaatcggaggagacgggtggtagtgattccaccaccggcgagaagacgcttcgccgccgttcggtacatcgttcgccggagtaagagatttgagttttcgtgacacgtagatgagatcgttgccacgagaatgtaaaagagcttcctttcttcgtaaccgaccccgctaacgaagtgaattgggcgttttcttaatttattaattattttattggcccactatttctcatattttcttaaatgaccaaaacaaatttaaattttataaagaaccccattaccattggagaattcagaatcagcatgttaatattatccttcacatcgaaccgtacacgtgtcacgtaacactggcttcacaaaattcttctggataacaaagcccataacatacgagttccatacaatcaaagatgacactagctagacattttcgttttcatctccccacgaatcaaagatggcttttgccattgcttctgctctcacttccacactcacattatccacgagcagagtccaaaatcctacccagagaagaccacatgtagcgtccacatcatccaccggtggaagattaatgagagagcgcttggtggtggttcgtgccggcaaagaagtttctagcgtctgtgaaccacttcctccggaccgtcctttatggttccctggtagctctccacctgaatggctcgatggcagcttacctggtgatttcggtttcgatcctctcggtttaggtacatatacacggaatctgtcgcattcgactcataaaactctgaccaagtgttttatagactaaccagtttttatttcatagggtctgatccggacaccctcaaatggtttgcacaagctgagcttatacatagccggtgggcaatgctggccgtgaccggtatcataataccagaatgtctcgagcggttaggtttcattgaaaatttctcatggtatgacgcagggtctcgtgagtacttcgcggattccactacgctgtttgtggctcaaatggttttaatgggctgggcagaaggtagaagatgggctgatttgattaaaccggggtctgttgacatagaaccaaagtacccgcataaagtaaatcctaaaccggatgttggttaccctggaggtttgtggttcgattttatgatgtgggggagaggttctcctgaaccggtaatggttttgaggactaaagagattaagaacggacggctcgcgatgcttgctttccttgggttctgtttccaagctacctacactagccaagatccaattgagaatctcatggctcatctggctgatcctggtcattgcaacgtcttttcggtgagttaaaattgttatgatcatttatcatagattcatggtgatgatatgtgttatgtgtattgataagacttcattggtacgtacttcttttgcaggcatttacatcacattaatgaggattagcttggggcgaatataatattttttatatatttatggatgttgaacttttgtatagtgtcactcgccgttgttacaacttctgcttacttaattaacatgtaaaatatattttatatatatgtagaagaaagaaacaagaagagaaaatgagcattattatattaaaagtcctacaaacgactcacttggacgcgacttgctacataaacttaaaaacatgaactccaaaaagaaaaaacgacaaaactgaccaacatgaaacgaaagaaaaaaaaaaaaaaagaagaatccatacactcatgtgatgcatgtgatgtaaggacaagatcactcttcactcttcttgttcttatcacattaagacaatactttcaacgtaatccgtgaaagcaagcaccagagctgatccaaacgagggtgtgatttcttcgaaccaaacttccctcgaacgattcttcttgagatcaacatagagaatatgaaactgaccaagctcatcacgagcagtaactataagctcaccactaccagcaacaaaacccaccacacctggccaaataagatcatacggacacatctctcgagttatgaagatagaaaccttagaccactcatgtttctccgcatcttccaaaacccataaatcatatgtgcttgtagcttgtgtagcaagtaaacctaacttcccttggtagtccaaaagggtatagagacccaaatagacaccatgaatactacaagcctcggccggcatttcaatgaacttaccaaacttttccgtcctcacatcgaacctcacaattttcgctccatcccccgtataagcaccataatacagaaccccgtgggtgcatactcctctggtttctggagagtggaaattctcatcggcctcgatcattctccacgaaccttcatctccaaatgtgaacacttccactatataaggagctattaaatgttctcttgacaaatacaagaccttgtattgataattgattggatcatatcccatataccatgtcgtgaattgtttacggggaccgcaatcgggaaaaagtgtgatctttttcgtgacaggattgcatatccacagtcgaaacatgtgttcgacacatatcaagccattgacgcaaacaggcatacaataagaagtactatcgatattggtaactgaagaaggtggttgagataacgagaagaaattccagcgaaaaaatgtgtttgtatcacggaaagcaaacatgacacgtgactcacgagtagaggctcgagattggtataagttgatgaaatgtcgactgcggatgattgagtagcaacgcttggatacgcatagaaatctcgctagtgatttcacaggcaatcttaggagaatttcgaccaaagggtcttcaggaatcataattaacttaagaaaaagctatagtactttttttttggtttttgataaaagtgttatacatctttctcatctatatagattgttgtaggattttatctaaatatatagatgtatacaatgggaagaaatttgtttagtcattaatgtaagattgactagactattttataaaatgaaaaaatgtattattaattaatatcgtatccaaataattaaggcaattcatacaagaactacgactaaatatattctgtatacagtaatttaatttttaatccagcatgttcagtcaacttttttaaagcatataatcaatgttaccaaaaatcgctaggcgctatctggacggtggactgatgcctagcgcttagacgattgaggcagaatgactcaaatactatgcgttggaaaaaaaataagaaaagaaatataactttatatccataaataggatatataaagacataggcaaacatgatagtcaaaagttctagtagcacattatctttatttgcttttgagtcttttaaagctacatttttaaggtgaacaaaaccttaatagttgaacctttttttctcactatttttctatgtaaaaacagttcaaaattatcacatatatcattaatctatagacttttaatcaaaaatagttttaaatagttttttttccggtagatttatttattgcgtatagtaaaatcgcagtggctcctctaactgaccattttgtactatttttagaaccttacctataactatttttgtatattaattgatttcaaatatagatgtggctaattgagtcaattcttaatgtaatacatctagattcaatataaatgaatatacaaaaaatagatatagttcttagttgatacgactatattgtgtacattaattaatttggaatctagatggttaagtcaatttatctaaatcctataactattattgatagattaattgatttcgaatctagatatttacgttactgtttactgtaatgcatttggattcgaaataaattaatatagacaaatagctgtttttagtagaattgaaaaactatttaacgaataccattatggatttatggtggatattttacgtgaactctttattttatttttttacgtgaactctttattttattgttttacgtgaactctttagtttagttacataaaaaaaagattgcgaatgtaacgtaaacatttgacgtgaacgttggacaacagaagaaactatataatgtaaaaacctaataacgacttttaatgtattatacttatcggtttatcatatcactaaagacgaaaacgtcgaaaaagatgattggctaaatggttgaaccaaactaaaccggttgtttaacttaccggtttggttcgattactcaatcgaatcggatcgtgcacacaccaaactctcttcaccagcttctgacacagactttgcaactctcatgacggatctttgcttctaattcactatttctcggctagatctgtggcaaaaccagaacctcaatgtttctagttcctcgttaatcgaatcatggtggagaatttgtttccttctcgatttcaatttcatcttcagagacttgacccgaagcgtcgtcttacttctctccttgcttctcacaaaacactcttcacatttctctggatcactgcctttggttccgtctttctatggcagcgaacggcttacatcgaaggcggctctggaactggtcctgtcggaggaaagttcacaattttcggtaagatcaaaccgattcagccaattccccgattgagacctgtggtgtttgatttgaaggattttggaggtgttggagatgggtttacgcttaacactgaagcattcgagagagctgtgatttcaatctctaagcttgggggaagtagcggcggaggtcagctgaatgtgccgcctggacggtggcttacggcgccgtttaatctcactagccatatgactctgtttctcgcagaggattccgagattcttggtgttgaggtttgtaaaatgttttgatttcctcttgttttgctttcatttcgaaacaatgaaacgaatgcaaaagattgattggtaattgtttactgaaagtcagactctttagctctgtttaggtcagaattgcagaaatttaagcaccactaagcttggaacattagatttgtaggttacaggtcactcactctagccaagttagagtacaaatgactgtgtttgcttgttgtgtgaaggaacataatttaggagattttgagactttgcgtgatggatgtgtgcgtcttgtttacttaacgtgtcactttaattgtcaggatgagaagtattggcctttaatgccaccattgccttcatatggttacggtagagagcgtccgggacctcgttatgggagcttaatccatggtcaaaacctcaaagatattgtgataactggttagtggttttcctctttcgagttcatgtttgtgaaattgtggtaaccgtgttagtaactaaggggtataaggaacaggtcataatggaacaataaacgggcaaggacaatcgtggtggaagaagcatcaaagaagacttctcaactatacgagagggcctttagttcaaattatgtggtctagtgacatagttatcgctaacattacaatgcgtgactcaccgttctggactctgcatccatatgactgcaaaaatgtaacaataaggaatgtcaccatcttggctcctgtaaccggagcaccaaacactgatggaattgatccaggtatgttcatttaccgcttatatctgttttccggttattctgtactcatttaaaacgttttgaaccatcttgtttatttccgtaaacagattcgtgcgaggatatggtaattgaggactgttacattagcaccggggatgatgcgatcgcgataaagagtggatgggatcagtttgggattgcatatggacgaccttcaacaaacattcttattcgtaatctcgttgttcgctctgttatcaggtaaagtattttctcatttctcatcttacaccgcaaaactttgaaaacgttttcttttaaagcaaaagaatgaaagtgttctatatgttttgacagtgctggtgtatcaatcggaagcgaaatgtctggtggaatatctaatgtgacgatcgagaaccttctgatctggaactcacgccgtggaatcagaattaaaacggctccaggacgaggcggttacatcagaaacataacctacaaaaacctaacactagacaatgttcgggttgggatagtgatcaaaacggattacaacgagcatgcagacgataattatgatcggaaagcatacccgatactttcgggattcagtttcgcgggaatccacggacaaggagtgcgagtgccggtccggatccatggaagcgaacagattccggtaaggaatgtgacgtttcgggacatgtccgttgggttaacgtacaagaagaaacatatattccaatgttcgttcgtgaaaggacgagtgttcggttcgatatttcctcgaccttgcgagaattttgatgtttacgacgaggaaggtcgtctggttaagcctgcagctgagtccaatgtggcggacattgactacgacatttgaatgttttttcagttcattgtcatttgtgtacataaaagtaaattttgggacacaaaaatgaaaattatttttctttggaccatttctcttcgtcgttggggttttctcattctgataaatagttgtaattttaattaaagtaataaatataaatatttatcacaaataggtcaactaaagataattcgttgatgaacaagcaatatattagaacaaaggagttaagttgctttattgatcgaattaaagaataaaatttggatgaatacagaactcaaactcataaatgttgttgaggttcatagttttgcagtagaatgcttagaaaaatcaaaatctccatgttgaggttattaatattgaaagcacgtgttgttgtattcgactcaattactaaactcgcatgttaacgcatgacacatgataatatcggcatattcagtgaaccaggttggttcatgatcccttccaaagcggactcacaccttagactcggagctcacacgccaaatcgctcggctaggttttgatagccaactccggccaaaaaaccaatcgcgagaatgtggtttttgattgacccaactcacattttgacctagcacgaaaaccaaacaccaacatgaaataagataaactattcaaaatatctagttttatataaaaatcttaatttaatgtcacgagaagcatgttcgcactactaaagttaattagcacagtttcgaacatttatatatgtatattctgcagaacaccgacgactccaataatggtcacgactcacgacccatgtggagtaatagttttccttcttttttaacatttataaattttaatatttattttcgaaaggctaacaaacgcatgcgtacctttacatgaaacaaaaagaaattgtagaataatattgtttgaacatttctagatattcatgtgcatattgttcaaaacttgtgtatgattgtatcattgattgttacataagtatttgttaaacaaataaaaactatacaacgtggctacgtatcaatctatgcttagcaaagtcaaccatgtaaattttgtaagtattaccttactctaagaaaataaaaccctaaacgaacagataggcttgcacctgtataatatattagacattacaagtctctacaatgttggtttatcattaacaaggactaaacaatatactataatcatacaataaattaagagtcgtaaattaatggtaaactcaactaatgcatgaatagttgtaaaagtatatatatttggacacgttactcaacttgcatcgcggatctgtattccttcccaaccactacgtacacgcatttcccacgagtttgacgatctttctcgtttaatctaatcatatctacttttataggctccatagcccacatttcatatcttatagtacgttccaacttctaaccaataaactcaaaactagttgagttttttaattagtgaaatatatcttgaattttatatatctaatcttgcaccaataaagtttctgtcaattatgtaaaagaaagactcgttgtatcagtatgggacgactttttcttctgaattgtgtcgatcgagtccatattataatactttgtcacgtactttgtttactgattaatttaatataattgtgtcgcattatccaagtctaattaaacattaatgtgtatattatacaccaagttacaattacagatctatctcttagtcgttttattatgtatagcctacaatgaaacatgacatcaacgtataggtgaagctgaagcctatacataaaagtaaggttttggagtttgtttcatgttttaaggttttagatattttgtgatcgatttgcatgtatagggttccaaatatctgagctttggcttggtctactttgagaaagcagctgtagagatcaactttagccgtttaggtgataaaatcacattagaactctataggtcgcgtagcagcgtataagagccctggatactgaaatacaagaatctctccacgcgtagaaaaacgaaccaaccatgataaaacacgtgtcatatcgaataggtacagacaacgtgcacttgccaaccttctttccttgtagtttccttcttctttgcttctttttttcgttaaatattgatattgttcaaaaaacgcataacaacaaaaacgtggtcgacggaacatgtgggtggtggagttgtcttctttaggggaccactcactaacgccgtttactttcccgcttggacgataacacccttgatatatggattagtctctcttttgcttttggatatcttaatatattttaatatgtccatttttatattgacgaccatttaattaggtctcagtttgtattattgatttttaggtgccaagcattactttcgttacgtgtaatcttttgattattcaatcaaattatcatatggttcatggcattttatcaattgtgacggtcgacatgtgggttgactttgatgtatgacttttagcttgtgcctcatttttattccaactcgacaactagcagactttatattttaatttatttctttctagatattagacaattcttagcttgtctctctgcatgaatcacgcgttaatatacttataatagtaagttttaaaatgtttcgagtataatatcatattagatttcaattataattgtaagattatttagtctcaatgaagagcatttaaaaatgtgaaagagtttaggctttgactgttgactggttctaacgcgttttgcttcttatttatacaaaaagattttattttattttaattagaaatattaagtactttttagacgtgtttaggttgattaatttcttgttaacatatccgataaaaaaaaacagcaccaaaatcacgacgagaattatgcctacgttacgttgataataaagattagagataaaatgtaacctctcttctctttacatcattacatgcatcttgtgttttatttgactttattcttaccaacaaacaaccaatggataaattaggctcgtgaaggagggcaaactcgtaatttcaaagaaacggaaagcgtcagaacgtggagaacagtgaaccgagacacattcccgatttttctaaagaaacaaaataaaacacgtgttttttataccataagtaaagtagtagtatttattaaactattaatatatagctttgttatattggaggtaggaagaagaactctgcaaccaaaccaaccaaccccaaagccaaacaaagttttatagagaccttccatttctccctctcgtgacaaacgcaatttgcagagaagcaacagcaacaacaagaagaagaagaaaaagatttgagattactttgtatcgatttagctattcgagaaactcttgccgtttgaaagttttaattgttaaagatgtcgagttctatggaatgttctgagttcgtcggtagccggagatttactgggaagaagcctagcttctcacagacgtgtagtcgattgagtcagtatctaaaagagaacggtagctttggagatctgagcttaggaatggcatgcaagcctgatgtcaatggtaagaaaccttctctttctcctagatccacttcttttttcgttttctctgttttttatttcttgaatcttgatcttgaaaacttttcaagaaaattttgaatcgatttcaaagaaattagggagagttagtttgctaaattttgacatagaaaatgattggagagagttctaacttttggatcatatatatttgcaggaactttaggcaactcacgtcagccgacaacaaccatgagtttattcccttgtgaagcttctaacatggattccatggttcaagatgttaaaccgacgaatctgtttcctaggcaaccaagcttttcttcctcatcttcctctcttccaaaggaagatgttttgaaaatgacacagactaccagatctgtgaaaccagagtctcaaactgcaccattgactatattctacgccgggcaagtgattgtattcaatgacttttctgctgagaaagccaaagaagtgatcaacttggcgagcaaaggcaccgctaatagcttagccaagaatcaaaccgatatcagaagcaacatcgctactatcgcaaaccaagttcctcatccaagaaaaaccacaacacaagagccaatccaatcctccccaacaccattgacagaacttcctattgctagaagagcttcacttcaccggttcttggagaagagaaaggacagagttacgtcaaaggcaccataccaattatgcgatccagccaaagcgtcttcaaaccctcaaaccacaggcaacatgtcgtggctcggtttagcagctgaaatatgaatgctaaccaccctcaagccgtaccaagaaattcttttgacgacgttgcttcaagacaagatataaaagctcctatcttcatgctttttgatttaagatacaaactactcaatgattaggaaacttcatatatttgtatgtattgattagtgatcaattattgttagtattcgttatagtctgtttttctactagttattgtcgcctgtctaaatccccttgctatgggttatctcaaaattagtttcgtatgtaactaattttgtaagaacaataatttttgttgacgaaccatactatcaaatactctaaattatatcttgataaatctacctatcaggtaagtaggtgtgttttgttttcatttgtttacttgttacctactaatctcatattttatgattcaaattcaaacccgtgaattatgagttagtaggtaggtttaacaacatgtcaacaactaaagaacaacgtgacatctaaaccaaaccaaaactatagagagttcagagtagtcgtagtctcgtagagatcattcatataaataaatcgcataaacaccaaaatcaactcttaattctttcctaatcatcattaatctctaatggattccgaaatcgcattcgactattctccgaggtttcgtatattcaagaacggtggcatcgaacgcctcgtacccgaaacattcgtcccaccgtcactaaatcccgaaaacggcgtcgtatctaaagatgccgtctattcaccggagaaaaacctctctctccgcatttacctccctcaaaattccgtctatgaaaccggcgagaagaaaatcccactactcgtctactttcatggcggaggattcatcatggaaacagctttctctccaatttaccacacttttctcacatcggcagtttcagccaccgattgcatcgctgtctcagtagaataccgtcgtgcacctgagcatccgattccaaccttgtacgaagattcatgggacgcgattcaatggatcttcactcatatcacaagatctggtcctgaagattggctaaacaaacacgccgatttcagtaaagtctttctcgccggagatagcgccggagctaacatcgcgcatcacatggcgattagagtagacaaagagaaactccccccggaaaatttcaaaatatcggggatgattctgtttcatccgtatttcttgtcaaaagctttgattgaggagatggaagtggaagcgatgagatattacgaaaggctttggagaatcgcgagtcctgatagtggaaacggtgtggaggatccgtggattaatgtggtcgggtcggatctaaccggattgggttgtaggcgggttttggtgatggtggcgggaaatgatgtgttggctaggggaggttggagttacgtggcggagctggagaagagtggatggatagggaaagtgaaagtgatggagactaaggaagaaggtcacgtttttcatttgagggatcctgattctgagaatgctcgtcgagttttgcgcaattttgcagagtttcttaaagaagaaacattttaagtgacgtcgttcaaatgaaaaatgcataaaatatcggttaccatgtcaatatatactaattaaggtttgtatgtttcatcaaacactaaatcttttattttgtagtagtacttataattgttagttattctgttttatccacactatatttttttttctcgtcatagaaaactcaaaacgaagccttaacaaataatggctatgtgccaagatatacaacactagaaaaattctgtggtttttgatagaatcaaccagaccactcacaaattcatataaggaatattccgggggaggcaatctcttctccggttagaacctcaacacttgtcaatttatgttgctcttttaaactatcctccattatcttcaacgatctacactctttactacaaaatccttcatctcctctgcacacatatagaaactctaatcaaattcactttctttggagttgttgtaatccaaatatttgtcatatgaattataaaaaagggtacattggaggagcttacttgtacatgtaaatgtctttgccttgaagtttcttcttacacaagcaacaagaagttagaaaatctggacaatctctcaatacccgcctctccttcgccggtgactcctcggcgatttctatcggttttctccatctctgatcaccgttcaatagattatgaccaaattcaaactcttcttccttgtaatagactttggtcaggccatcacgagtcgtgacgcaagtgtattcctcagagtcagatagatcaatccccgccgcgaattggaatctcttggaatatcgagccaggtcaaatcctttggaaccggcaccggtatggcaaaccggattgatcccgatgctggatttctcaagcgcagcgacgatacctaaaccaattccaccgccattatcgtacctcttcgaacttccaggcgacgggaatttcatcatatctaaaggacttgtttgactagccgtgaaataatccggcgaaatagtggagtttttacctggaaccaccatgtgggagagtttccaggtcattggattgcttgataacatattaatcgagaactgaaaaaaagaaacagaaagatatatgacgatgagaagagcaatggaagaagcaaatcttataggaaaatctgattgtggagaagagaaagaagatgaaatggagaagctacagacttagccccaccggatatccgcatttctttacgggtcggatattcgcattttgttaataaagctctttacgttatctattaaactctttttcctttcaatatatccagattctatttttaaaaaattactgcatattatattaacatttttgccacttgtaaacatataatgcaatatgtaatttgaatttgagacaattacgtaactagattcttaattcttcttcttctttttttttttttgaatataactaactgtaggatttgtcaagttaatagttagtggctaagaatattcgttttggtttagataaattatagtagcataatttcataacaattttaaactatttgtttcaatttttttaattccaattaatccttgaatttcactggcttaattgattactgaattgtatatttttttttcttaaaagatattcattgaaatgattatattgaaaacccttaaaacattaataaggtcgttgtcaaatatatcagaaaataaatatataaaaattaataagacaaatacccttattgcctttgtttgaatgggcctgaaatattattattaggcttaatcgtacaacttaaagtaaaaattgtaattgaaatttaataagacaatacccttattgattttaatgggcctgaagtattattgttgggcttaatcgtacagttaaaataagatttgtaattgggcctagtgaaagcgattggagtggatgatatcatgataatatgatcaaatgacgtcagaagatccaaatataattgttttattaagtttggccttttcccatctgaaaaatctaacacgtgggaaaaaaatagtgaatgaataactctttatcccaatgatcaaaaaaaaattgggtaaagaactacaaaaaaaaataaaaaacccaagtcaaaattttcagattgtgaataatggaattcaaaaattccaaagaaacatggaaccatcggcgtaagtctcttctccaagctgataataatcttgtgtaggcgaaagctgctctctgaaacgatcaccggagtattcatcggagaaatcatcaaacccagggaataacccaaactccgaagcgaagttacccgaaccaaccgtcggaagcatactcaaaaactccgaatcaacgtccatcgatgttgaagcagattcttgccgtatctcgtatcctgctccgccacttgaatcatcctccgccgaattagcgaacctcgcagcagcttctcttatctcagatcgcgacaagttacgtccgccggagatcaccggaggattatcagggaaattgaactttgcgttgttgccacggagacaataaagagccgcgtcgaaagcacgcgccgccttctcaggagtatcgtaagagcccaaccaaatacgttctctgctgttgggaagtctgatctctgaaacccattttccccatttcctcttcctcactcctttgtactttgactgcatcgaagaagacgacccttccatcacgattaaaccaaacaaagacgcgattgaaccaacccggtatgatttctctgttttccggtttaattttgttctgttaagttttttcagtgagctctgttcttcagtgttagtgttgatttgaattgagataattgtatttggcgcttcagaaatttatttatacgagtgaaataaaagagtgaagagtgagtttttgactttttatggcgcgtgaagaagaaagaaggtcagcttcaaaggtcaaagggagcgcgtttgtacttaaaacgccgcaaagtgtcaggggaatggacacgtggcggatgttactagaagcttgagtcttaatgtgtgtgggtcacaactcacacgggaaatctcagagactgtttggttttcttgtccttgtccttgtttttcacgtgattctttctttaactcctctcttttcgttttcaaacgttgaaatgttgaatatttcgctgcgtctagaggatactggtataaaagaatctgaaatgatccctgattcttaggaggcactgaagagaagaagaagaaacgaccaaagattcatgattaatgaaggtaattgtttagttacattaacattacatcttagtatctctgtataagatatgctcctcatagacttgtcaagcattatacttgttatacaaatatggaaacaagaaagtacaacaacatcaagttagaatgaaaaatcaaatcactgtcctataaaaatgtttatataccgtgcagtatcttcttcttctcagtttgttgtttgcagtacatacacacaaaaaaaaacatgtactttgcgatggcctcgaatgataatgtaagttgacttggtatatttgcatctttttatttctatctgttgaaagaagctgcagcagaagtgtcttcatagtgtactttccaagcatttccgctgtctgtttcgctgcaggcttggtttgtggttgggatagctgcaagatctccgtctaagctcatttgctgaacttctactgatgatagtatctttatgttctgcacgcagttcacaaactctctgtggaaaaaacaaacagacaagaattatcagaattgttcaatcttgactgttacagatagatttttcaggtctggaacgtactcccaaggatcatcaccaactagtaaaatatcgttttcgtgatcggtgtagacgagtttccaatcagaggttagcggatcttcgagctgtccttcgatgccaaacattctcgctaagtcatgcctaagttcatcatagccgctataacgggtaacatctattgatctacctactgaccctcgtttttgaaccttcaatgatttaacaactttcggcatttagcattcgaaaattaagaagcaaaagattagagctatggaaagggagagaaagatctctaacctttgtatatgttcgcattcgttgagtctgattgggccacagtcctccaccattcatgattcctgaatcattgatgccgccaacctcatttgaacatccgggcttaaagggaatgctgggaataccaaatgactgagaactgattgcagcactggacagctccgtctcaatgtctcttggtgtgttgccatagttgggaaccaagttttgaaagtccttttgagaatagagtggatcagaagttacggcttcgagattaccagggaaagctaagttgtttcttggatgatgagattggcagtctccatcaaaaccaaatgatggtagtgggaaagtttgttgctgctgtacagggccaacaacatcaggacagtacgtcgttcccgctgtggatacatcgatttgatctgttaccgcgcttttaaatctgaaatgttcaccagcactcttcatattcatcatgccttgactgatccggctctcagtttttgtataaagctcttggaccggattgcttgcgcgctcaaagactgaatcagatgcagatacagatgcagcttgtccttgctgttgatttctgctcaggaaatttgtcggtgaaacattatcatgtcccgtgttattggcggaaggtgaggttgaacaagaaggagcttctccatctgtgtggccagaatgtgatcttccagcggctacaagatttttgttactcatctgtccttgctgctgaggactcacctgaatctgtggaggctgcatgaaagttgaagctgggaagctgttattaccatgtgccaagggctgttgattttgagacgacagaagttgttgcaattgatggctttgtgtctgctgcaacgctgataattgtggctgtaaggatgagcttactggaggaatcgactgctgctgttgctgctgctgtagcttctgcagtagctgcaactgaagctgttgtgaaggacttggttttgatgattgttgttgcatttggagttgctgaggattttgggacagattttgttgtaatgaatggagagaggactgttcttgctggtttcttaataactggctactgttatgcatttccagttgctgctgaaactgcatttcttgcgcaaacgatgtcatttgagacaagcctttattccccatagaatttatgttctggtgtgtcattttagcaccagtagggagcattgactgctgctgaagctgagactgagagaatccagtaggttggtttggactttgacaagagacttggttagcaacagcaatcgtaccattgttataaatcccttgttgctgcacctgttgctgtgacatctgtagttgttgttgttgttgcagttgttgttgttggtgttggtgttgttgttgttgttgttgttgttgttgttgagatttcaccatggctggttgtgcttgcatctgttggctgatatggttaaccgtgttcggtttgttgaattgggaatttgcggaagagaggtttggggattggaagttcaacagcttggaagggtcgttggaagcaaaattgtttggtaggttaaaagatgagagcgcggacgggagctgaggagtagcagaacctgacaatggattgttttgctgcatactcatccattgaactagacttaaaccagggaacatcgaactctgtgcgtccttcatcccaaagtcttctcccatccaaggcattgctcttttgaaagcattttccatgtctaactcatcatctgcaacaaaccaccaaggttagtatccggaaactcagtcaaagatctatgggaaaaaaatgaacgaaagcagtaaactcacctggcatcccgggttgcctcgggtacttaggtctgaaaaatggaggaggacatatgtaaaaaggagttatgacgggttcgatttcccatatggatactcggcttggcctatctccagctgttgattcatcccatcctacctgtttaaaccatgaacaaaagattcagaagaaatgaccatcataaacagtttagcataactcggatatgtcattacctgaagattacgccattgtgagcctttccatcttacagggtcaagatcactaatacctgtgactgtacccatatatctacgaaccccacaatcctcagtctcaaacatcatccggaatctcattcctagagatacttgagcgtataaggctttgttgtatttggctaaaggaactacaaactctgaaggacttgcccttggattgaagaagatggtaaaagggctactattggcattagcatgagctgcagctgcaagtatcccaatgtgcatactgtcgctggatatgaccgatgaggaaagagtcggagtttgtctatttgcacgtcttatacccaacatcagctgtgatttctcatctctgcaaacccaagtacccttatgagaagatgaaagtccaattctgcttaatgttttgatcaaagtatgactcataccttacaaacaaaactgaatcacccgcaaatagtctctttgtgctaacaaaaacgctccaacctgtggtaagcaagtgtctttttggttggcctgagatcagattacatcaaagaaaacaaatcaggttgaagttttcaatcttttagactaataaaacaaactttagatgattcaaacctcgatagatatgtctgaaagtccatgtagtatcatgtaaatctttagctacaatctcttgcgcaggcggttgcatcgagaaatcctattttaagcacccttagaacttttagcaaaacagattcaaaagtttgaagcaaaagaaactgagagtagctttgatcagagagacatacaagaggagggaatattttctcagctgcacgacgcggtacagagaatccaccatgagtgcttgtgtcacttgcagtaagagtcttgcaaaaaaactcagtaggttgtctgtttagcttcaagcccatatcagaagctagcaatgcttctctatcatactgtcacacattttgagcaaagatcagcattaaagtcctcaactttaaaccaagatagcacaagaagaatgatataattcagaccttattcacaggttgaagagtcatttgtgcatagacttcatctgtttcggtatcagcctgattcagaatttcacaaaagtcctgattagttcatcttcttgttgattcacaagttggagtcagaagagacttacatgtaatgtaacactgtgaagcaagcaaatcagcttagaaggaagatttgggtaatttggtataaaatctgtttgcttctgcatcgatgctgcaacctgaaaaaaggtttcattgaacatattacttagattgctaccaaaggtttcaaaatagtttgaaacgcaatgaacttacttgctcgctgtgtccttgagggaagtaaaccacaagacttcccacaggaggtaatgaaactaaaggccctgcacaagcgtgccatagttgagaattgattggcttcttctctcctgttcatcatcatcacacacatattcaaatctgttaaaagtgatagaatttttgcatagtttcatttaaagtctggaaattttatgagcggcatttatgtttcaaccactttattaaataaagtgatagaagaactcgatttgtgactttgtgctgactccaaagttgaaattgaataacaaaattcattttttcaatgagaaaatcacaaacatgaaatgcagaaactccttgatgaagaaattgaatagtataaaatctggaaaagaagaagataaatataaagcttgtgtaccttcgttggaacttggaagaaatccatttgatggagctttcatggtttatagaaagaacgaaaaaattggtttggtgcagggaagaaacagagttcttcttcttcagcaaaattaacgaatctgtatttgctcaagagaagagcacgagagaaactaaatagtaataattttggaaacaaaaatcattctgctgctaaggaaaaagaaacaaaagcttttttcttctttttagttcataagaatatttgaagcttcaaagcaaatttttaagctcttaaaaagctttgaaacttttcttttttttctcgtgtttctgcagattctcaagtgttttttcaaaaaaataaaaacaataatcgatattgagatttaagccgattgggatcggatacatgcggaaagatgaaatcttttcttatgccttctgacgtggcaccccacttgatgtcttcttcttgtcggtcccaccttttttatttctttttatttttatcttttccgattataatttactgttgttggaaaaacagtccatggttttaaaatctgttaactttccctcgtttttataaccatatttttaattttttactttagtaatacggattttcttatgaatgaggttataccataaacccggatatattgagaaaaacctaaggattaggttcggcggaccgaaaattgcaagccaaatggggacttaaatattttctaatccaaagttgtaaactcttggttaccagaaaagatgtcccactttttttcttttatatacatattttctgttataatatagtagtagctaataagtttattcatttatatggattggtccaaattgagacatgtccgtataatgcgagaaaaaaaaaaacactactagtaatttaatgacttaattatgattagaataatattccttttgatacgcaatggagcacccactagccgcaaaaggaggagaacttcacatgtttacagagctacggacatcattatactccaattaaagctaagccttcatgtgtaattattaatttttcaggcaattattttattcatcttcttctttttttaatcaatagtataaagtgttcgtttttgttttaattaatgtataaagttctttacaattaatctggaccggagtagagttgttccttactttcagctctctacgtatgcatataaaatgtagttgtagagcctttttcctttcaacgccgatctttcttatgaattttgctttcaattaacatatactataatagtattgtatttctgaatctcagtatacatgtatttagtgggggaggttttgacctaattattacctttttgttgatttatatgtaattagggattttctatgtttagacaaacggaaataatttggaacatttaaatatctttcgagaacaactctgactctttccaaagtaaatattcttcattgatatcatgtcaatacattcattgaaaacatgatgttatttaattaatatgaattatatataaaagattcaaatatatagtttatgttttgatcaaaacagaagagggttaataaattaaaacatttcacatgtaaaagaattcaagtggtaatcttttggtgagaacatatgagatgatcacacctccaaatggacattaaacaaaaaccataagagctcattaatatatgttcaacttatcgcggttaaacaagaaataccgaagattagccatgaacttagcagtttaatatacatctctttctagagtaatttataatttaccacatgtaaattgattaaccagacagctacatgtttataaatgttaaacaagagatgaggtgaagcgatctcaagagccttacctagtgagcaaaagaaaaaggaatgtaaagtttgataagttaggtttaaacatatattatagaggatcaaaatttgaaaagatatgggacgacaaagtaaatctcaacaagaataaaaagttggcatgctttagtgttttttatgcctttttgggtcaatatttgctgcgcgtggagagtatatgtacgtacaacaattgatgtgtttagaaatcactcctcatcaaaacgaattaaccattctagtagtagtaacactcaatcattgttgatatttttttcacctcccactattgacttttatatctatataaaattaaattataattggatttgatccacgcatcctgcaaaagtttcctcaaatacatacgcatgcaccatatataacaaaaacttgggacttttgtgaattcctcaatttctaccaccattacagaaagagtcaataaatatatcgtttttactaaaataactaaaacacaagaaaaatgtatgtgcacgtgagtgtgggtgcagcatgcacgtgaggtgtggcagaggatgtcgggagagacaggctctagactccgaccgagtctttcggtttagccaaaatggttttgcttttaagtgagtgtatgcctctatgtctcttctcctcatcgtaaccacacacactctctctctcgtttgttctactatttcccaaccaacaatattttttatttttctgttaactggaatttagactatcttaaaatcttgttttgcacactagtttaatgtttcagtagtacaaaagtacatatgttctaatgacgttatcaaacaaggtataaaaccatgaaattctgaaccaaaatcaatatgaaaaagctgtgtatttttgacatagaaaacgtttctagcggctaattatgattgacattatggtgaaaggaattgatctctcaaccaatgtggtaaatttttatactatgaatcttgactatcatctattggtttaacattgatggttctctcaacattcttctttcttaacttttaacaaaaaaaatcttttatacagtgttgtgtcagattaataaaccataaatttcatcaaaaattaattggttcaatgaaaaaaaagttcctaattaactttgacatttttcatgtggtaatttaatttttgactcgttaatcgatatagttgttgttacacaacttgtggggagaaatttcactttacccttgattattcacatttttcatttctattttgcatactacaaccgaattcatgatctagtcagcaaaaaaaaaaaaaaaaaaaaaaaaaaagaaaaaaaactggttaacgtttactgtgtttacaacttggttttacatttgtttatttgctcaatccaataattaacccagatacggatgaatctagcccaaacagactcatcagtacatttaattggcttcgcatattaatttttgctaagaccgagcaggcgagcacacatgtacatgaggattcataaagttgtaactcgtaatttaacgaaattcccaattagttagaatctttactacgatattatttatctatataacttatggctggtaactaaaaaatatttaaaacataatatgatcagattaagagaacaaccaaattcttaactttggcagctactgtagagactcaaaatgatcgtttgtattgtatgatcaaataacataagttaactaaccatgttggtcaaatactgtagattgaatcgaagttattatggtttaaattttttaatgcgatttaatcatggttgatcatattgtcaacgctttaaaaagaaaaaagaaaaactatcccataggttacaaatattacatttggtagaaaagtatatcaaattcgttattttcaggtggtttttttttttttttttgtgataaataacatgcataaatttacagttattttttttagtttgttatggtaaacctcattaatgaaattatatagtattagtgaatataattctttatttcatatacggatgcaattattaaacgcgagggacatatcatatcaaaaacactgtgtattacgtaggcaataaaatcaacatcaatacacatttcctattcaactgttgccaagtgaaattatttttctccacaaaagctatgcaataaacatatttaaatacttcaaataatttcatagtcattttccagatatgtatgcatgggtgttggctatcgctgttagaatatttgaacaattattttgtgtaaatatttacgaatattgtttgtaattattttaaaggaaaaacatgtggccgctggtaatgagtattacatgatgagggataaaaattatagaaagattggtcaaacctcgacagcttctacatatcctagagacagctgcacatgtatgtcactgattgatgcatataaatatacacacattcaatatgtattataaactactctcttattgtgaattccaaaaacactatattattagttattttcatttcttcgttaattctaaccccatggtccatgaaccattatcatgctgtaacttatcttttgtgtgtgtaaattttttagtgttttatggctactccaaattttatatgtcaccgtgatgtatcggtgtaagaaagagaactcgtgcgaatctttaaattacgtacgcttttgggttgaaattcttattcacttaccaccatgttaataatctcagaatcatatataaccgacatatcttttcatttgaaacactaatgtccaatatatagtgtgaaagactaatggcttgctttgatattttttccgcgacttcatgtaattatcatctagtattctagtgtatgtttattatgttatgtacgaaagtttagaataatatgagtatacacaccttagagatataaagaaatgatgtaaaacacgaaaaattacacggtatgatatattgaaaagtgttaagtttgacagtaaattcagatattctaacatttgattttctgtttcacttataattgatgacaactacaattaatacataaacgaagacttatactctaggctttgggatcattttagtaatgagtttcagcttaaaaaactgagaattcagttcttaacatttctttctctttcccttacatttgacaactataatatatatattatgaagccagatttggagattagcactattttcatctcaagaaatctttagaagaatgacacgtattcacaattatagcaaccaacactgaggacaatacaaccaatcaaaagttcgaatatgtggaaaccaacgttaacaaaagcatagattatgcgacaagacccaactacttctccctcgttcacagtcatcaatcaacagagaatcttactatcaacattacacgtttttcccttttctccaattctttttcttacttttcatttcccctcttgtcattgtacccatgtatatatataagggatataatggacacaacaatcaattcaaataaaacaatgacagaaatattcgagaagtttcatccctatgagtttttattgggggttaaaatttcatccctaatagttgaaaagatacattcaattttattttttctcacaatatagcaaaaaaatattatacatgcaattttttatggatgtactagcactgcatgcagaacccaacaatttatagaagaaaaacactctaatggttatagttgagtagaatcacaccctgtcgattgaaattacaaatttaatatatgtgtatttcttgatcactccatagttcacatggcatttgattcggtgcagtacacttcgatatataagacatgactacacaaactaaagaaatcaagctttctttatcatatttacttttgaatttatctttctaaaaataaaatgttgtgtataactgtttaataaaatgtggtcatctttcctgtgtgttcaaaatattgttttctgtgtacgagtagtatgacgacatatcatatgaatgtaaatgtaacacatacactaatttctcgttgtataagcgggaacagttttcttgcgatttgcgtttgcctatatatccatagacaaaatttaggcatcaaacttgagagaacaagcaaaaaaaaaaaaaaaaaaaaaaaaatttcgaaaaattccaattcaacataaatacaaagttttttttttaattaagaaaacgtttattgttacctagagaataaaaaataacataatattcatataggttagctcattcatccaaatggatgctatttcagtggtattatattcgaatttgtcatttgtgcctaactctagcatgcagaagataaacgtatgtcttatatatccgccaaatatatgttttataaaccatatgggccaaacctttccacttttggaaaaaatacatttgagaaagagaaaacatgggaattgttcgaccgaggaaatgataaacaatacaaaattaaccaaaaagaaaaactatatattgagacacaaatatatgtataaacatatatagatgtttgtatacatatataggtatatgttggatcatgtgtgtataatatatggtttttggtagaggacataagagcaaacagaatgattcggtgtaatgaaattccacagctggtggcgttggaaatgcaattggaatgatcccatgttaggtttttacatgccatcactcgacatgcctctctttccgcttccctccttttatttatttattgttttttccattattactctcctctaatctctcgctaaatcgtatcatatcattcattaatcaatctcctttaattattcttatcaactaatctttaatgtctcatcatttcataatttatatatctctcttacagacagtttacgtactaatatatcccataaatccaaattatcggtttattattataacttgtgtttgtgggattgatcttgtataatatggttacatgtattcaaatcctgaaatgaaaggaatcgaagataccagtttactataggatgcttccgatcaagtttaatttaatacattttataagtagtgtatggaatttaggggtgagacaaggatatgacagttcctcggtcttaaattttatgttgatagatagagagattcaccgaccaaagtgtcgtcgtttcgaaggtccccccacaacatttgcttagaacttcatctatcttcttgaacagaaattagatgctacatttattgttcttgtattcttgtctgtcttatgctctaatctcaaactttttaaatctatgtgcacgtataatcatgtgatcgacgaacataacttgaattaaactattaaaaaaaattatgggtgacaaataatctttaattttaactgaaattctatcaaaacctacacgttcgattttattattatccaaaatcaaatacagacaaaaagtaaaagtaaaagtaattatcagattattggaccggcctgctagcaaatgataactgaatttatccattcggttctacattataagcaaaataacaaatatttgaatattctttaatatttgataataacagccaaacaaaaactccaaacttgtattcgtgggatcgaaccatgccaaggagccagtgtttcatatgaactctcggtttatcttaagaatttccaaaattagtggtctctttttctaaagttgtattcggaatttcggataattcgatcaggttgatcacttgatttaaatggtcttgattagggctgggcaaaatatttgttcgatccgcttcgattcgttattcgatttgatttgattcgaaaaatccgaatatccgtaagattttggaccaaagcaaataggaaaatgtaatattcgtaaaaactgaatcaaatagcaaatattgttttaaaaaaaattgaatatccgattcgatccatatcttttgatatttattagaatatatagttatatttatatatagatatcataaatagtttgtgtattgttgctatcttacgtttttatgttaagatgtttgtttgatcattttttttatgttatgttttgattaatgacatcaaaaactatcgggttttagtttttggaattagtttgataacatttttgttgaccggtgataacaacaaagactatatttggtatttagaacttatttttaaagcatgttaaataaaaactttgaatatctaatatggttatatagtttatatattttttttaatatttatacgtatcaaagtggatatccgcaaatatcacaaaaaattccggataatcgaaatttcgtatatccgaaaagttttgaatcaaaacaaatcataaaatcaagtatttggttaaaacaaatcgaataataaatatcacaatttttccggatattcgcttcgtgcccaggcctagtcttgatatagctttcgcagacggcagagaactaaaaggattagatcataggtgttgaatgaatacggaccactaaggtctcaatcaccaggtatctagtctttcctattttgtgggattctcgtttctattttttttcttgtataacggataattcatataaacaatattcacgccaagtgttagacaattcaatgccgaaacatttaaaccatgatactgtacatatatatattccaatttagtgatgaaaatgatattgaatttatccacagtcgggtggagaggccaaggattaaaccacaaacgaaaatcaactttgttacttttatatgaagaaaatgatatcgagtaatttgttttatcaaagcaatagtaaaaaatttcacttcaagatactatgttcgattttttatttttctcaaaaaaatgaagatgccgtgaagaatatgatagattcatcggacggcaaaataagtaaagagataaacacgtgtcaacatccagtactgaatacgataatagggccccatctgttagcgtgcaggaagcacagattttagttaaaacctcttttttattattccctctcccacttatgttcaatcaaaaagtcactatttacctaattctgtctttttaattttaaaaatcctcattgtattaaaaaaaaaaaattcacttttacctaaattgttttccttatgttattacccaaaataaaattttcttaaaatacgccttatacttaaaaacgaaaaaaatatgaaaaacacacctagctgttttttagtttatattttataatgatcaaactagcccaataataatttaaagcccaatagcatcgtttgagtcttgagcgcatttaaattgcaggcctatgatggtaactgacgattatgaccaggcccgccttatgagttatgactactattttcgatatttttttctttctcagattcttctttctaaattgtatttattttcataagattcccatacaatcatacataaactattcagatacgatatagagtttgcaactaccagaaaagcacttgaaatatttttaaaaagttttataaatgaaacaagcacatctatcaatttcatttgtcatactaatatatattgtttttacaaattttgattttgtcagccaaacagattcataattaattattaatggaagaaattacatttcaaatcaaaagaagcgtgggctgctactctaaccatagatttcattttaatatgagtggaatgcacgttgctgctacgaattctataccgtattatattcattaatctcctccaatattaactgttgaatcaatttaatttcaatgcttcactgactccatgcatgtgtatttccctatcagggcatgacctacttttaccctattcgataaacccaactttttatttttatgactatgctttgggatattttacatactcaaactactaagtagacgacttatacccgttattattcaatcttaaacccggactgcacacatataatataactacgttttgtcaaaaaaaaaaaaaaatcacacaaatacgttttgtaattatgtgtagttattgaatattttgtttttaaaaattttatgagttcaaaatatgttgacattttcaaacttattttaaaaagtttgagttctcagcgaaccttttcctctttcttaatagcctcatggattattctgatattttgtaaaaacattctaaattaaaagggtttataatataatttggtctaaatattgttgattataaatatttaaccaaataacacgttacctgaatagattcctaaaactcttcactccacaacatctcatattatcatagcttataaaattcattcaacaaaaagcaattgactacatagtagtactaattaaagcttcgaaaccgacgaaaatgctaaatgacagaagtacgaccagtggttgggtggatctctaaatatgacactataataagggcccatccaagcccataaaagaacatgagaataataagcaaacaaaagagacagattctagaagaggaggtactcaaaacttaggacgtacaacaatatctatgtactgctttgcgacaaagcgtagaatttagatttaatagtctccaaacaaacacaaacctaaagtttctgttccttcaagcccctttatatatatctccctggtcgatctcctttcgttacatcataattctttgaccttcttcttcttcttcttagccagctcatatcattttttaaaaatttcatataacgtataaaacaattacgtattcttgtctcccactctcttcctcctcccttaatatttcatattaatttaagtaaagagcaaatataagtaattgattctgtcatctaagtatctacgtggcgtaatcccctgagttcctgccagcgtttcagacaacaattctttccccttgcctttgcatattcattaaggtacccacatatgtctttttaatgccgattgtaatttgtattcaataattaccttatgattactgattactgattgattattagtactagtaatagttaatgaatgttttctttgtgacattaattttggcggcttaaactttgaactaattagatattgtgaattaatcacatacgttagaccatagtccatacataaacccaatattaatttattcccatccatttttcttttgaggtaaacaacaacaacaacttatctttatatttctttttcagaacaatagataaattagtagaggtgattagtttaagtagataggaaaaaagatacacacactaaaattaatgtcaagaaagactatgaagaagaaagaaagaaaacaactgtgaaaaccacgacttggccacaaaaattgaagcgttgaaaattgtgtgtttgttttttttgtatcaatcggttgagaagtgcctctcttgtttttttttcctctctttcttctttattcatatttcactttctttctttctttcaaaatttctcaccttctttctcttctcttctttgcttctacagttttcatggccatcggtgaaaaccgtgtagagaaatattaaatttgatatatattgtgttaagtgttggttggttggttaatctctctcactgatgaagttatcgcctctgagtttctctacgagttcgagtttcagtcacgccgatggaatcgacgacggtgttgagttaatatcatctccatttgccggcggcgcaatgctgccggtttttctcaacgatttgagtcgtaacagtggagaatccggaagcggtagtagctgggaaagagagctcgtggaggttacgttagagctcgacgtcggcgatgactccatactcgtctgcggaatgtctgaggcggcgtctgttgattctcgggcgagatcggtggatttggtaaccgcgaggttatcgaggaatttatcgaatgcgtctacgagaatccgccagaaactagggaagttactgaggtcggaatcgtggaaaacgacgacgtcttctaccgccggcgagagagatagagatcttgaacgtcagacggcggtgactttggggattctgacggcgagggataaacggaaagaagacgcgaaactacagcgatcaacgtcgagtgcgcaaagagcgttaaaaggattacagtttataaataaaaccacgagaggaaatagctgcgtctgcgattgggattgcgattgcgatcagatgtggaaaaaagttgaaaagcgattcgaatcgctttctaaaaatggattactcgcccgagacgattttggcgagtgcgttggtaagtcaataaatatctatatatacatacgaaaatgatcatggaccaatccactgttttgtaaatttaaagggatggtggattcgaaggactttgcggtgagtgtattcgacgcgttggctaggagaagaagacagaaactggagaagataacgaaagatgaacttcatgatttctggttacagatttctgaccaaagcttcgacgcacgtcttcaaattttcttcgacatgtacgtgtctctttgattctctctttctttttatttttaagtcaagtttttgggtttgtctttacgtttataactgttacgggaataacgcactgcaattagcaaaagcataagaaaacaaatgtattgatccaagtgcaacgaataattcagttgacgttaataattgaagaaagttttatctataattgatattccaaattctgaataacgccggcgaggtctcatcaacttgcattttaataagatttgagttgatttttgttttctggtggtattttatgaagtttagctgattaaattcacttattgagtaaaaatgttgttgattaaagataatgttagcttaccaatcattctttgattgtaatttgttatctctttagtgagaactaccgcaacttcacaataattttctacaattttgggaattattagccttaaataaaataacatgtgttggttaagaacttaagatgaattgtgattgtttttaaaaccaaatatcatatccttgtagagagatatagatagatacatcatttaaatcacgtggtgttcttagccgttggatctggtagttcacgcaatcaatggcgaaaatggtctagtgagtttaagtaatgggccgcggtttacttggcccagtaaaaaataaacttttaccaaattttcaaaaagtttcctctttcagctttctttttcccgcaataagtttcttgcaagtataagatacaatgactcttatatacaccaagctgccaaaatgagtttgcaattttttactctttttatggccaaacatttaattcagtaacattatggtttacactcaactcgttttgttattctgtcatttttatgacataactaaatatattttgttgtttaatgattctacaattctgttataatttgtagtgttactgaaagaaaaaaaaagattctaactggtaccggttttttgttacagggctgatagtaacgaagacgggaagatcactagagaagaaatcaaagaagtaactttctttattcttcaacatagagattacgtttaaaacaatcaatctctttaacaactcttgtacttttgaaacgcagcttctaatgctaagtgcatcagcaaacaagttagcaaaactcaaggaacaagctgaagagtacgcatctctgatcatggaagagcttgatcctgagaattttggatacattgaggttcaaaaaaacataatatattcgaacacacaatcaacgattcttttatgtttcttaacttttttgtgttgtctcagttatggcaactcgagacactcttacttcagagagacgcatacatgaattacagtagaccacttagcacaacaagcggtggagtaagtacaccaagacggaatctaataagacctcgtcatgtggttcaaaagtgtagaaaaaaacttcaatgtctgattctagataactggcaaagaagctgggttcttttagtgtgggtcatgcttatggccatcctctttgtctggaagtttctagagtacagagaaaaagctgcgtttaaggtcatggggtattgtttaaccactgctaaaggagctgcagagactcttaagctcaacatggctctggttttattacctgtctgtagaaacacattgacttggctaagatctacacgcgctcgagcttgtgttccttttgatgacaacatcaatttccataaggtaccttccttcagtctttcgatttttcagttttagtcagagcacaacatttgagataaactctttctctctctcttgtcctgtttgtgtgccagattattgcttgtgccatagcgattgggatacttgttcatgctggtactcatttggcgtgtgatttcccccggattataaactcgagtccagaacaatttgtcttgatcgcttctgccttcaatggtactaagcctacattcaaagacctgatgacaggtgcagaaggaatcaccgggatctcgatggtgatcttgacaaccattgcattcacattagcatcaactcatttcaggagaaaccgtgtgaggcttccggcaccacttgatcggttgactggctttaacgcattctggtacactcatcaccttctagtggttgtctacatcatgctcattgtccacgggaccttcctgttctttgctgataagtggtatcagaaaacggtaagcagcagcaaccataatctctctttactttaaaccgaaaaaccaaatgtcctgaaacctaaattattgttgattaccactgttcccagacttggatgtacatctcggttcctttggtgctctacgtggcagaacgaagtctgcgagcttgtaggtcaaagcattactctgtcaaaatcctcaaggcaaccaccataaaccgagcaaattcattcctgttaaaaggtgttttaataacaaaataaacccatgaaccttcaatctgatctctgcaggtttccatgctacctggagaagtactcagcttaatcatgtcaaagcctcctggattcaagtacaagagcggtcagtacatattcttgcagtgtccaactatctctcgatttgaatggtgagtactgataccgaattcccatagtgttaacaaacatctcaggtttcactcagaaagatattccctaaacttttccaggcacccattttctattacctctgcaccaggagatgaccaacttagtgttcacatccgaacactcggagactggacagaggagctacgacgagttctaactgtgggcaaagatctttcaacatgcgtgattgggcgttcaaaattctctgcctattgcaatattgatatgataaagtaaatttcaagacatctttgctttctccttactcacttggatacctattattaacatggcttgttgatcctgcactgacagccgaccaaaattactagtagacggtccatatggagctccagcacaggactacagaagctatgatgtcttgctcctcattggactgggaataggagctactcctttcataagcatcctgaaggatctgctgaacaattcaagagacgaacaaacagtaagtccaattcagtgcaccagaaaagttagtcttttctagaaccttgcaccaaatacatatctctaaacttcatatggcacaggacaatgaattcagcagatcggatttcagctggaatagctgtacatcttcatataccacagcaaccccaacttcaacacatggagggaaaaagaaagcagtgaaggctcacttttactgggtcacaagggagccaggatccgttgaatggtttagaggagtaatggaggaaatatcagacatggactgcagagtaatactaaacaccagcatatcattcatttgcatcacctctttaccattgatcgatatactaacatattccttcatcttctcgtaatacagggccagattgagttgcacaactaccttacaagcgtatatgatgaaggtgatgcaagatcaaccctgataaaaatggtccaggctttgaaccatgccaaacatggagttgatattctatccggaacacgggtaagaattgatgcagggcatataaccagaaactatttgccaatattacctataactgacaaaataacatcattcaaacaggtgagaacacattttgcaaggcccaactggaaggaagtcttcagtagcatagcaagaaagcatccaaattcgacagtcggtaattattctatacaatcagctgcttaccatcaagacatcttataaatctctcttctaggactaacgaattaataccattggaaaagaaagaaaacttgcaataggaattatgacacatgcaaacacatgaacatgtctgctaatatttaggccaggtattacgaagcatatgtgaaaacaatttatataattgtgcaggagtgttttactgcggcatacaaaccgtggcaaaggagttgaagaagcaagcacaagacatgagtcaaaaaacaaccacacggttcgagttccataaggagcatttctaattcaatgttacaagccagcttctatcactttccctaaagtgagattcaaatccagcccgccattattttttttcacactaacttcacagtcacttagcaaagtagattatatacactatgttaaaaaaggaaacattgtcttgcctgtttgtatagaccccgcctaaaggcatgaaaataacaaatctaagttactatacgaaataatatacgtgtctttcccaagatgattcaatctctctttccattaccacaagctactagtcacaaaggcagagaagcaaacaacaaattttcattgataaggtgcctcagcacagtatattggtactaaaacacattcaaggataagaatagagtaatgcctttgtgctaagtgtaccaaaacttgcagtagaagacgaggttggagttaatcatcctttattcttctcagtaatttagaagcccagcgtcgaacccgtctcttaagtgtataacccacaaacactccagcgacaaagaaaacagcgcacaactttgaacacgtccagaccgaaactccgctgccaccaaacacagtcccaagataggtcagataattttcttaaattagaactaatagtacacaaaacacgtaaagccattacatattagtcgaatcaatcagaaacaacccaaagctcctactagatagtctataatcgacctgcacagttttgttcctcgggtatctaagatcttagatcatttgaacaagccattacaaatttacaagctctgtgtgatgtggaactgggaaatcatcatggtctctaggttttgagctataacacaaaatctgccctctttttcatttttgttccatctttttaaaatttctctcaagcaggcagaccaattcataatccatccacagaaatagtgattattattatcatccttcccataattagagagaatctgaaaaattggagacatgccctcactcactcacccaaaattcttaaaagttcttagctttactggcaaaatgatctcttttcgaacaaatattgaatagaagcagcttacctgggaggtctggttaccagagtgccggatcctgcgtcgtatgtagtagtcaagttgccggcggcggctcgtttgtcttgcatcagattatccgcaaaatcagatagagaagacgacgaagaagaagctgccgatttcgcttctttcaccatcttgctgtaaaacttctccaaaccctccatttctggccgatcaattagggtttagggttcaatgatgattccagtcatgaaggaagcgattgctaaattgacttctcgttgaccaaaaggacaaaattggaatttcataattactagttgaaaataatccttgaccaaggtcatacaataatacaatattattatataaaatatcatgtactttacacatacatttatttattcattaattatacatccatcacacaacaattcgtaacaatttcattttgtaatatatattcaatttagtttaagcagtcatatcttctttttcttcttgaccgagtcggtaatcttgagaaccataaggactaaaagcttcaaggaggaagttggatttacgccaaggattgagtcccatgtcgttgcacatatcatcagcatgttggatgctgaacgtggaaatgcaatgacgtttgtagaatctgcttgagtttctcgtcacttccatttcttttaagaattgatccaacatcttctctttgcttggtaatctgaatttctcatccactagccggcttagccacattgaacgtagctctgatgtgtgtaagttcgagctgctttggacgtatcctacgaaacccatgtttggtatcaatggatggattgttcccctgtaaatgatttagtttgtataagcaacggtccaaatttcatgagtatactaataaaagaatatataggcttccacttgtaccactgaatatgtttatagtcatagaactatatattatagcatgatcgtctttttaagtgtgcaactaatgcattttcacataatttcaattaatctaaagacgatttttatgtgtatgtacctgtataaaggcatgacaccgcttggaaactcaagccaagttcggaaaggttcaggaacaatagctttgagcttcttcttgccatcataaccagtagcaagtatcacaacatcagcttctaatgtcgtcccatcttcaaacacaatcccttcttcataaaaccaccattttgatgatttcttaaaccggatcatccctttatccgcttcctcaaagaaattctccggtatgatcgccatttgacaagaagcatagtcttcctcgaaagaatggtttggttttagaccatatttctcaagaggtagcttccataaaacatatgattcgatgaacttggaaactacggcacgctgttgtcacatatatgttaagaaacttataaaattctcaagatttttgcatatagagaagtgaaaaaggtaataagatgactaaccagaagagagaagaggaggcaaaagagagttctaaggaagctttggttaggcctatcatggaggaactgagaagctctcgaagagtagaacaagaagaatggtaagccccacacccaataatgtgggatcccccaatgagttgttctcaccaccattgtgcaagcttttcctccttcccctgcaaaatttaaatattatatttaattatgggaatcagattaaataaagatcgaaatcggtcatcttaggatatatatttaatatgttgtttaattaacttgcgagtaactgtttaattgttgccaactagaaccatatacgttccaagtccaaccgaaaagaaataatatatactagtaagtaagacaattattgctatcactatatagtatatatattttatctttattttgacttgatcagccaattattaagagtgaagctaatttatataaatagacatagatatctatgtaccttgattagctaaagcagactctaaagccaaatcaatggcggatttcttgaagccgatgacggctacttttttgccactgaggagagtagaagcttcttctttctctaacttgcagtaatccatcgaatgcattacttttccttgaaacatctccggccctttctttgccggaaaagctggtattcttggaacgtcgccgtatttcccggtacacacaaccacgaactcaaatgcatgccactgcacacaaaaacattgatatacaatatttcataaatgatgcatgcagtaatatggcagtttgagatccggcttaggcttcaaagttaccgaaaaacaatcgagacaaacattgagatacgtaagtttaaatatgcgtatgcaccatttgctcgtgtaaatgcatgcatatgcaaatatatgagactgaattagcattaaagaattgagacaaacctgaatatctccagaatctccgatctgaacagcaacttcccatacaggttttccgggcaacaagttgccgtaagcaccaaggtcaaccatctgaggagtttcgccatcaccgatgaaccttacttcgatgaccttagagccaaacttcatgaatttgagaagatcaaaatgtttggcataagattccaagtaatctaatatctcaaggtaaggtgggaaagttgtgtcatctctattattgggccatggaaagtcggagaactcgtaatcgactcgagccgattgtaatttagtcgtctcgtaagtgcagctcctccaaacacctccgactgaatccgaggcttcgaatacggtcgggttgtgatgaactaagttcttagcggctgctaatccgctaacaccagcaccgatgatggctactctcgaagaagtaagcttatcatagttagaagccatctgagagaggttatgctagagagaagagagattaatggttttgaggagaggaatggttttgatgaagagtgttttgagttgtttgtgagtttgcatgaacatatttataagatgtttttgggtcgggtcgggtattgtgtagtcgggtcaggaatgagttttattagggagcacgtgcttttgaatattagtttagtttcgagtaggtttgaaagatctaaactgttttttttttatcgctgagaaattttgtggttattgtgaggaaatttctgcaagcgtgagaaatatattaaaaattcgctttgtgtatttgttcgtgttaaatttctaagtactttcaagaagtctaatggaatattttctcttttgttaaattaggtttttaacttgctttgtcttcttgaatatgaacaattaagagcttcttagtctataaattgacccaactgtattatatacaaatgcatagatttttttatatcaaaaataggtttaaaacaaattcttggttccattaatatcgttatcgaaatctccttcctatttaaaatgtactctcgaatatcatttgagaatattataagaatgagagaaaattccattgtcctcggtgacaaaattgatatatatatatatatatatatatatgtttattgcgaatttacttacaaaaattatctgacatctaaattttatggatagttgtttatcgagaaatatcgtgcgtgatagaacggatgactgtatgtaagcaatttgatcgctcattagcgaatctaactcaacttaacacatgtgttctagtctactctttttatttacaatcaatatgtatgctttcttgagataattataacatcatatacgtacagcttaatacacgggaaaatgtttgtttttccgagagctttctaacgtttaagtcttgaaagaacaatataattattgtttttaatcaataaaggaaatgttctccgcaatgaagtaagacaaataaaatgaacatcataatttttacaatgtacataagacacatccttaaaaaaataattaacatagtcgacaaagacaatcttgattatggtttgatttccgcacaagaaacgggtccggattgaagccatcccttattaacaagccgttgaagagcatgtacagaggtgaattgaaattttctatgtgtgatgaatttaatagtttgggtggaattatgatatatatagttagttcatggtgaattaggtaaactgtaaagcatagaagtatatggtgatacgagtagagcgcctttaattcatgtaaattgctatatgcagcccttactcttactattctcatacattacaagatcttgagtttaatttatcaacgagaaaaaacaaaacgaaaaaaagtataatctttatatggtctttggtggatagactttataaatgtattttaattaatcattattggtctattcttaatctgttatttctgtcaggttcttgaactataactactactatctctatttatttattttattttttgtctctagtttacttttgactaaatctttatccctaaaagcgaattaaaataataatcgagtacgtgtccatgcaagtgttgaatttcaaaacaatggaaaaaagtctaggtagccttatcacttatatttgactatcacccaaaactatgaattgtataagcacacattgacgaaggatttttccgactaaatttatgttatacatttttatttttatcaaatttgtgtccaattgtattattagttatactatatatattaaaaagatagaaaaagagatataaaacagtaagattacgaaattgttaaagacaacgtagtaatacataaagcggtaaggattttgtaccaccttacttttagaaatcataagtttatatctgcgatactataatgtaagttcaattaagaaggaaatacatgatggtaatataataataatgtggattatctaagaaaatatagctattaccattacagaaaaagagattcaattgcatcacataatttgtgtcaaaaaattaaatgatactaatttgaatcatttatttattaataatacaaaaattataatttaacatcagttacaataattatttaacatcattaatgcacacattagaataaaaatatgttctaaaaaaaaagaacaattgttctctcaaattaatagaatatatagcttgacttaagatatgttgtcacacaacactctgcacatatatataaaccaaaataagactagtccttttttttgttgggttgaccattcttctttcttttctttcctttttttgccaacaaccattcttctataatattgtcacttgcgatggtttttttagtattattagcatatatgtatttcgcaaatacgaaaaaaacaaaatccagttgtccttattttctgttatttatactaactcaaatacgtacacatctataataattttatatccaaccatgacatacccctaatcagttagtaaatgatgtttaattaggtatcttaacatgtgtaccgagtaagccaattttttgttagtcgtgaatgtggagaatcttcaagtcagacgtaacagcacaaaaaaaatgaagcctagtgactaagtcacaaatatacttaattaacttggtagattgtcagtatcagattttatgagaaaactaatgtcgattttttttgtatttactgtaatacaatcatttggttgattaactgagtcaaggttgtttatgtatcaaatcactttaaatttgaggaatatcaaataatatgatgagcatgatatatgtatatttatgctatatagaatacttatgtatatatatatatatatagtcatacaaaaatgatcaaatatagtgaaaagaggaggatcgttaagaaaaaaagagagcgagagagagaggaggaagtaacaaagaaaatgaggagtttgaactcaaacagaggagagaaagttaggaatatggtttgagaaaataaaaaaggaagagagtatgtacaatgtaccattttaattgtttggtacgaatcaattttcttacgattgatatttcgtaatcttacttcttgtctttgttacatgcatgtttggtgtggtcctaactcctaagcatcttatatatgcccctccatcataatcgagagagagagagagaaaaaagcgatatacagtttaacaaaggtaaacttttatttgatgttactattttcccctctaatatttaccattcccttttaagatttttgcattttaattatcatattaacgaatatttgttattttaagttatcaactgtgtatagatttatttagatttgttttaaatttcacgcgggtgtccttgtctctgtgagcatatacttagttgctgcataaacaattaaacatatacaatctatatgagcgttgataatattatcgaagtcttttttttttctcttaattgattgcgtattgtttgtactttgtacaatgatcaacacgacaacactcaacagtaaacacaaaaacacatatagaaccctaacctttgaaactatatatcaaacgaattcagatcctaatcaacaactaccaatagttaataagtacattctcgtaatagtataattaaaagttttctttgtttgcaacaagaacatatttcatcattgaaaaatgaaaagttaagacggatggaccggtcaagatattattttatataacatctggatcaactgatcgagatttgatcaaatactaacaatatagagctaacaacataatttcactttgtgaaaccaacaacgttgaatcttctcttgaaagtttcatagcacttgaaatcttcataacattgacttctactgtaagatattaaactatatatgaatgcgtcgactatttctatttttgacctagtaaataaataaaaggccttaacttggaagttttagaaacgtacggatttaagattttaaaacaaaaataaataaaaacgtattgaaaaagttttacaaaaataaaagtagatgaaacttgatgttcaaggttcttctttggttaggtgtgttggcagtggcggagccagaacaatgactcattggggtcaaaaataaattaaacgaaacgataaactttactataaacataacaatgtcattacaaataaaaattctaaagatgaactctgcgttcactcatatcttggaatcgttttatcaccgattcgtttgtaacagtgttaagtgcttgcttttcaataaaacaaacaagacaatcacttaagaacatatcaccgatacggttacgcaatgtagtcttcacaaaattcatcgcggaaaaacatctttcgacagttgccgttgcaacaggaagaatcaaagatacctttagaagacgatataccaaaggatgtgaaagatgctttcttgtctctaccatcacacgagcaagatcaccaagacactttaaatctgtaaacctttcatcgtttttcacattatcaaggtagatctcaagttgatgatcaagagatctacgctccacaaaactaaagtcatctggataaaactcggtcaatctcacgagcatggacttatcaaactgacgaaaagaatctatcggactcaaagatgacatgcaaataagtagttcagaattcacctcatcaaagcggtcattaaactcttgaagttgcatatctaagacagtgtagaaacaatccaccttatagtgatgcaagttggttataccggtctttttccttggtcttctagaatcaacaaattcttcctccattttaagcattccagtgttatttttctcgctaaaagaactaactttagccataaaagcatcccatccatcgtctctaaccttttgcaactgacatttagtagttttcaccaatgaaatagcatttaagatatcttgatcttttctttgcaaagcctttgataagctatcagtgagtcccataacaagcaacatcaactccagatagaaaacaaaatcaaaggtgtgaaaatacttgagaataccatatgcttgttgtcttttggtggtgtcggtgccttcatcctggatatactcgagaactataactatagatgaaaacaactcctcaagacgcaacaaagtcttataatgtgaaccccaacgagtatttccaggtctttgaagggaaagttcttggtttaacccagttcctgtcttaatttcaccattgctaatcttttcttccactttttgccgatggatttcccggatcttatcttttcttttgcaagaagctccaacaacatttagcaaaacagaaatcatataaaaaaactctccaacttcaacatgtttttttgcaactgccatgacaaccaattgtagttgatgagcgaagcaatgcacataatatgcagagctactttctttcaaaatcaatgatctcagtccattgaactctcctttcatgttgctagctccatcgtatccctgccctctcagctttttcaaactcaatccatatttagcaaacaaagaatcaatagcactttttagagataaagaagatgtctcttgcacatgaataacaccaataaatctttctttaactaccccatacttatcaacgaagcgaaaaactactgccatttgctctttatctgaagcatcagccgattcatctacaagcaagccaaagacatcattatccatttcttcaataatagatctagttacctcttttgaaaagcaatggacaatatctttttgaattggtggagatgtcatctggttatttttaggagcatttttcaacacaactttctttacaacttcattctgaccagctgtatacttcaaaagctctacaaaattacccttatttgttgactcttctgattcatcatgaccacgaaatggtaatccttgatgtaacaagtgtcgagaaacatcaatggaagcattcaaccagattcgataatcattcttcacaacatcggtttgcttatggagagcatgcttgatggactgaccttgtctcatcaaatcctcacattttctttttgcattattgtgaaaactattcacatccaatcccacatgttggtccaacctatcagccttattccaactacaaaaaccagttgatagaaagctatcactccctccttgatttccagtttgatctctgaataagtaacaatacaagcaaaaagctttttctttctccacactatactccaaccaatcaccatacaaatcaaaccattttggattaaaacggcgtaacacctttccaattgctatttgtttaaacttatgaccacgaggttgacaaggtcccctaatcaaatattcacgtcgtacctcatctctttgattaggatgataacttagaatgctttttctctttgcgggatcacttggcaattcatttaaattaatatcaggtggtggcggagattttcttttcagaaaccgatacattatttttgttgttgccttgcctacatacaaaaaataagaatcaatataaaaatcatgagttgaaacttaaatcaaacataaaaattgttttctccgtggccttatcatgattcatgacaactttaatttttgtcattagtaaaaattactgtgagattaaattagaaactaaaacaaactacatcaaaaattaagaagaaaacagtatattgacgactaacgttacaaagaaaactcatgaataatgacgaattgagtttttaatttttgacagaataacaacaccaaaaactaaattaatcacaaacgaattttgcttaagtgatcaaattgaaattggttgatagttaattaaactttatataaaatatatatatatatatatatatatatatataaaagagtttaccttgaaatctatagtctcgagccttaatctgattttcaaggatgtgatgattgtataaaaaacaaaagaggaagaagctaaattgtttttggctaccacgacacatgttcaattatttaggttttttactttcttaatttgacagatttttattggacctaacattagtataattttaataaaattattgggtttttgtatttataattcataaaattttattgagctttgttttacttgtaccttaataaatcattcataggggtcaatatttttgtttgactggggtcaataaatattttttaataaaaattctattattttccaaaagttcactgaggtcatttgacccctataattcttcattggctccgtccctgtgtgttgggtaggcactttggatcaaagctgtatgtgagtataaagttaatagcatgcagagcatttagcatattctcaagggacatcaaattccccagagtgaatagaaatttgatcagtaactgaatcgttaaataataaaacacagatagagttatatcacctgtaaaaaattgacagactacctaaaatgaattaaaatttcccaaaatgtgaagaagaagaagaaagctaaacatagtttacgggtcacatatctataaaagactctacgaccaaaatgatcaaacgattaagcaaaaatattaccaaaagtacacttttatatcgataggagcataatggttcaaataataatgggcctatagaaaaaatcgaggcccattaactttctcttggagtatgtaaaaaataaaatgagtgttgtgtgaacttgtgagataaggtaatttgcaacttcattgaacgttaaaaataagcagaagacatgaaaattaatataagctaactagttgaatggtttggtagagctttcgtaaaaaaaagaacgaggctcaaatgatttcagtattacaaaccaaaatgaggtatgaagtaatatacaagttgtatcatacataaagaacaacttgttcatgacaaacccaaactcagctatctcaagaatgtaatagtagtaatagctaaatcgtcggatccaatagacggctagtggttaagtaatgtatgcgggtttatataaaggtcgtggttactggttagaaacataatgaagtaaaaatttgttacatatatgagcttataaagcctataaacgagatacgatttttttacattcaaaataataacgggcctgtgaaagcccataaaagctatcactttccgtggtcaccgtaacttccgcgagtgtataaagaagaaattcacatacttaattaccaaattattcgtttaataatattgtaaagtgatgatgaacgatatcacattgtgacattgacactcatacatgtagtttataatttatgaattcatgtaatgtatatcgtacgtgtatgctaaattataatatgtcaataaggtaaacatgattgaacttttactttttgcataaatcaacaaatttcctttccatatcttttttcacctctatactttactttctaatttaaagttatgatataaaattaataaattgtgtttgcttgtaatattttaacaaaaccacgcctcaccaactttttcctaatcttttcttcaactttttttcctttgttgtcaccttttcgatatggaataagtaataacatcattaattcattatatgtacttctctttttcaattttttttcttctcatttcttagctttctgctgaattatttggcaattggtaaaattacaaatcacgctgaaaagccaaaagttaaataatattattttcatatcaataaaatgtgagtgagttatgggagcctagattttggttcaaatcaaattctaattatcgtattggttaaaaaatctatcaactaaaattcgataacttgacaattaattgaaacaacaacggtttaaacagttaattagtatttatacattttttcttgtatttatgcgtttttgtttgatgtttagaaaaacacacatattaaaaaaatatatatattaaatattgattataaatttattattttttgtgttttacaattttctattattctaaatcaatgataattaactatttttttagaaaattacaattcactaatattatccaataaatattgcatgaaaaatttaaaagattaatcttttagaaataaatcatttagtaataaagaaaatatatatttataaataattttacaatttagtggaaaattataaaaaaaatatatttaatgttttctagcaaaaatatataaaatcttattagaattagaacccgacaatccggataaatgcgttacgacttgtagaagatttggtttaaggcttgaagcaataattaaatattaaatatctagatatttgcataaacgttgcaaaatggaagaaattgccaaaacaaaataattatttgacttttaaattgcgtaatagtataattataattctctttctatctctaaatcacagcgtggggaacgttttttcctggaagaagaagaagaagagctcaacaagctcaacgaccaaaaaacttcggacacgaagactttttaattcatttctcctcttttgtttttttcgttccaaaatattcgatactctcgatctcttcttcgtgatcctcattaaataaaaatacgatttttattctttttttgtgagtgcaccaaattttttgactttggattagcgtagaattcaagcacattctgggtttattcgtgtatgagtagacattgattttgtcaaagttgcattcttttatataaaaaaagtttaatttccttttttcttttcttttctcttttttttttttttcccccatgttatagattcttccccaaattttgaagaaaggagagaactaaagagtcctttttgagattcttttgctgcttcccttgcttgattagatcatttttgtgattctggattttgtgggggtttcgtgaagcttattgggatcttatctgattcaggattttctcaaggtaaagggacgatctttagcttctttgcagctgcaattacttgataattccatgtctggattctaatttcatggttttttgaaaaaaaaaacaaaaaacaaatccgtttggaactcgtttgcttaatggtgacaggttttagggttgtttagttattgttgttagattcaaagtgctattgttctgtggcttttgatgtttggaagtgaaacaagtttgttttgggtttttgctaatcagagatgattcgacgattttgcaggctgcattgccgtatgagcagatagttttatttaggcattatgggttggtttaacaagatctttaaaggctctaaccaaaggctccgggttgggaataataagcacaatcacaatgtttattacgataattatccgactgcttcacatgatgatgagcctagtgcggcggatacagatgctgataatgatgaacctcatcatactcaggaaccatctacatctgaggtgagtttggggatcatgaagtagtgaaaagaaccacatatatagttgacggtttatcatagctctggtctgtactgttatttcaacttttgtggtttttctttactaggataatacatcgaatgaccaggaaaatgaagacatagaccgtgcaattgcattgtcgcttttagaagagaatcaagaacagacaagtataagcggtgagttcattttcaggattgttttagccaaaacagatatatgaagacatggttttgttatcggattcggtttgctacaattcctttaaaaaaagtaatggacacagggaaatactcgatgccggtggatgaagatgagcaacttgctagagccctacaagaaagtatggtagttgggaattcaccccgtcacaaaagtggaagtacatatgataatgggaatgcatatggagctggagatttatatgggaatggacatatgtatggaggaggaaatgtatatgcaaatggagatatttattatccaagacctattacttttcaaatggatttcaggtatttagatagccaatcatatttagctggcttaatttggtcgatgtgttagtttagtgtccagcagccaaataacttgtcaacaacttgtctgcataggatttgtgctggctgtaatatggagattggccatggaagatttctgaattgccttaattcactatggcatccagaatgttttcgatgttatggctgcagtcagccgatttctgagtacgaggtgaaaccaagctctcttccatatcctcttcatttgctttctggttctacttaacctttagattttcttttgtaatgtgtttcccttttttcctatagttttcaacatcagggaactacccttttcacaaggcttgttacagggagagatatcatcctaaatgtgatgtctgcagccactttgtacgtaaacctctttccttttctatcattttagcccataaatatattcatgtgttgttgttttgttccggatcttacacttatcgtctgttgctttgtttttctcccgaatgtaaattctttgaacagataccaacaaatcatgctggtcttattgaatatagggcacatcctttttgggttcagaagtattgtccttctcacgaacacgatgctaccccgagatgttgcagttgtgaaagaatggaggtgggttttcttctcctctaatatgtccccaaacatacatcatctactcaaaagtgaaaacattttttagccggtaattgacaacttagctatactttgtagccacggaatacgagatatgttgaacttaacgatggacggaaactttgccttgagtgtttggactcggcggtcatggacaccatgcaatgccaacctctgtacttgcaaatacaaaatttctatgaaggactcaacatgaaggtagagcaggaagttccactcctcttggttgagagacaagcacttaacgaagccagagaaggtgaaaagaatgtaagtaaagaaaagacaattatccagtactaagctaatacttgaaattattatcacattctgtttctaaagtattaaaccttttcattttgcttcttagggtcactatcacatgccagaaacaagaggactctgcctttcagaagaacaaactgttagtactgtaagaaagcgatcaaagcatggcacaggaaaatgggccgggaatattacagaaccttacaagttaacacggcaatgtgaagttaccgccattctcatcttattcgggctccctaggtaaaaaagactctttttgcttccattgaattgatcttatgtcacagttcaagcattgatggttttgctgaattttgttcaggttacttactggttcgattctagctcatgagatgatgcatgcgtggatgaggctcaaaggtgaatttcttactactcctcttaacgtcttatattactgcttctttctgttgatcacattgttgaaaccttgtttcgttttggtcttaaaaaggattccgaacactgagccaagatgttgaagaaggtatatgtcaagtgatggctcataaatggttagatgctgagttagctgctggttcaacaaatagcaatgctgcatcatcatcctcctcttctcaaggactgaaaaagggaccgagatctcagtacgagagaaagcttggtgagtttttcaagcaccaaatcgagtctgatgcttctccggtttatggagacgggttcagagctgggaggttagctgttcacaagtacggtttgcgaaaaacacttgagcatatacagatgaccggtagattcccggtttaagaacccaaatggacaaggtcttctactttatttataggatccttggtagattattattatatgctctaattcttttggtggaaaatgtactctcgaccatattcttatgtgtagtctcattcgatgattctttgtattcctctgttaaaatccatcagaatcagattcagtgttttctttgttattgctctccaaattcaatcgaaccaaaccgagccaaaccaaaccaaccgaaccaaattccaatttaaaggtttcttctttacacactctcactcttcgtcgccgacgtagtcgtcgtcaatcgtcgactaaaaccttagacacattccaaagtacggaactttgaggtcccaagtttaatgggttccagcgttaatcatccgacaacaaaattctcctgatgctccgacggtctccggcacgcgttgttgcctatcagttgcttccgtttctctatactcgtagcttctccgaagcctcgagaaccttacgccgcgagcttcgaggaggaaacgggcgaattcgacccgaattactcgagcgggtctcacgtttgctcgtacttggcaggtacgaagctttacatgatctatcactcgatttctcagatgaacttctcaactccatcctgcgtagattgaggcttaacccagaggcatgtctggagattttcaatttggcttcaaagcaacaaaagttccggcctgattacaaggcttactgtaaaatggttcacatcttgtccagggctagaaattaccaacagacaaaatcgtatttatgtgaactggttgctcttaatcactcgggcttcgttgtctggggagagctcgttcgggttttcaaggaattttccttctctcctacagtctttgacatgatactgaaagtttatgcagagaagggtttggttaagaatgctttacatgtgtttgacaacatgggaaactatggaagaattcctagtttgttgtcttgtaatagcttgttgagcaatttggtcaggaaaggggaaaactttgtggctttacatgtttatgatcagatgattagctttgaggtttctccggatgtgtttacttgcagtattgttgttaatgcttattgtagaagtgggaatgtggataaagccatggtatttgcgaaagaaacggag

SEQ ID NO: 1135 - DNA, 120977 bp, Arabidopsis thaliana
gaattcctagtttgttgtcttgtaatagcttgttgagcaatttggtcaggaaaggggaaaactttgtggctttacatgtttatgatcagatgattagctttgaggtttctccggatgtgtttacttgcagtattgttgttaatgcttattgtagaagtgggaatgtggataaagccatggtatttgcgaaagaaacggagagttcattgggtttggagctgaatgtggtaacttacaatagtttgatcaatgggtatgctatgatcggagatgttgagggaatgacaagagtgttgcggttgatgtctgagagaggggtttctaggaacgttgttacgtatacttcgttgattaagggttactgcaaaaagggtttgatggaagaagcggaacatgtgtttgaattgctaaaggaaaagaaacttgttgcggatcagcatatgtacggtgtgttgatggatggatattgtcgtactggtcaaatccgtgatgctgttagggttcatgataatatgattgagataggcgtaagaacaaatactaccatttgtaactccttgatcaatgggtactgcaaatctggtcaattagttgaagcggaacaaatattttctcggatgaacgattggagcttgaaaccagatcatcacacgtacaatacccttgtggatgggtattgcagggctggttatgttgacgaggctttaaagctttgtgatcaaatgtgccaaaaagaagttgtaccaacagttatgacttacaatattctgcttaaaggttatagtaggattggtgcttttcatgatgttttgagcctttggaagatgatgcttaaaagaggcgtaaacgccgatgagattagttgtagcaccctactcgaagcattgttcaagcttggcgattttaatgaagctatgaagctgtgggagaatgtcttagcaagaggtctattgactgatacgataacattaaatgtaatgatcagtgggctgtgtaaaatggagaaggtcaatgaagccaaagagattctagataatgtgaacattttcagatgtaagccagctgtgcaaacatatcaagcgttgagccatgggtattataaagtcggaaatttgaaagaagcctttgcggttaaagagtatatggaaaggaaaggaatcttccccaccatagagatgtataacactctgatatctggtgctttcaaatatagacacttgaataaagtagcggatcttgtgatcgagctacgcgcaagaggattaactcctactgttgctacatatggtgctctcatcaccggctggtgcaatattggaatgatagataaagcctacgctacatgtttcgaaatgatagagaaagggattaccttaaatgtgaatatttgcagcaagattgcaaatagtttgtttcgtcttgataagattgatgaggcttgtttgctattgcagaagattgtggattttgatctgcttcttcccggttaccagagcttgaaagagtttcttgaggccagtgctacgacgtgtcttaaaacacaaaaaatcgctgagtctgtcgagaatagcacccctaagaagctcttagttcccaataacattgtttacaatgttgctatcgcaggtctctgtaaagctgggaaactcgaggatgctcgaaaactcttctcggatttactatcaagtgataggtttattccagacgaatacacatacacgatcctaattcacggatgtgctattgctggtgatataaacaaagcctttaccctgagggatgagatggctctaaaaggtattatcccgaacattgttacatacaacgctttgataaaaggcttgtgcaagttgggtaatgtagatcgtgctcagaggcttttacataagcttccacagaagggcataactcctaatgctattacctataacacattaattgatggactagttaaaagtggtaatgttgctgaagctatgcgtttaaaagaaaaaatgattgagaaaggcttggttagagggtccgataaacagggggatgttgacataccaaaggaggtggttttggatccggaagttaaattggggagcacaggagtgatcgaaatgaactcaaatgagctttatgatgttaggagagtttctgaagcagtagtatgatgacgaataacaaatcctgacctcttgtagaactctttgaaagatcactttgagtcttcaatgttgctatgattgatgggtaacatgaaaggaggctacaacgaatctcctccattgatgtggtatgattgtatacttcaaagaaaacagtgccattgtctcaagatcatttggaaattgtgatccttctaccaaacaatccatcacttggcttcaaatttatcggccttctcttctgatccttgatgttttaaagatacgagacatcacattcatggagcctgaaatttcgagcggcctcaggtaagcacacattacacttgttcatgctcctcttagttcaatcaagtttgacaaactatagtttttaggatataagacaaaactaagaatgataattgtcttttgtcaggtttatatagtaaaggccaaacgatcgatattagtcactggtctttttgataagctgatcaaccgatcaaaccagtaagctccccatctcacggttgttcttgtaccttccaaagccagataagactctgtgatcagatatgtaccatatataatgttcaatgtaataaatgagatcttgattaaataagtaaagttgcttcagatcaacacaagctattgatttaaattgacgagccacctctttttcctttttagaatgtgaacaaccaaacctacctttgattgtgtgtgctatctgccgaaccggagagcttattccggtctgtctcggtttcattgtacttacttcggtttgtttgagacacggtgggtccattgtcgataccattgtcacatgcgcagaaagctcagaagtcactcagcttgagaaaaatattcaaaactaaaattattaaagctaacaaattttgcattttgatttatttatataaaagaaaaatttaagaataaagttaacaaatgaatatgtagtgtatatagaaaaattatttacacaacactccacttgttcctaaatatccaagttttagaaagaaagaaaatgtttcaaaaagatacattttgctaggttttctaagcattggtagttagttatggatgataaattgtagactacaagacaaacaatagaatggtttagagttttaaaaaattgtttatcacaaaaaaaaatggatgtatttaatatcaacctgttacaaattggattaatctggaatagagtgagtatatattacttttgatagagaacaatattgttaaatggtaacacttgtagaaaacttagcataatctgccacttagtggaatatcttttaccatcaaaatgcgaaagatatttactcctaatttttctttatactacatatatcctagtggatttggaggaaaattaattttttaagagattacgaggaggtgaaaaagaaatgtagagtgaattgtttctttaaaaaggtaacaaaaaaatataatgaaaaatgaaaagagtctcaaaggtcaaaactgtagtgactgtacataaatgtttgatgggacattgctcgtgcttttcctttctttcgctcggaccaccgacactctgtctccaattatttcctaaaactttaatctaatgacttaatttcgtcgactttctaattaatcaattaacattatggatctaatatgattcaaacaagcacgtcgctggtgactctgaatttctttgttacttggtttattgctatttcttcaagcatatatgttttctcacaacgttacgaattacttgtaatatgtttttctgcaagaacatgtctttcctcgagatattttacgttactatttgcaaaattatttgctactatccacggatccacccataagagtgatctcatggaaatatacgtggaaaggagcttttattatggtttggtactttggttttctatgagttcggtatcttcataagaccaaaaaatgaaatagcgaaagttaagacacgtgatgttgttgtaaagagggatgatggaaattagaaaatgaggcaacacatgtgctcttcaacctacgaaccatctacacatagctagaatccgacaatggacataatgtaccttcattcacaattatagattcttatgtttggcaatttaaattcggtttctaaagttccatttgttccattccccatatgcacaacgcaaatgcagcgtttccagctctaaatgcaagataattcccatttaatagtatttgataaaattacacttttatagaaaatgttaaaaatttagccattttgatcattcttttggtcacttgagagtatttttttttttgtatattctcttctatactccaaaacaaaaccaatgaaaacaacaacgaacaaaagcaaaaagcaaaatgttttttttcttcttcggttgtatgatttacgaatcgatgtacagtaaaaacaaaaattcacctgtatattgtatatatgtatgtaccggtattaataataagtaaaccgatcgagactggtcaagaatccaacgcgaacggcgtttgaagaagatcatacggagcccaaagcgcgtctaaaggacaaggccgaccagcatcaagcctagcccatggcttacctttcccactccaatgcaacagactcaccggaccaggatggagatctctacacagtcctctgaaattatcacctcctaaaccgtgttggttccaccgatgattaaccggtttaatcaaaccggcaaaaaccaataaaaacggtggtaacgaaccaagctcgtaaattctcattctcttttgcatcgccatccactcttcgatgcgtgacgtgtacgcgccttcgcgccaccgggaaagatcgatcaccatgactccagtgttgaagtagcatgctttccgatcggcgaaggttaaagagagagtcggattagaccagaaggttgatgtgaagtatgaagtgaaattggcgttgcagtattccggcgcggcgaggactgaatcacggccgagatctgtggcggcgagttttgctatgtcgtcgacgaggatcagatcggagtctaggtagacgacgcggcggacgcagggagggaggagatcggcgaggtagcttcttgcgtagtttaaaggacagtctagtgcggagcggatagaggaggagataaggcgagagacggaggagacgttgaagacgtagacggtgaaatcaaggtaagggaaagaggaggatatggtggctcgtaaggaagaagcgtcggcggaagcagaggcgacgaagtggaaaacaatgttttcaggacaagaagagtgttggaggacggagagaacagcggcgactgagccacgaatgtaggcggcgtcgagtgtcatcgccacgtggacagctcgacgtgagcagaagattggtttggcgaccacgtcatcgtcggactcggagtcatcgattaaggggcaatctgcagaattgtaaaactgtggggcttctttgaatttttgaataattgtagtggcggaaatgggtttatgaagaagaagtagcgagaggagaatgagaagaagaagatgttgggacatggtttctttcttcttcgtcgactctctggttgtattggaaggttttgtttctctcaaactgagaacaagaagagaagagctgtctctaaacactttttatcatgtgtgtgtgtaagagagaggaaaattaaaaaaatggttttgcttagattttgggtttctctcattaaaaaatatttatatattgattagattccaagcccttttcatgatttttaaatttaaatcttgaaaactgaaaatcatattattgcgtcaggtaacaaaaaaatggtcaaattatttactgaatttttcgacttaaatgtgttgttttatcgaatgcagaaatgtgggaatttattgtatccacatgattaccgaaaatcagtgtagatccacgttataggctatataatgtatattaaatgggtgattacattatttattaatgagatttgagtttttataatttccgtttgtatttttttcttactaaaaatgcacaaaattaaaagagacatggaagttgatatatgagattgataagtacttatcaaaaacaaattcacacacgtaatatcgctatgtttgtctgtgcatacagtacaaacaaatagtttttagaattcgaatttctcggatagatatatctcgagaaattattgaaaattatgtggctagtacttagtacgattcacagttgcagaagaataggggggaagatatagaaacgtgaaatgaatgttttgagaataatttaacgagctgttcaaaagaatgaaatataattatatacatgacttggtcaataattcttatggttgagatgttatgtttagcttcaagctttatagtaaatctattcatttttgctataagttttttagttttttctttgaagtttctattatggtcctttgtcactttccatgactacgaaatttattggtgaaatgaaatacaataaataaataaattggatccatttgaaaattcgtattataacgcctatttgcattttacatatttctgccacacttgtttttttttttggcttattggttatagtctttttattttatttttaaatgttagtcttttattttcaatgattgaattttcttttcttttttcctaagaaactttttttggatcatggggaatgggcacatcagcacatggtcaggaagtgggtttccctttttcttttgctgacgaatttctaattacctaataattgtaataatttgaaacgaaaatgtatacctatcatatatatttattagagagatttaattttggttttgaccgaccacaacttacaattatgaactaccatcgtttaaataaaaaaacgttggctgtaaaaaaaaaaaaagttgaagaatgtagcaattttcatctcatgaacttgttcagagtttcaatgtttcagaaattttacttttagtgtctcattgcggaagaagttctttcatttccaattaggagtacaaataagcaagccctttccaaagaatgcattttgagttcatagtattaagcacatttgctcgttttgttagtactgatggttattatgttgaataatcaaaactaaaaactaaactaataaaaattaaaatattagaaaagttttccattatacaatagtactaataaacactcataaagataaacgtagaaaagcaagacgcgtgggccaaacgtgaaatggaataatatctcaaatcctaatggtacgacttttctttcatcaccaaatgtgaattcgtgagtacttttgtgttaaagtcttgtagaatttataccatgtcatttttgtttttgtttttttgcatacttttttttataattttgttagttttctttttacttcaaataatttcctttcattatgtaaaacacccgcgattaagacaactccttgcaatacaccatataaagatactccaaaaagaaatacatacaaagatatataccatatagagtttttcaagaaaaaatatccacatatcggaaaatgttaaaccaattatgttcatggccataataaaacataatatacgtaaaaataaaaggttcaacgtaattttatgattagcctccactttacatatattcatcaatagtcatacaaatcctcaaattaaacaaccgctaaacaataggtcaataaaaccattgtgcaaggatctatcttgaatttcagccctccaaccattacttaggtaaccggttagaacgttttatttaattggtaaccaagtaacggttacaagaacctacatttatattcaccaacttaccaatcaaatcttacttgcacaatgtttttcatatgttgcatacttgcattgagtaaaaatttagaaatatacagttaccagaaaaatattaagttaagaagccaacttgatttgttgggccatcgttttatcttgaaaaccccttcacttatatcctaagggaattgggtgctcacaaaaaaaaaaaaaaaggttcgaaggaattgtgtgctgagacttaaagcattgtgagaatgcgaggtttccttcttctttttactttcatatatttaaactcatttcattttatcattataattctcacaatatgactatatatgaattgtatatttagcgaccaacatatatagctcattttattccggtggaaaatcatgaaactttgaaaaaatatgatcgatgaagccatgaaggcatatggcttcagccttttgatgacacattaaataaaatatagaaacgaacgtaatactagtattaaataagcatgttgcatgtgtcatgtgtgcatgaagggagggttattattattaatacatgttcatgagtgtatgcacataaatggataattttaattagaaacagatgaagtggagattattgcatctgtgtgtgtgaactctctgagaaacaaattaaaaaattacaatgggtctcattgtctcaaaggtagatttcgaataagcatgtatggtctacactacacattcacttccatgagtccaaaaagccataactttagtcttcttctgaaatagttgcttcctaataatttaaaaaatattggatgcattggctgcacgtgacttcaaaatatttgtatgtatattttgaaaagagatatagaacaaaacttggacaaaactacaatactagtacgaaaaataaagacactgcacatctaaacacaaacaatcatattgcgtttatatgttcaccgttgttagttaatgtttttagtaagaaaactaaaagtaagtaaaattaggtatatcctaaaatatttattttagaaaaatatataatgtgaacggtctaaacatttgtgagttttaatataattatgacgattgaaagtatcaaataaaaagtatttgaggcaaataattcttctggtatctaaccacacctacaccttacaagtaatagggagcagcatcttatgtcatgtcttcgaaagctatgaacactaaaaaatgtttagttgctgaaaaaatttcaccaaaaagggaagaagagttcaaagtatacttagactcccttaacgaacaaactaaacaaacatttttgcaggcaatgagacactatcaatacaataagaggctcccaaaacgtgtttgcagataaacacaagtaaaagatccgaaggagccaacaacatgatgatgaataataatcgtatccaacattatgggaataattaaacaacataagtattgagtgaagactcgcaagtcaaatccttaagaaatatcagtaagagaatccgacaggttttattaatatatgaacaatttgctaaagtagcagtttacaagccaactcacagcacatattttcccatgtttttatgcaataaaatctagaataaaaagcgaaatacagttagctaaatcgatttcctcactagctcaagaagagagaaaacacaacaacgacgaaaacaatgagtaacaatatcctcaagtgatggtcttgttgtccttgtcgacccgtgtgccgctggtaactatgcatatgcgagtgtcctccatgaaacggattcgagaaaccgtgagggaagccgccagaagcagcagctccatacatggctgcatcagggaaaccatggaaatggaggttgaacaaagaaggaatcaaaccgccaaacgctgcagacaatgtaacattcccgaaccgcgcactcgccatcggagcagcaaaacctcccatgaaccctccaaacccatgatgatgagcaaaaccatggttaggatcaggaggttgtgcagtttcgggtctctgtcccgatggacggttaggcacttcgagacccggaatggacttggaccgagggtcagcagacgatttacctctaccgtacaaaggaaccaatctgtcttcttcgatcacggctttgcaaacaggacagtccttagattgagaatggagatggagccatttgtataaacaaggccaacagaacaagtgaccacagagagtgacaataggatcttgagccaagtctaagcagatgttacattcgaagttactcgaatcattgttgtttgtatcattaccgctagaacaagaagggacatcagacatgattcaccacaaaacctctgcttttaatctccgacactggattatcacaagcaccatataaattagcacaaataaacacagaggattaaatcaactaatcaacaactctcattgaccaaaatgaaattagtgattccaaattttctaatttgcttgaatttgtcacgattcaataatcattaatggatcattcagctttaataatatacattaaaaaatccaaaaaaaaaagagagaagtaattcaaacaatcaaaacggaatcataaacctctagatctctccgataaaccactaaaatcaccgatcatatattcccgtgaataaaataactaacttatctccaatcgtacaaaatcataaacagaaacggaaaacgagaaacaaaaaaatcaagcaaaagagttggaacaatccgaaatataaatttaccgattagagatttagatcgggcgatgaagggatcgacggaacgatcgcaatccgcaaaggaacaccgttcgcttaagggttaaggttggccggaggagacaagtttcatcgagagaaagatattttcagaatattaatatttgtattaaacctgttttgttttatttaattacccgcgaattgacgtgtcttttggactggtcccccaattccacgtgggaacatgtgtgcacgtgacggagaactagtggctgtttcaagtcaacaatatcgtcttaaccgttggattggttgataacgagagataatgtaacaactaacaaatctaatggatgttgatgaatataaataatagtatcaacgtacgactttaatggcggtcaaaatgtgacattgagacggtttcattaagtcagtttcagtgccagccagattcgacccgactcggtacggatacttgctcgacgatttatcattcgtttatcgactaatccaacgtttactactccttattcttcgtttgtttttaatgttcttcatgaacttaattattgagacaaagtgaggaaaatatggagagtgtgcttttgttcatgaacatgttctgatttggtcggtgataaatcttctgtatcaagaagatgtttacattaacttttcaaatgacaacatatgcgagaaacaaaacacacgtatcactcttttaacgtacgtaactgctccaacagatctatcttattctttatatacgtttgcttcttcctcaaaacctcatccgagtaggtgctggtgcaggtgacgagatcatctttatttagaataattggtgaggacctaaaacgaaataagcgttatcgattgattttagttttgtctctgaatccattttctctgctttgatggaggaagaaaaaactaagcaggtacttatctatattcacaattgggtagttacgtaataaacaagacaccagtgatggaacgaatttagtagagtaagcgagcccgtgatagaacgagtctaaatgtgattcatcgactcattcggagttatggtttgtgggacagtaaatatatatgctgagaaatccactaatctttaagaacttaactataaactctgtatcggatcattctttttattaaggtttgtgctaaagataatcgattctcttggacgattagtagaagggaaaaaatacgcaatggcgcgagagtgtgcgatcgtatgagagttgtaatcccacacgtgcggtctcccacgtttcaaaaaataacgggaaaaattatataaatcacgtagcatgttaataattaggacattatattaaattaacgttttcaaaaaaggaaatatagtgttattgaaaaacacatgtatgacatttatttgggagcattttgcaaagtaaatgttgctacctgacacgtcatatttgccaatttatacatctcttgtagattttcttaattacataaaaagataaactttcatatttgctaacaaaatatgaggggaaaaaatcagcttattgaacggaagatctatttaatattatgaaagttgatttttatgtaattaagaaaaataatcacataaattaataaaagtaaaaacaatatatgatgtgtcactttatggtaagtagtatccaaaataataagctaaagttgattttttttcttgttctgaaaagaagagagaaaacgctataaatagaggatcctcaccatcaacttcctccactcatcatcattcacagcttcaaattttcaatactcaaattaacaatggcgattttctccacatcacatcttctcttcatctccttcatcatagccacatgtatacataaaccatttccaacattttctgattactactttgattcaataatttatcttcataaaatatcttcgtttataattaattaattttgaattgtattgcaaggtacaatttctgtctccggtacaaccttcaccttaacaaaccattgcggctccacaatctggcctggaatcctcaccgcaaacggcgcacaactcggcgacggcggatttgccttagcttcaggatcttccgtaaccttcaccgtttctccaggttggtccggtcgattttgggctcgaacgtattgtaacttcgacgcctcaggctcaggtaaatgcggtaccggggactgcggcagcaagttaaaatgcgccggcgcaggaggagctccaccagccacactcgccgaattcacaatcggctcctccggaaagaaaaacgccgtgcaagatttttacgacgtgagcctcgtagatggttataacgttcagatgaaaatcacaccgcaaggtggctcaggggattgtaaaaccgcgggatgcgtttcggacgtgaacgcgatttgtccaaaagagctacaagttacgggcccatcgggtgttgcagcgtgtaagagtgcttgtgaggcttttaacaagccggagtattgttgcaccggcgcgtatagtacaccggcgacttgtccgcccacgaattactcgaagatatttaaacaagcttgtccgagtgcgtatagctatgcatacgatgatgcttccagtacttttacttgtactaatgctaattatgagatcagtttctgttcttaggcaaaaatcgcctttattattcattaattattattatttatcaatgaataaaaagattgatcatttttaacatatttttatgttttatttgtctctttaatctccttcacaaatacaaaaaggtgacgtttctaaaacaaaagatgagatacggcatgcatagccattattatcaacaaggaggagataatcaaagattatgtttcaaaaagaagatgaaactttatatatttgattgtttaagaaaaaagattattacataaaaatatcaaagtttatttgagtaaaatggtttttttggtaggagtttcttttttttttttgggtaggacaatttgtatttgacttgaggttaaaggaaatgaaagaaaaaagtgagagaagtgataccaaacatatttacattctaacaacataccggtcactccagatcgtatcagacaagatagtttccaatagggagctttagagagttatttggtttttttgatggtacttacattggctaaacaacagaagcaaagaagaaacaacatctaccctttagccaaacatcactagaagaactaaacttagcaagccacaaatggttaaacaagttgatgtaccgtacatacaggatttgttaagagtcagggcttttctttagctgatgcagttaagatcagtgtttctggattctttggattgaaacttgcaagccttcttcattctctttgcagcttggacaaaccccacaataacctgaagctcatccatttgctgtattcatttcacagttatttacaccattttattgattatcaggacaaaattaagacaaatccataacacagtgaaggctcagagatgttgacgtacctgagacatgaagtgcctttgaacaatgtcaattagttgctcctttgatggatttggaattgcatccacctacaaagagtttcttcagaagcaagcacatagaaaacaagattgagaaaacgaaagtaagtttcttctcttccttttcttctggaattcaacttacaaggttaaaatgtcgccaataattcagtaaagcaggcatttccaatttgctaagatcaaccttctgcttgaaagcatatgatatagcatcagtaaacttacgatttgttgcattatcttcaaatggaatagatgtcaaaaaatttgaatgcataccatgttttcaggaggagtaaaacccgaactttttgattgcgagtcagatgatagagacctgctcatcgtcttgtgagatgaccgagatgatctctgccctcttagcttcgacttatgaggcttcagtgtgtcctcagatgctggaaaagaaacaacttatcatagaaacaagtctgaaaaaaatcagttaaaagggttcccatcaaagaacaatatatcacttagtagctcacaggagactaaatcaagtttagagatctctatatcaagtttttgacaaattggcagaatcgttacaaaaataacaaggaacaaaacttactcatatcagagccattcctctgtgtgttttcgaaatcaagatcatcgtcttcttcgtttccagtaggaggttcaaggacactaagcgcattcctctgcaactttacttctattccatttgtcaaaacctacaaaccaaaaagcacaacaataattctgattaaatacttttaactccataaacaagtactgacattgattttaatacttcaactcctactgttacttccataggaattctgggagacaagaactggtggaatgtgatatcactaatagtaaaacataatcgtgatactgaagaaattcgtaaattatatggattattctctaaagtttaaagctagaatatggtgaagttactcctttaggtccacatacacagagacactatcaaaaagatcttgcagagcagtttataatataaactagccaaccaaagcataaagattttataaagaatagtaatcgacagaagtgacactgcttggggacgaaaatgactcaactaattaagaaagaacaaaaaagaagaaaaacctctaaaacaaatgattaacattaatcaaaagactaacaaatttcaaaaagccagcttggatccttaaggtggagaacaaaaatgtcaagaaatatgatggagaattagataacaagtgcatatttgttatgatgttttattgaccaggcgccaaaataaagttgcctcttttttggtttgcctaattaatgtttgcaaactcaaaaatcacttatcccctatagatgattccttaaattgagcctgaaactcagcatgaaacaccaaaataatcaaagataccaaaatgtttcagaatctttatttgatgcaaactaatttttaaagaaaaataaaaatcactcaagggtttcatgaataaaataactacctaagaaccataaatacaaggttaaacagtgtaaaatccagcaataatggtgacttgaatgctatcatgcatgcaacaagttcaatcgccagatttcgaaaattttacagatttaacatttggtaaatacaaaagtagatttgattttcgatcaaactaacaattcttggtttaaaattagatgcgaggaaacataattattgacttgattagtgaatctataactagtaaatcgaagctcatgaatgattatatctaatttaaagttgatcatgttgagaaattcaagggaaaaaaacccaaatttgaaatacaaaatcatcccaaaacccaaattatgttcatcaattgcaaacttggtaaatccagaaaacagagaacaaaacactagattagatcgaaatttaactataaatggaaaacggaacaggaaacaacaaagataacatttttaccaaaaaaggaaagaaatcaaataactttaccagccaatgccaaccaccgagaccgacagcttttttgacaacaccttgaagaccaacaagcaccgatttcgtccggttgtttccggtgaccaccacttttgtatgacgtggcaataccgataactcttcttcactactgcaatcgccgtaaaagctctgaatctgcgggaatcctccattcaccactcctgagctatctacagcttccagcattcttcttcttcttctctaatctaatctgattttagacctgaagaaatcaacagacccagttcgatttttttcagctttgaacactgatagaaaatcgaagatcatgcattgctgagagagggaaagatcagatgattgagcgggaaaagtggagagatatcgaagtaaaataattagggtttgtcccacaagaagaagcagagagagaagaagagagatgagagaagaagaagcagagtaaagagaaggtagaggaggagggaaagagaggatgatagagacaggtttttcaccacggggaccaattagaagaagccatgtcagcattgtactgaaactatatgcgttatgcaaaaacagaaccggtttttttgtttggatttaaccggaggggtacttttggtaattacagaacacgcgattgacctgaatggttgactggtgtttaataaagacagagatagatgggacccgtttttatttaaatgacggttatacccttagtcacgtaacttttttccatagtttgaatttttttggatcttctttgtccttatcttataattttctttctttcataattattgctctctccattactagatttttattattattgagaacaatgttttactttatgaaaaccaggttctcaaaacagcaaaataaacgaaacaagtactgcttagtaagtgaaataaatggatcaaatacagtaagataaacattgaacataaactttaaactcatataatggctaaaaagcaatcaaattggtcgatgggataattgggtatattagatacagaaaatctaagggatttaatgttgtgtctctttaatgataacactattaaacacacatcgatattatcatcaaaagagctcaagagacgcaaatacaaaaaccttttttcgaccgattataagaaggttttataaaggttttataaaggtagatgatcgatatgatctatgaatattttatctttctttttttgtgttacatacaatcatacatgattttcttactatatgaaagttacatgtttggatcaattatttgtccaaaacttttatcgagtcattgtcattgtcacagttaacaaagcccacccaaaaataaaaccgtccccatatttggggaaactgtcaaagcgacccctcaccaaacgcctgcttcaattattcgtaacttttaatgcttacccttactaccattcccctcccataaaaatcaaaattttcattcttttgttctttattgtttttaaacataaacctacgaaatctagaggctggaacaaaatccattaattaccgggaaattttcagaggatttgcactaaattaggggttacttgttacatttcaaaattaggtgactaattgtggtcaattatgaaaattcgaggggttaatgagaataatcctacacgtctgtctctatcgtcgtctttgagggttttgtttgaacaaagagactagagagtgttggagccgttaaatggcgaaaactgataagctagctcaattccttgattctggtatctacgaatccgacgaattcaattggttcttcttagacacagttcgtatcaccaaccgttcatatacccgatttaaggtttcaccttctgcttactactctcgtttcttcaattcgaagcaactcaatcaacactctagcgagtctaatccgaaaaagcgaaaacggaagcagaaaaactctagctttcaccttcctagtgtaggagagcaagcttcgaatcttcgtcatcaggaagcgaggctgttcttatcgaaagcccatgaatcttttctaaaggaaattgagttgttgagtttaacgaaaggtctaagtgatgataatgatgatgatgattctagtttgttgaacaagtgttgtgacgatgaagtctcttttattgagcttggaggagtgtggcaagctcctttctatgagataacactgagttttaatctacattgcgacaatgaaggttttttggtttctctatgtcacttgctagatcgtatttgaaacccatgaatttgatggtgttttgtggacttgataggtgagagttgtaatgaacagagagtgtttcaagtgttcaataacctagtagtgaatgagattggagaagaagttgaagctgagttttccaaccggagatatataatgcccagaaacagttgcttctacatggtttgtgttttttacttgtctgattttatgattctataaaaaaatggaaacttttagttgctgtgtgaaatggttcttctgatattacagttctttttaccatgttgccttgaagtctgatttacatcacatccgaaacctcgttcctggtaagtcttgtgctattgtccattatagataatttgctaaaagctgagattttagagtattctggttcttgttgattggtcctgagtcatgtgagaaaagatcagtcattatcatatcggtaggcgatgtaatagtcttattgatgtcatatatgcagctaaatctgaagaaggctacaatcttatagttattgatccgccttgggaaaatgcaagtgctcatcagaaatcaaagttcgttatctacttaatgtatgcatgtggataagtattttttgtatctgaaagttcatgaccaatgtttcttggttctttgttttaggtatcctactttaccgaaccaatacttcttatctcttccgatcaagcagcttgctcatgctgaaggagctctcgtggctttgtgggtgacaaatagagagaaattactaagttttgttgagaaagagctattccctgcgtggggaattaagtatgtagctacaatgtattggttaaaggtgagctcatcttgcagctctcagtccccatcttggtttctgagttgcacatatgacttgacattttacatacttgctatgtaaatgtttcaggtgaaaccggatggtacactgatttgcgacctggacctggtccatcataaaccttatgagtaccttctactaggctaccattttaccgaagtaagtcaattcatttttttgtcacttgaataatctgagaaaggaacttctgtttgaacagccatgttgtgtatacatgtcatagcttgcaggatcagaaaagaggtcagattttaaactcttggacaagaaccagataatcatgagcatccctggtgatttttcgaggaaacccccaattggaggtattcttatgtttatattttcaacagctttgttctgcgattggcttcatcaaattcaagagtagataatgcaattttttcaaattcttggtctaaagctcccctgattcttgtttgtttccacttggactttgtgtagatatactactgaaacacactcccgggtctcaacctgctcggtgccttgagctatttgcgagggaaatggctgccggatggacctcttggggaaacgaaccgcttcactttcaggactcgagatactttttgaaagtttagtgggcgcattccctagggtgtaaccaagaaaaaggctggcttgggccctcatgatcgtttttctctatgactcattctcaagctggggacagttaggagagaacccttggaaagaagtggaaggttcggttcatcgcaaacgacatcgtttgaagaagacaacactagagtaagcctgaaaaaagtatagtgttactaaagattattttgtctcagaactgtaccatcaatttagtaagctttttccttttcctttcataaacagatgatgtttcagataaaatttaaatatattatcagtacagtaagattacatactatattagtatcactattctgctattcactagatttctttttctttttcaacaaaatatgaataaaataaaggcaaaagcgtgttaaatataaattcaataagtgactactcgttggaagatcatatctgctttgatgggtctatttgtggggcaaatccactatccagttttccttttgtgttcaatgaactatacaattgtcaaaaaaaaaaaaacatgagaattaaagaaaatcatcatgaccaatgaagagcaggtcccaacaataattccgaattataggctctgattgttatagcaatcaaacaatatgcttacaaatcacaaaacaaaattaacgatatttccaaatatagagctttccagtttgacttaataatgttgtgtgaatatcctcacatttccattttcgactctctttagtaaattttgaagtagtagaatgatgtagaatgttttgttttatcaatcacacagttttgtgaaatcacgatttccatccactattcaagaaaaacatcaagtggaagaaataataaaccaaaaccatcgcaacaaaatgcatatcacgagtatagaatgaacaaactacactgtcaaatacttaatttaggacttaaacttcgctttcagacaacttggttcggaaacttgaccatccgtcatgttgatatacacaatccatctcaaatgtagtagtgaatcactatatcagcatgtgttatcaaacgcaagttgtcactaagatcggagcttctagttcaaaatgttgataagtattacgaaagtacaattgaatataccaattatacatccaaacacgtccatgcttctccactcgagttctctttggaaatctatataatccgtcggtttggtattttactagttgtacgtagtgtctcccctcatatgtattgagtctttatagtttgttgcctcgtatacgatagaaagtaaaggctaaaaaaccatactatttcataaagggtttatttagttaacttttaatctaaaccatgtatcactccattttacgtatattcgttttcacaaataatctactaaataattttgtaatgtgataaaattaaagaataaacacatgatacataaacagtcaggacaaaagtaagcactcattttcttctattcatactatagtgaaacactattttatttttatccatatactatagtgacaaattaatctaatcattaaatgttatgaggctcaaaacaatttgttttcttatttaacatggccgatcccctcataaaccaatcagatggtgtgttttccggtcatactcgtgtaggacccacttcattacaatggccccacatgtctctctatctttttctcctctttataaaatcagctccttttcttacacagatttagagaaacacaacataaaacgtacttcttcttcaaaacgcgaaaccacactgtaagttacgtacaccaccacctatcctcaccattcatcatcgacacgtggctggtttaactcaaatcaacggtgaattctttttgcttttttattttaaataatgaatgaaaagattcttctataattccagcgaagaagaaagaaaaaaaaaagcgtattcctcgtgagcactaacttctcactcattcttcttcttcagctgaatccaaatacccatttccatttttaaccgtggttggattgttttgagagttgaaggaagaagatgacgtctgacggagcaacgtcgacgtcagctgcagctgcagcagcagcgatggcgacgaggaggaaaccgtcgtggagagagagggagaacaatcggagaagagagcggcggagaagagctgttgcggcgaagatttatactggtcttagagctcaaggtaactacaatcttccaaaacattgtgacaacaatgaggttcttaaggctctttgttctgaagctggttgggttgttgaagaagacggaactacttatcgcaaggtcagtatcaaacgcatttttacttagatctgatgttatctgatgatttagctgttgaatctgaagatttggatttgaaattggtcaaattgggattttcttggctatgaattcgaggtttttagctgaggaagctcagttttattctaaaattggatcgagattccttgcggagaaagtgacctttagggttcttcttactaatttgagaaccgaattagctttactttcacttggttactatatttagatctctcctttagcttttgattgattgtgacattgtgatgtttttggtattgttctatgagcaacagggacacaagcctctacctggtgacatggctggatcatcttctcgagcaactccttactcttcccataaccaaagtcctctttcttccacttttgatagccccatcttatcttaccaagtcagtccttcctcttcttcattcccgagtccttctcgagttggtgatccacacaatatctccacaatcttccctttcctcaggaatggtggtattccttcatcgcttcctccacttagaatctcaaacagtgctcctgtcactccaccagtgtcatccccaacttctagaaaccccaaaccattgcctacttgggaatcttttaccaaacaatccatgtccatggctgctaaacagtcaatgacttctttgaactacccgttttatgcggtgtctgcacctgccagtcctactcatcatcgccagttccatgctccggctactatacctgaatgtgatgagtctgactcttccactgttgattctggtcattggataagctttcaaaagtttgcacaacaacagccattctctgcctctatggtgccaacctcgcctaccttcaatctcgtgaaacctgcaccacagcaattgtctccaaacacagcagcaatccaagagattggtcaaagctccgagtttaagtttgagaacagccaagttaagccatgggaaggggagaggatccatgatgtggctatggaggatctagagctcacgcttggaaatggtaaagctcatagttgagatgaagtatacatgaacctgttatgtcatgtcggaaggaaggattggagaatgagaattagtgtgttgttcattcagttcatggttttggttcttgttctagaatcgatattcattgtaccagtgagtttgtttcacaacgcattatttgtagatagaatgtttaagatgtatgtttctattatcattccttttaggtcttgaaaacattacaaatatattacatgattaagtggcttgaaatgtaaattatatatcggatgatgaaacagagaaaaacaagtgaggctaaaacaaagacttgggatgtaataacaagatcagagaggttaagaaagaaaaaaaagacttgcgattttagccataagatacacaaaaattcataatacaaagaggaaagtagaaggcatgaagcagtaaacattggaaaagggagaaatatattagaatcacaaatgtcaagaaactcggaaagttttttttagcctatctgcttttcaggtgaatcattcagaaccatcggggaagctatcaagcgcgtcttgcttaccgttaacgtagaactcaacgacggcttgcattctattgagcttatctggatggtaattcacatgaacaatcactggtttcactttcttcttcagttcatgattctttcttacagtcttgaaaaggaccttactgttcataaactcatacatatccatgactctcttggatgcatgtagcgcagtgtactcaggatgtgaaggataaaacagttcctcgttgaaaaccgcttggtcccacactttagccttagagagtctatctgccacgcgatcaagcagctcgattgatggaattgtaggcctcaaatagaaaaacccggaattgaaaacccatatcctcatagtgtgagcataccgagcccatcccatggctggttcatcaaacacatcattgaacccataagccgtatgattgtcatggccatcactcattgactccacatcagagtctctgtatagatgactaaatgggttctgcaagaagacaatgtccacatccgagagaagaacaccataaccgagttgcaagaactctcttaacacacggaatttcaatccagagacagcatggttacctccagttttcccaacagtatccacgtccttgtctggatctctcttgtaatacgcaacatcgttctctttacataaattctctatgtaatcgtccaaagcaacaaccagatagtttgttatacccactctcttaatgctagcaatctgaacctccaacattgctttcacatttgcgtttgcaagagctacaattacctctttatcaacagcaatctcctctagaatctttgccaatcttgggtttatagattcatcaggaagaatagttggattagttctcagactcttgacagttccaaaaggaccagccttgatctgtgttcccaatgctagaacctgttttcttgcattgtctgatccttgctccgctaaccgtagcttctctgttaactctctgacctgcttctttaactctgcattcttctctgagagagttacaaagtctgattttagcattttcactcgttctggcgattcacaagctgatgatccaacctagacaaagcaagtgtggaatttataaaccactcaactaaattccaaattaagatacaaaatccagtaatcaaccaaaccagtatcatgataaacttcaccctaatctccaactaacacatcaccaagaagaatttctatgtttagacactaaccacttaataacacctataatggcagagtcaaacatcaatctatgtaaaactcgaccacagaaccacaaaaattagagctttagaggtttatgtagtacctggttgcttgacttcgaaagatgttcgcttgctttgagagatgagcttgagttgaagaacccgtaagggaacagaacggcgcacacgcaaccgataaagataccgatgaggatggcgatcgcaattcgagatccacggagttgttggcttctatctctacgacccgccatggccgttgacttttctcttccttatagcgaaatcagaagccaaagacccagaagctcaaaatgaaaaaggactcctttttgatcacctagttgaagaaagttttggtaatgtggtggatcagagttaaaccctagaaatgttctgtttttcttcggaggtctcggtcatacctgccggcttttgaagttgttgagagaaagagagagcttgtgtgtttggcttcgtctccgaagacgacgacgatgaatcaaagctcgaaagtaatgttcctctacttcacacgatgtagattcctttctgaaattctttagttgaagatgaagtcttaaccgttagatgacatgactatttcgctgactcatctgacggtcaacataacacattataaatcgagattaaggagaaaaattaaactcaattatttacccacttgctagcacgatcacatgagacatgatagaccaaaacacatcttgactatgattgagattaagttgttttagctgtcaaacaattattctttgaccagagtttttgtattcgaaaatttcaagagacttgcgtttatataaagttaaaaaccgaacgaggaataataaaaccctttagcgtttatataaagttacaaagattacaatttttgaagtaagtggtgattaacgtgccagaatttgcaagtaatccaaagattctaactttcgttatccaaaactttgttgttaccaaacaaatgatctcttctattaccaaacccgtttgaatcaagacccgagccaccaccgcgataattgttatgatcctgtgcggttgttctatagtttccatcaaccggagctcttgaactcgggtcgttagctccaactgaccggtatgagccaccagcgtaccttctccgtagatccatgaggtcatcgtttcttcttgaaggttcagtaaatgttggctctttcgccgaactattttgtgcgccggtcggggtaaaaggatcatctggtccccatgcagtgagcgattctttcttcttggcaaagaaatgccaagccccgaatagaaatagtatgaagaagaacacaggactgctccaaagcattgtgttgaagtctcctttgagagttggcagcttcgatttgtaaacagcgaaatatccgttttctaaaccgatcacaagaaggttttccctgtcgctagctattaacggcctagtctttactactgtggtggttcgtgaagatgattcgcgatggctcaagaacgcggatctgatctcttctaatcccgctgagaacaaaagccgaggacccgcagtacgaacataatgctgagtcgatacattgaaagcgaaaaccttttcttcgttgataactagaagatagcctttgattgattgtaaagctactggctcctccatttgaaacttcttcttggatctaaccctacatttgaagttcattatatctccatgaagcaatacgtgaatgatctcgccctcggatgtgaatccataagctttagaccgttccgcagcatcaaaaacataagttctcgcaagcgaatggttcagtccttcacactcagtttctcttatcttcatgcttcttaagtccaaggaaccagcaccagactcagtaagaaacaacaatctctgcttcaagaacacgagcggtctactcgatggaataaccgacccataaaccgtcctgttctcagttaaaaccgtgagcttcccgcttaaatcagtcgccaatatatacctaacacgacccacatgatgcacttccaacaaagtcacaggatcagctgaatcatccacatcaaacttcccaacatgttccatagaaaccgaattcgagttccaatcttcgccattcgatccctcgtgaatccgatgcaacaacaccgcaccgttctgatgacccgtaaccacgaaactcgagttcttaaacacagatgaatacgaaaccatagcagtaaccggagaatcaacagtggtgaaaaactcaatcaaaacatcaccatttctcaagaacacataaactctacctttagaatcaccaattgcaaagtacttgcttgaaccttcgaaatctctaaacggcaacacattgatacaagtcgcatcggaattgagtttcacagctgatgtaaactgaaacctctccgaccaaaacggactgtatttagtcactgaaaacgccttagcccttcctctctctttctcttctccgatgtcatcatcaactgagatctcgttcttctcctttaatggagttgcagataacttagcatctagattagcgactaattccgtcagattcttaacgagttcctctaaattatgcaatagaacagcttctcgattggtttcgctaacagacacagcaacatcggtagaaacatcttcgataaccggagactcggtggcatacaacggcgaaatgaaaagcagagtgaaggagaataaaagggagaaacagataaagaaggacttgccgtttagaggatccgccattacagtaatgggaaaagttaaagcagaaagctttcttctttttcttctcccgtatctgaatcagtacgtaaccgccatttctgcagatctgtaggagatgaagattttaggatctggaaagagaagaaagatctgtcctgttgaagtctaaaaactcagatttttatgggtgaagtaagaaatttgataaagcgtcaaaatttgagatctttgtgtccggaatttgctccagtcgtcttcgggccacggtgaagagttgtcttaagatattttaaggaatatcttttaacattaataattttaacttgttttgaaatatttttctttctattaaacaattgctaatggatgtcatgactcaagactagcatagttgatatttgatatccagacggaaaaaaaaaaacgcataaatcagctggatcaaagaaatacctttttggtgaatacataagttttttttccgcagaccacttaggcacttatgatggcctaacatagaaactacacatgctgatcagtgatcaaagacaagatccatagattctccacgtgaagtttcttggccacagtgaagcaacgccctcgattattcaaaacacattgtcccaatgcttatacattgacaaagtccactatgatccccaaatttggaggccaaacaaaattgattatcactgtttgttgtgttaagtttcccaaaaaagagaaatgtgaatgaagagaatgagaattgtttgaatagccaaggagactgcctgacgaccaaccaactctaagactatcgatcgagtgagtctttgatatatatggtctaaaacgcaggcaagtcatccttggctaccacacaagttctcattcttcatgtcaccattttctcttatatgatttatgtatttatgaagaggttgttgatgagtatcccacaagactactatgtgtgttatataggcatgaccgtacgaagatggagtggacacaataagtttgactcaacatgtgttcatggccttggaatatgttcttaaagatttggatatggtcttagtatcaaacacacttggtgaaccttattacaataatatttgtatttagtctttatgtatattactgttaatttttagttagaagaatgttttcttattttatttcgttgtaagagacgtaagcttcaatttttctttaaaaaatgtaataaccttcgtgtgttattgaagtttctctaatttttggtagaatgcatgaaattaaattcaaaactcatatattttcgggtattcttaagaccgacatactagcatatcacacattaatatactaaattgttatttttttctactcttcttccacaagttttttttaatcactcaaatggcacgaaatatgctttgaaacctaatcatctctatcgggtcaatacccttttcttactagttgactactagtgtttgggaccatataggaaagaacatttataaaagtcatgatgccatatgaatttgtgtagtaaacatggaatatattgagctttttgtggatatatttatatgaaaatataacttctggaatgattcttttatctatccacgagagatgttgggaacgaaagctgctgcccatttatataggataatgttttttccctctccgacttttgcatatagggcattatggcttatctgagtaatacgagaacaacaagttagcaacaccatcggtcaattatttagctactacactatttacaccggtaaaaggatgttgtttttgtggtatagtagagtctttataggtatagtcactatgaatgttgcagtcgtctagttgttttaccgcactgattgagataaatcgatcgattattgttgtacacatacgtcaatcaggagagattcaaatgtttaatgggtgacaagtctatacttgtcccatgaaatccaattaccaaagattgatagtccaaaaagtactaaacaaaacccaaaaggtcgatgatatacacttgatggttttagtaatcgaatattcgtgctcagtccagaccgaaccttttacatatggacgacgattctctatggatttgttttagccacatgcttataacaatattcgcacatttgagggtttgagccaatgttgggtcaaacatgttgggctctttaaactccttatctgcccaaacatgttgggctgaaccttttctgagtaactctagcccgttaggtcattataattatagaaaaataaaaagcaaggccactataaactaaaccctagtccgtcatctcttcgctatataaactctttagacaatccagcatccaaaacctcctagatcgctcatagttctcctagatcgctcatagttctttcatcaatttgttcggaagtgattgctttatgtttatcattgttttgtacttgatagattttaagaaattaggggtttatgattggcaaatgatgagtagaatcttatcctacacacagatgtatcagtgttgactaccaatctctgcttattatctgatgccatattctaaaccctgttttcaaaagtttttacagttaatccgttcgttttcaattttgttccagcgtttttttttaaaaaggatcttctgggtaaatgttggtttttaaaataagttcttaattgtaattctctttttattcctgtgaaaatgagaagaaaattagaacaacctaatgaagaaacaatgatgagatacttgcagacgggcggtctgaaattgatgtcgtgttgattgtctgccataagctacataagcattctctgagtttctcattcactcgtgaacacatctgttatgtcttaaactgttgagattgtaatgaaccagtgaattagttaactatacaaagagtagacacatacatctttggacaggtgtaacctcttttaatatgaagaacggctacattgaaaaggatgaactgaagtaaccgtaagccaaaacatccaatgataataagacttttgttctggttattaattagtcttataatcaataattctacagttctttaattttcgtttccaagttccaaagttttaaatcattagactttggtcagactataaaacgtgttcaaggcttgtgtttgtcttttatataaacgtaaagactgtttggacatgaagacttatttatccaccgtctggattatctacacacctaaaaaaatgatagcaatcgcagccataataagagagaacgcgttagtaaaagtcaacacgaagtcaactcctttgtggcttttagcccatcccacttggcgctatttaagtaaaatcccagtattaccaacttcaaaaaagtctctctttcacattgatcctgtgttttataaaaccgaattttgattcagagatcagctcaaaaatgaagtttgatgaatcgaaaacgctcttaccggtgagaaaacctgtaaatggcaaccgcaaaaccgctggttacaagctttgggttctaatcgctgttctactcttggcctttggttctatgttaaccggttccgtctctctcaaaggaatcggtttgttccattctgctgacggcgttaacgcattctctttcggcgatgatctcgacgttctggtacgaatttattcataaattattattgatttttgttttcttccaaaattggtctttcaaaattttgagaaattttaaaaattctgacaggaaattgaagagagagagaaagtggtgagacagatgtgggatgtgtacggacgctccggtggcgttaaggttcctcggttctggcgagaagctttcgaagcggcgtatgagtttctcatcagtgattccgccgccgttcgaaatgctgccgtttccgatatcgcaaagttgtctcttgttcgttttgttaagtcagagtctacttcggcccagcccaatcttcattgacttgtgaagcccatgaggatcacataagattttaattgtatataggattaaatattaaataccgaatatgtagccttaataatgtattgagaaaataaagaaatgaaaaagcatgaattgcttcgttcaacataattgacaaccaaattgtgttctctgtctatttgaaattatttaatttctgagtttaatcccattgtttatccaagataaatattaaatagttaaccaaaatcccattctggtaacctatatacattaggatcccataactagttcataagaaactattttttattttttattttaaaaccacataacctagcaaagtgaagagaaaataataatagaataaatcaaagaaaaaagttcgtacaattttttttggtgaatataattctacatttatcatacgctttaaaactagtattacacttgcaaatcagtttaataaactatttacatcatctagacatgctttgaacgttttatcaacctttttgtctctaatgaattgatcctaccaaaataattacggttagacattcaaaattaacatctagtattagtaagaaaacaggtaagcgatcactcacactatcctccaaatcattatagacaacgaaatcgaaatcgcttgagagcctttgtgttgcatctttaagaaaaacttgaattaccgagagtctacccctaaattcaaatttatttactctccaaaatcggatttaaaaactgagatattttacttattatgttgttatctatttttatatgattggcatttgcacatgtttttttatttgagcttttaaactgaaaaagactagagttacacaaaaatagggaggggatcgtatgatatgattactgttttctctaaatgttattagagaagctcaaataaattgaggtgtaatctctggtactgatattttaaggtggttgtatacatgtctgatccttgacatattcatatgaaacataggtattgggcttcaaattttttaagcccattttgtggggagaatcttttttattttggaaaaataaattaattaaataaacctcgtaattaacaaaaagtcttcttaattaataaaatagatcctttagttaagcgaaaaatcaccaaaacttagcaataaggccacataattagcaaaaaaatgctcatacttagcaaaaaaaaaagcctcaaaattaagaaaaagtaataaataaaaattatgaatacctcataattagcaaaataaaatagtagtttttatttgaaaaaggctccgtattttgcttcagttactgatagacggaaagtgcagtaacgtctgcgagagtggatgatatagaaacttattgtattttgtgggtgatgagtgagtgaggcactcaataatcaatcagtacaacgtgtgtaatcatggttaagggagtaataagaattagggttccttactctcgttgttatcaagttacccgattgaaaccacttgtgcatggtcatgatggatgtgcagttttcctcatggttggaagctgtgtacgaggttgtagccatattgtcggttgtgttcaacatgtaaaaagatcgcttcaatctaatttgagttgctattcagacgcatagaagccaaaaataaaatcttatcgatctcaaagtggaatcaatgctctaatgcaagccaatggagccaaaaaaattcaacttagaatttgtagaccagtctagttacagagctagtttgcaagttctcatcagccaaattctaaataaaaaaagaaactacactctcattcctttatttacagcaaaacaaagaccaacatatccacacaccaaactgtttgattcacatcacacccaaatacaaacggtttaaaaaagaggatgctttcaaaatttcaaggtaacaaaaagaggtgcaaatgtatatattactaaactagagaagcctcctcctgaaggttctggtagttgattgataagtacgaacgagaagaccgacaccaatcccaagacaaacacagacaccaatctctttgtaattcgtgtactctgttgcttgcagacaaaaggaatgatacttactgaaaaaggaatgatgatttctaaatccatgtggggtgaggaaacaatggttgaacatctgaggaggaagacgaagccacaatactaggggctggagcagtaacataaatggtctgtgaatcatctatgtttatcatagtcattccttcttcctcatcatcagcaccatcgtcattttcaatatttaccaatgaatcctcttgagacgcaagtatcttttccaagtcggtaaacacttttctcatacatggccgcttctttcccttagaattcaaacatctccttgctagatttgccactgccattacttgttccggtttgcagccatctcttattcgagcatccatgatctcaaagaatctgttctctttcatagcaactctgaaatgatccgctagacctcttatttcttgagaattcgaaacggttattacaggcttctctcctgtaataagctcaacgaggactacgccaaaactataaacatcactcttatcagtatattggctagacccgtagtactctggatccacatatccaactgtacctgaaataactgttgtccagtgagtatgatcgattgttactgatcttgaagtaccgaaatcagacaccttggttcgatacttctcatctagtaatatgtttgttgacttgatatctctgtgataaattggagagcttgcagcagagtgcaaatacgaaagagctcctgcgatatcaactgcaatgcgcaaacgcatgccccaggtctttgtgtagtcatcagattcttcgtggatatgctggaaaaggttaccgttggggataaactcataaacaagagtaggaacttcggtctcaaggcaacatcctaggagcttgacgacatgtctatggttgatctgagatagaatgacgacctcgttgataaactcctctagtttgtcttcatcaacaacttttgatttcttgacagcaacagttctaccatcgacaagcattcctttgtacacagtgccttgaccgccctgtccaagtatcctgctttcgctgaagttatcagtggctttttcaagctctctcgagctgaatattcgtgtcttctcgacgttgcctttatttgtatttaattgttgttgcaacaatagtcctccgttacgtttaaagaactttcttttcctcttactcatccttctcttcttaaggaactttctcaaccaccaaattccaaccactaggactaagatgccaaaagcagaacctactcctgaaaaccgtacaaaaagattgtatggatatgttaatcatcacatgtttcctatcatcacgatgttaactaaatctaaagatatattcacactgtcttacctatcattgttactctagtcttattgccaatgcaattaaatgttccgggaagattcacacaagtatcgctttctctacaattttggcgttgtccataagagttacgtaggcactcattaatatctggatagtgaatacgaaaggtctttaagaaaattgtgaaaatacactccgtacaatcctacgtactctgaggttaccagatgttttacacatagaataagagaggactttagaaacaatttaactgacctttgcatccgccagggaggtatgggttaccttcgtaaccttgggagcatccacagtttgcataatctgtcccagaaatggtgacattgttgcatatgcaacttgttacgagtttaatattatacgtagagttatcgtactctttcgtgtttttgcagctcaaggagtttacaaaggagagattcttcgtctggatgacccatcctaaactaactgtagcatatcttttagcaaataacctttttggttcgcttgcattcgaaaacggggagacgtcatctgttaagaaagcgactctgcattctagttttgtcgagtttccatgatcaaagctctctatgttgatgccgatcacttgtggagcctcagaatccagtagacctgcgatgcagcatccgttaccatcacagcttctttcatcttccccgttgttctttgtacaaagcgagctgtaatagggcaacttgttgtttgagcaaccagttttgtcgaaaaaaggaatgcttttacttggcaacgtctctttgcttgcagtgcaattcaactcgcatcccaccttgctcggattgatgttagtcaacgacgccttgctgttgcaaccaacagcaaccaggctgtttccaatcccaaagtaaaaaggactgtccgtaaaatttagaaccgatccagactcttttccatctctcgaacatccaatggatgttattgggattttgacacgaattgatccgtatgacacaggattattataaccatcgtcacctggaagagagatattcacaactgccatgcccatcttgaagaggaacgggtaagtagcgtttttgcattcgattttgtaccattcattgagataacaacctttttcaattccaaaaggatatgggatatttatatttccacatacggatttggattgacacgaagtcgaaagagagacaacttttgaatcaaggatgagtataagcagaagagagaaaagaatcgagaaggagtaattgttgtcgcacctcatgatgttgcttgtcttgttggcgcagaccttgttccttgctaaaccagcaaacctgcgagtgaagtaaaaaagttccggttacttgcaacaaaagttacagaacaattaacagatatctcagaatttcataagaaaagtttgggtattgtgtcggaaacagttttcgcccgcgaataaatcagccatctgatagcacaagctcaaaagtcaactccattgttttaatatatatactataagataataaacgcaagcaaccttttagttgcaagtttcattttagtccctctcaaaaatcacattatctcttactcttaatacttcttaatgtcttagtagcagttaattaagcactagtgtcacacttagaaagaaaaagaagaagacttttccctcagggagattactcggcaaattttgatgataaaattatggttgaggaaagtctgcccaattccccactactaataaagtctaatggtcaatatttcctctaacccgacgaacttatttcctcttacccgacgaacttatcaagcaaaaataattgtatgggccactaagtaatgaatatatagaagaaaaacggtgttaaaaatgaaagaggtgagggttgaacacttgaacctctatgttaagtcagagtcccaatcttcagtgtgttgtgaagatgaaagaaaggccatcaagaaaatttcttgtatataagactaaatattacatactgaaaaatgtaatcttaataatcgattaatctgtgagaacaaataaatgaaaatgcataaattggcgttttcgttgaacattgtggaggaaaaatagctacctgttatgaataaagatggatgcccattataaggccatcatcgaagtccatcatctagatgtttctagggttttaccctttccttgtactcctatataaagaaccctttatctcaatggaataacacactcatttcctctatctctttctctgtttataacacgttatcagcacgctctaaaaggtagatatagagattcttacatctttttaagaaccatgtttacttatcgactcatggttcatagtacttattttctattattgaaacaaaacaatatgagccgatcgatgattatagtatagatcggtaaaagcatgttttcaatgattcaataaagaagagaatcatgcttatcatttgtttctataattactatcgcatgatttaatgattctacaaagaaaatcgttaaagaagagaatcatgcttgttaattgttaatttttgtgatttactattacaatattgaatatataaattaccaattttataattatataactaattttgtaactattcatagcccggtggtgggtgatgcaagcatgtattaatgttttagcattccagttttgaatagttgcatctatattcaatatcattttataaatattatattgtctaaaatctatttatgattgatatgatatcccttatttaactcctttgattaaaactttatacatatcttatcacttttagatattgacttttccatattaaatatttgatttccatatatttgattgtattattattatttttactaaaaacgttgcaagataatttttctttttataagattccatatatctaaatctttgtgttattattatctaaatctttttataagattttcatatatttgattgtgttattattatttttactaaaaacgttgcaagataatttttctttttataagattcttttctctaaatctttgtagtatctaaaaaaaaaaaaaaaaaaaaattgttcatggttttgccctaattttgcacgaaatcattttacccaaatcttgcacgaattcatattaccctaaataaaaattttgtcaagatatatgtaaaatccagattttgcacaaaatagttttattctgattggttttacaatattgcattaaaattgtattagtatataatacttgattattttatgaaataaattgattgataaataacttaatttaaaggtataatcacttatagaaattttcatgaatgactagtttaatgtatcttaagaagatatcatatttttgatggtcaaagttttttcaagaacttaaattatcaccagaagttgagaaaataaatatggtaaaaagaaaaaagaaaaaaaaaagaaaaatttctaacgatgaaataatctagtatatcaagtagtataaactcttattaaaagactttagatgagcatatacattgttttctatgagaatacaaaattaaaatcatcgatgcggtataattctccaaattttaaagttaatatgatgagatataaaatacattatgattatagagtggaattaaaaacgagatggatgaacttgaagtttcatcatttcgagaaggagaagtaatgaatctcacatggataataagtgacatatccagaagattatgttcaatctttgactactaaagatctaaaagttgtataaagcaattcttatacgaatgtgttattagataaaataagttataattaattatttctgaaacttcaagacttgaagtctctttgtgaatataactcacattgttaagagaatatctatgatgcagagatggtaaaacagacgcttaaacttttacgcaagtattgttgtcctgtagacacaatattttgaaagaaattttgagaactaatataaacttaaatcgagtgtttttcaaaggctaagaaaacatatgagttatcgatgataagtaatactcatattctgaagtgaatataagatcttacatagttagtcaaatttaatatcgtttatactagaatataaaattttaattattatctcgttattgttttattaacatatgattgattattaaaatacatagaagtaattttgattataagatctcattaagggagtaactgataagcaatgaaaagtaaattagaagttttgaaagaactagaagtttcaaaagaactaaaagtttcaaaagtatatttggcttaaccggattggtcatcctggtttaatgatgatgtgaaagtattgagaattatgtggacattaggtgaaaaaccagaagattctccctaatgatttatcaaatgttacttgctcagaaagcaatatgataatgtgatttttaccagtgtaagtaatttgaactttatctattcgtaagtatatacaaggagatgattatgggttgatcacccactatatgacatttagatacctaatggttataaaagatgcatcgattcaatggacgcattgactcgattgttgcatcgacaagaaggtcatatttatccttgttataaacctgcaacatagagtttgcgagattactttcttgattaaagtacaagagtatttcagtgtttatttataataaccattattggatatccgttgggataagtgtttaacattttgaaattcatgttcatacacaaaatggtttagtaacatcgatacgcatcaagccaatgaataattaatagttttccccattattattggttttgggtcagaaaccaaatagttttcatctaaaagctttgaatgtgaaaagtgctccaccacagcacgcagagatgaaccctcaaaggaggataagaatacatgttggatatgaatgataactaagccatcctagaaggatttatataccgctcgttttgaagactatcatattatatagtcagctattccaacataatggggagaatgtatacagctggtgaaaaagataaatagaaatgaattatcaatgatcctcggagtaaagaatgtatattaagagtccaaaagataattcaattacagaatttagcattgtaattgccagacgcatttgctaacccaaataaagtgatgaagtcacttataccagttgtaaattaaatgctccagaatataatgaatgtcctgtaaggaccaattttaaactgctattgagtcttaagatcgcatgaaacgtaatagaccttggttccaaatataaatatcctcgtaaaagtgaaggagcacaaaattaagaatgaccaaaattgaggaaataaatattttgatgatctcttgaagagagtgaatgatctctaaaagagacataaacatgacaaatgaaacattcaagtacttgacaatgacgagatctagctagctatgtcatgtcaaaatataatggaatcaaaagcaaatcgacgtcgtaatatatttgcatgctatgagcagttgatattatagacaaaaagaaggatcatgaaagaaagtctattgaaaagtgtacacaaagtaatgattagccaaaaatggaaaagaagaaatagacatataattataatctctagtagagatatttggactagtagtctatgcacatgatgtgtaaaacgagtggaaaataaatgagtctttatgtgaaagaatagtgaaattaatgagattttcacaaagataagaaatgtattatgaagagatatattctcttgtggtggatataatatttttttttaagtatctaaagtctgacaataagagacggaacactggatatgacatttatatgaaattcttgaaagatataatctctgaaggattaattatatgagaattatgttctctagaactctactcgatcgaataaaaagaaatatataacatggcatataatcatataaatgtatatttatgttgagtttgtcaaaatatattgatcaaactaatatttgttttgaaaatcattaaaactcctacagagttatcataagtaatacgatgacaataatgtatgataaaatatcactagataatgatatttataagtctatatgaaaaccaattaattttgatcattaagattatggttattaattccaacgagatattgtatttgattgaaaatcatctcctgaagaagatgtttccgagggggagattgaatgatatgcgtgtatgtaccctttttccttataatagtttttatcccacatgatttttttatgacaaggtttttaacgagacattaaagaacacgcaaataatacacttgataaatattaagaaattctatcaatcatccaaatgaatattatacactaatgatatttagagaaataaataagatggtcaagatgaatcatctaaaagattcatgagctgcagaagaatggcgttgtactttatctagaaatttgttcaagagaagatttggcagacttattctcaaatactgtttattctctgccacatcttctaatcatgcagagattttaccaattcatgaagctccccgcgagtgtgtatggctaagatccatagttcaccatatacaagaagactgtggtatgtatgcagggaaaaagactctaacaattatgtacgaagacaatgcagcatgcatcgcacaactcaaagacgaatacatcaaaggcgatagaacaaagcatatcctaccaaaattcttcttcacacatgatctacaaaagagcgacgatgtacaagttctacagatccgttcgaatgataatctggctgacttattcaccaaggcgctaccaacttctacttattcatcgtatcggattacgccgtctcaaagatctcgacgaatatactcataagggggagtaattgtgtgttgcactctttttcccttaaccatggtttttcccattgggttttcctggtacggtttttaatgaggcaacatttcaaatactttacgagttatgatactataatggtcatcaagggggagtgttatgaataaagatggatgcccattataaggcccatcatctaagcccatcatctagatgtttctagggttttaccctttccttgtactcctatataaagaactctttatctcaatggaataacacactcatttcctctatctctttctctctttataacattaccaaatttatttaatttttgatttttatcccattggtttagtcaagataaatagttaaaagataattagactatggttaaacttaaacacattagtaggatcctatagttaattcataacgagaaattatgacacgtggctctgtagcattggtgaatcttgccaacttatcacgcgcaaacatattaaccgccttttctctttgtgtttcatctggaccgtcgattgatttagacttaaacaaatagcaaccgtaggatctctccgaaatctaaatccgactaggattttgccaaatgaaattttaattaattggtccgtagtttaattcgattaatccgatgatccggtgatccagaaggtagtccggttcactgtgtgggtcggttttaaaaacattggattttgggttttgcttccctctatatatatacaaaaaagatcgatgcctgttcggtatcctttttttttagttgcgatgattgtttagctgagtttcttattgcttatctatatattatgtatcaaatctccttgtttgatctatgatcatctttctagggttttgctcgatttcccggattcgggtgggaaatcatcatctgatcgattatcgcggctggacatggaggtacgttcttatatagggatagggtttctagatttcgttattacagtttatgaacctgttgggtcttttccatatatgtcttgtagaattggattacttgattgtgtttggttcgtataaactctgctaactcaatctctgttcgtactctcgtagggatttatacggacaaaacaacatctcgttgatcttaactaatcaacatctcgttgatctctatcttatcaactcctcgttgatctctatcttatcaactcctcgttgatctaactgatcaattctcgttgatctctcgaatcaacatctcgttgatctaactgatcaattctcgttgatctctcgaatcaatccctcgttgatcttgttaaatcaattcgttgctcagtaattagaattctgtgtacgcatgagaaaagaaaggattttggtccggttattttcatgtttctaattgcgattaatttatggctgttgctctcttttattaacctttgaatctccttatctaggggaaaaaaacaacatctgatcaactctcattgatccaatcatcaactctcgttgatcatagccacttatcatcaactctcgttgatcataaccacttatcatcaacgcttgttgatccaaccatcaacgctcgttgatccaaccatcaacgctcgttgatccaaccatcaacgctcgttgatccaaccatcaacgctcgttgatccaaccatcaacgctcgttgatccaaccatcaacgctcgttgatccaaccatcaacgctcgttgatccaaccatcaacgctcgttgatccaaccatcaacgctcgttgatccaaccatcaacgctcgttgatccaaccatcaacgctcgttgatccaatcaactctcgttgatccaatcaactctcgttgatccaatcaacccctcgttgatcataacctctaatcatcaacgctcgttgatccagttatcaactctcgttgatttaaaagagaaggaaccttgattttagttagtgttatctatctccatagattttaacacttgtacaggttttttgtttgagctttcaaactgaaaagaaacagatgtaccaaaaacacagagaggggattttgtacatgacttttgccatgacaggtgcgcttgcttggcaggtcacaaaccctttaataaaaagatacagtttttggtttcgtggagggatgagggaaggtacggggttggttaataaactttctttgcccggctctctctccctcctgaatgtgtgtctactgtcttgtttcatatgcttcttgcatactacacagaccacaattattgaggcatcacttgtgctctttaatatgcttcttgcatgtgctatgatcgaagaacattgagtttctaatgaccaaggtattgattatgttttcttatcctgttgagatgtttaatctgtttgctcatattttttcagaaacagagtgagcagggtacgttatagtctcattcaaagtaggacaatggaatatagtctaacctgaagaattgttaggaggttggtccctgtggaattgcgcacggattgttggtaaaaactatcttctaatcgtcaggttttgtctgaatgttacttgtcctcattacttgtatattcgctaaaatataaaggggatcaatcagctcaaatgtggaaggaatggaagagaaagagataaacagtaacgtcggtgagagtgggagataaagaaactttttgtatcttgtggatgatgagtgagtctgacactcaataatcaatcagtacaacgtgtgtagtcatgggtaagagtaataagaattataattgctaactctggttgttataaggaccctattgacaccacttgtgcagaatcatgatggctgagcagttttcctcatggtggaagctgtgtacgagggtgtagccatattgtataggctgtgttcaaccaataaaaagatcgctccaatctataaggatttaagttgctatcaaagtagaatcaacgttctaagacggcgctgaagttaaggaaatcaaatgataatttgtagaactgtctagtatgcaagttctcatcagccaaattctgaatacaaaagaaactacactctcattcctttatttacagcaaaacaaatagtaccatcatatccacacaccaaagtgtttgattcacatcacacccaaatacaaaaaaagagaattctttcaaaattgcaaggtaaaaaaaagaggtgcaaatgtatatattactaaactagagaagcctcctcctgaaggttctggtagttgattgataagtacgaacgagaagaccgacaccaatcccaagaccaacacagacaccaagtcctatcccaacaccaacccttacacctgcattaaaccatgacatctccccatcaatgcactcacttctccaatacatgtctccttcgtattcctctttgtaattcccgtactctgttgttgcctacagacaaaaggaatgataattactatacagagaatgatgaaatttaaaatggtctatctccgaagaatagaacaaacttcaaatcataacattacaccaaagcaaatattgggggattgtaagtgaccaacatatgtgggtcatagaagcagcagacaaaaggataagagcttaaagataaaggaggcaaatgagagattcctatttatctcttcattcgtaaactgtgtctaggccacatgccaaatttataaggaggagactggtccacttcaatttattaaggacttttatcttcataaaactaccaacaaacatgtattcattcaatggggaaagaagaggatccaaaaaccatcacaacattttatgacttataagtttttcatcagggatagtaattaatgtgttgaacacaaacaaaatattcaagaaaactgtgagcattgcgaagaaagagggttttatcacgcatatgctatatcttagaacaatgaaagaacgaatttagatcatggcatatgacaacttgaaagttacctgaagatcaagtgcataggaggtgtctttctgaggctctgcagtttcatactcaggaattgcatccaatgccattcttctactctgcttctttttcaaaccaagttgcagagtcttggttaagatgatgggtgttcctgagaagcaaccagtaacatagacctcgatagttggcaatggagacgataactcttgaccgtttatgctcttctccttaaggaaaccagaccctgcagtgacctcagcctcacaattcattttccatcgattctttgattccccagtgaaaccattactaccagacatctcaagagttccagacaaaactagctcatttttgtcataaacctcaaacttcacactaccagttaacctgatattgtctgtgctgacataagtagcttcttcagatttcttatcaacccgatctctcctaagctgtgaagaacctccttctgagtacattcccattctaacaccgttaatctccaaaagcgtatctggatccagaggaatgtgattgatagtgaggacctcaggagttgaatcttccaccacgaaattgcttatccggacatagaacactctcaaatccaaccagggagatgagcttctggagctgtgttggttatagttatgatatctagatatttgataggcttcaccactgtcaagtgtctcacaaggctcctccatgaccagaggaagagaatcaacaatccaaacttaattctcactccaaaaactattcggaaaacacatgtgtatgctcaattccaatgaaaaaaaatcccaaagagaagagacctggttttgaggaacagaaaagccttattataaggacatgaaacgaggaatactaaaacgagaaaagagaatcattctgtcccaaaagggaagattcccattgaacacagaacagaggcaataacacaatcgcaaacgctaaaagatatttaaagattcaaacttttgctagatgcagaaaccctaagattgtctctcccacagaatctcaaaactctcaagattgagccagataagaaaataagtttcaagaagctctaaaattgaaactatgtttcttcagcgacaaaggaactacctttaaaaaacactcgaagcttctgaaactatgaagatccaaagagaatgaaagaaacaataaaaaaagaggagaaaactcaccaaaagaagaaatcacatccacaaatcctctaaatctggttaaaattgactcgtcgagtctcctagtgtatacgatattaatcttcttgtcaacctctagaataaaaagatttaaagaagaaatttagttagtggcaaagattagacttctcgaacccaccaccaaaatcacagttttttcttgtcgatctaatgagaacgcagcgcgtgtccgaggattacgatggaccccgtttgagctgatataatcttgtttaagaaaaatatcttgtcgttatctctttcattacaaattttaaatgtcggttaaaatggcgaaaagtctacggtgacgaagaggaagaaacataaatatcagaaacagtgattgcaaagaagaagatgatgtgttcttttctttctgacctaacgatcttatcgtctaaaagttttaccatttcgtttttcagaaccaaaactgttcgctgtttaacacacacgaaaacgacatgcgctgtttttattgatagacaaatatattattaccacgaaaaagaaacatgcatcatcgaaccgagactatatgtcccatgggccggttcagattttaacatacgagaattattggttatataatcaaccatatctctcgcttcttgtcttggtggtaagtctgtccacttgaaagtctctagactagtcagcaaacattcaggcacaggtgtcacttgatcccagcaaaccagtggatccttaaaacacaatggcattttctgagaacgaaaatgagagataaatcaaacaatagagacaattaagaccctagtcatagtaatagattaatgaaccttacattgtctgtgagctcaaggacttttagattaggagatcctttgagcaaccggagaagtattatcgaccaatatggtttacaagtacatatctttagactttcaagttgattgaagcaaattgcagaaacattcctagcctgctcatagcataatcacaagttagattataatgataagtaataagattagaatttcatatataaagattaaaaaaaaaatatattacctcggatctttggagcattaagcacaagtttagaccatctccttcggtctaatactgtatgggtttctcaacaatattatttaaatcagtttataataattaaattatttatctaaattttaaactataaaaagagaatttaaccaataatatgaagacatgtggagaaacagtttctcaaagtttctgaaaccagaaacgtttctgaaaccagaaacgtttctggacgtttctgactctctctcctactttttcattattttatatttttttagtcaccagatattctcccagatactattgatggagatgcccttagacgcttaacagatgtgaaagctccaagaaatttctcatattcaaagatattagcatcaatgtatgcctcttcaagcttaggcatattctctatcaagaatttattgtcgctgtgatcatttagtttgatgtactccaaagaaggagcgacaatttcaactacattggaagaacgatcacaatctatatctaatgataaactcttcaaagacggtacaatgatgtggacagctcccaaagtatcatattcatctagttccatgaccaattcttcaagaacagggcaattggcaagaagcgatcgaagatatctttcatcggaggagattacttctttaaggtgcaaagatttcagggagggaaaacaaaccgtatgagattcatcgagtagttgaaaagattcatctacgtatctcactccttgtagtagcaagtttttcagagatggaagacaagccatacgaggaacaaccatgagaattgcataagagagtgcaagggtctcgagcgatttgcaggtgtacacgcaaaatggcaatgtagcaaatttgtatggatgaggataataatcaatgaaaagctcccgcacacagtgagaaactgcagcttcaacgcatagtttgatatcttctggttgaaatggtaaagtactaaacttgagaggcaagctttccaaaaccggaactctatgtagcggcaatgtccttctgataaaacgtcgaaacctccggcgattggaaggtttagtgtcgcggtcttcatcatactcaagctttggcacccgcaaccaaagaaacttccacgtttagacaaaatgctagtggtcacagcaacttttgttggaagaaatgataaaatcttcaccagcaagtcatcagtattgatcttttccatatcttgaaaatttcaggatttttttttttttgtggacagaaacaccgagagcgacaaaaacagagtaaataattagagagcaaacggtgcaaaagcaattgatattgtggaaggttggggtgggggtgagatattttctaccgacaaggttatttccgtatatataatggaaaataagagagtgctcaaacgtcgttttatttttctgaatttatattctggtcaaagtttgtattcgatgtctttctatatttcttgggaagatgttttttttgggaattaaaatgtgtgtttaggaactaaaaagataattaaattacaaaaagttcatattcgatgtctttctatatttcttgggaaaatgtttatttttttgggaattaaaatgtgtgtttgggaactaaatagataattaaatttcaaaaagttcatctacttgtaataactaataagcacgacaaccttaattgcaatttggaacaagggttgacgtttaaaaagaagggttgacattaaaaaagaagatgaagaagaagatgttgatgtattaagaagtatcccatcgtcacataatgtatatcgttttaaccatcgtatcgatatgagagttgtttcgccagatggtggtgtggcaacattttattttctcaaggtttaattcgcttgttgtgtgctaaattgtgttccgtcgactgagagttaaaatagagcgaaattgtgttgtctgagatttccctgtttttgtttcttttctgaccatccacattggtgggcttttagcaaatgtttttaacaataattttattatttattttgaagttaagagttttgataagagtttttttttcttaagaatgtattttgtctcttagaatgtattttatctcttatataagagtcaaatcttaactattttaccaattaaacattaaatttaaatcttaatatctctaagaattatattaagagctcatcaatgtggatgctctaaacataagctcccttcatggttttcacttatgggtttttctcgtttctctccttacattggtttaaaacatttgggcatctcaatctcgcccaaatcatcaaactcaggtttcgatttctcttatctttatttcattttttctggattttgtaaaaagttgttcaatttttatagtttagtggtttgtttgctgacaagaagagaagatgtaagagtatggtgattagtgcgtctctgtttggtgttggagcacctgaggctttggttattggcaggtgttgttgctttgttagtctttgtattgtactgagtaaaagcaaatatgtgcaaccaagagttgtttcttttctgaatatgtattataaagcaatgtattgtaaccaaacaaaaagatatatgtattgttttacaaaattttagttttttcttagagaaccccattagtggttttaaatttttaatcattggaggacacaaaacttaagagcttctatgcaagtttttaagtttgaaaaagctaaatttatacttataaaatgcaaaaaactcatcatgggcttgtaaccattgaagatgcttttagaactttttttcaaaaataaaataagaaaattggctttgtagaagacaaggcactcaattaatggcggcccatattttttaaatagcccaagagcacactatgccgttttcgttttaggttccgtccaaaaattaacaatattttcgtcgaagtttttcattttgattttactccctttttatgtcatttggagtttttgttacatttctttttcttatatctcttgttttttaacgcaatttattttgattctagtagttaaatcttgtattcatttttttaataatccttttggtaactcaaaaataaaaattgaattgaaaaaaataaatagaaaaaattgacctaatttaacatgtttatcgtgtatgccaaacctattttgaaattgggatgtcgtcctcttagttacacaaagattaacctacttcgttaagtcttatattatccttaatattaagacaagaataattctttgagtgtccttttcaagtaaacaaagaatataacttgatatagattatttgatggagtataaaagaatatctatcatcgttacctgaaaccaaaacataagaaaaccatacacaaaactaaaagtaaaagcatagatttatttcatctatggaaatactaatgaaaatttactcactatcactaatgtgacggctgcaatcaaggcgaagattcttatagcgatgggtatcgttgtttccgttctggactcttctttcataagcaatgctccaactccgatatagagatccataatctctatcatccacaacattctttgcatatcaaagtagttgctgaaaatgaagatgtacatgaaaaatgcaagctttgtagaggtaacttgccaaagatgtattactattgttctacatgtgactttgctatcgatttggtatgcgcaagaaaagaagtcattcttacaattgaaagtctagagacccacgggcatcgtttatcacttattccaaagatggttatgtttacttgttctctatgtggactgcttgatgatcggtttccttatgcatgtattaaatgtattaaatgtttggtttcataatatttaacttataaatttgtatacctgctatctcctctttcgtttaaatttaaactttcttcgttattaaatattttatttttatagtatattttagaatgttgagtaccccatttctcaaaatatattatgggtatttctactgcaatgtatagaaattttcatcatttaaatttattgaaaaggtttctttgaaaggaaggaaaatcgaatttataatttttaaaaaccttgtgctggccgtaactcaaacactgtctctgcgggtccatcatcaagcaagggatctaattcggttcaggcaaatcacatgttcacaccaaacagcgttacatctcccggtttttgttttcaacatgacaactcaagctcccctcgcacctgcagatctcgttgggattagtggtctaaacgatgatgattggaaattgttacaacacatgcttgcagagcgcaagaacaagtcaacagaacgtctctccggtaagtttttctttgaatcatggatcattgatacaagcgcgtcgaatcatatgacgggtacacttgagtttttgcttgatatacatggcatggcacctgttttgataaaacttccggatggacggttcacaacctccacaaaacatggtcgtgttttgatgggttcttcattaagtctccaagatgtgttctttgttgatgggcttcattgtcatctcatttcagtatcacaattgactagagacagtggatatatgtttcagataactgacaaggtttgtgttattcaagaccgcatcacgaagacgctgattggcgcaggtgaacagcttaatggtctttatttctttagaggattgggagttgcagcgcctgttcaacacaaagattctacacccatcgatgtgtggcatagacgtctcgggcatccatcttctaaagctatggagatgttgaaattctcagattttagtagtagtggttttgattcaaaagattgtgagatttgtattagtgccaagcagacaagagattcgtttcctttgagttcaaataaaacaagttttgcttttgaattgattcattgcgatctatggggtccttatcgatcattctgcttgtgaattctcgcgacgatctctcacgggctggtttatacaactaggtggttctcctatttcgtggaagacaaataaacatgatgtggtctcacgttcttccgctgaggctgaatacagggccatggctgacaccttcagtgagttattatggatccgtcagttactaaatgttttaggaattgattgttcacagcctatcacactacactacgatagcttgtctgcaatttaattggctgccaatccggtttatcatgcaaggacaaaacacgttggccgtgatgttcatttcgtccgtgacgagataattcgtggagtagtaaagacaacgcatgtcaatacaaagtctcagctcgccgatatcatgactaaagctcttggtcgaaaggagtttgaagagttcctttgcaagctaggtattgggctatatgggcctcgtttaacttagtccatatcttgtaattaggttaagtcataagactaatgtcttctcttgtatataaggcaacgatcatgtatcgtagcaaaataaaaaaatcttttacatcttctgggtttcttgacagtttttaaatttgaaagagctaaatttatacttataaaatggaaaaaactcatgggcttgtaaccattggaaatacttttagaactttttttcaaaaataaaataagaaaattggctttgtagaagacaaggcactcaattaatggcggcccatattttttaaatagcccaagagcacactatgccattttcgttttaggttccgtccaaaaactaacaatatttttgtcgaagtttttcattttgatcttatactctttttttgtcatttggagtttttgttacatttctttttcttatatctgttgttttttaacgcaatttattttgattctagtagttaaatcttgtattcattttttaataatccttttggtaactcaaaaataaaaattaaattgaaaaaaaaaaaaaattaacctaatttaacatgtttatcgtgtatgccaaacttattttgaaattgggatgtcatcctcttagttacacaaagattaacctacttcgttaagtcttatattatccttaatattaagacaagaataattctttgagtgtccttttcaagtaaacaaagaatataacttgatatagattatttgatggagtataaaagaatatctatcatcgttacctgaaaccaaaacataagaaaaccatatacaaaactaaaagtaaaagcatagatttatttcatctatggaaatattaatgacaatttactcactagaactaacccgtgggctaaaatgtgatggctgcaatctaggcgaagattcttatagcgaagggtatcgttgtttccgttctggactcttctttcataagcaatgctcccgctccgacatagagatccataatctctatcatccacaacattctttgcatatcaaagtagttgctgcaaatgcagatgtgcatgaaaaatgcaagctttgtagaggtaacttgccaaagatgtattactattgttctacatgtgactttgctatcgatttggtatgcgcaagaaaagaagtcattcttacaattgaaagtctagagacccacgagcatcgtttatcacttattccaaagatggttatgtttacttgttctctatgtggactgcttgatgatcggtttccttatgcatgtaccttatgcaatatgagttttcacaaagattgcgctgaatccacaccagagatcaactactcttgtcatccttgtcacattctcaagcgtttcactcgtgttccaagttacacagatggaaaatgttgtttgtgtggaaacacaccttataatgtattttatcattgttctatttgcgatttcagcgtggatgttaattgtgcaaagaatccaccccctttcactcttgttcaatctaaggcccataagcatgcactcacttttatgccgcaacgatattttgtttgtaatgcttgtggactggatgacgaccctaatccttatatatgtattccatgcaatttcatgatccatcgaaattgtattgatataccacgcgtcataaagatcagtcgtcatgatcaccgtatttattacaatcattatcttgaagccggagactggaattgtgtgatgtgtcataaagagataaagtggacatgtggagcttatttttgttcgcaatgtcctagttttgccattcatgtcagatgtgccacaaggtacggggtttgggataggattgaactggaaggcataccagaaaatactttagaggttagatcatataaagtgatcaaagaaggagtaatagagcatttcactcacaaggatcatactttaaagcttagagaaaaaagtgataatgatgaatgcatctcctgtaaagcatgcacctatcccatattttctagcccattctatagttgcatggaatgtgaaaattttatccttcatcaaaaatgtgcttatctcccaaaacaaaaagtagattccctttacaagatgtcgactactttatctacgagaggtgtgggaagcaactcctttgaaatttgcagtgcttgtcacaaaatttataatggttatacatacgaaagtgatgataagtgtgtaggcctagatgtgcgatgtggttctatttctgagccttttgtccattgttgagggaagaattggacaagtctcaattctggcccaaaaggagttaacagcccgatttcgatttataagtcaaagcccgttacaaacaaagcccaatctgttgaaaatgaatgttctagagaaaggacagatcatcacattaaacagagggaattggccggattaccctcgtcgtacgccctaaacaagcggctataaataaagaatggaaagaaacgttgatgggacagaagaggggctctaatacaacgacagtacgactacaagcgaagaaaagattgtcgacgccctcgttcgacgagctgaaccacggaggaaagatcgccccgacctcaaaaccgttgacgccctcgttcgacgagctgaatactcgaggaaggatcaccccgacctcaagatcgccacccccactcttccccgttccgaaatcgtcctcctcaactcgtccacctcgtttagcttccggctcgaacaacttgaagattcttcttacttctccagagatcccattcgttgtacttgtttgattcctgcatcaacatccatgaaagtcaccctcttcattcattatacatcaactattcaaagggaaacatgttttgtaatgcttgtggagataatgcaactatggtcttgagttgtgaggagtgtgaatttgttttagacatcaaatgttctgttttaccaaagatatgtgcacacaaaaatgataaagatcattttctctctctatgctacggagaaaacacgagtgagcggtactggtgcgaggtatgcgaggaagaactaaatccgaaaaaatggttttatacatgttatcaatgtgctttcacttttcatatcaaatgtgctctcggagacttcacatggatggaaacgaattgtgatgatgaatataccaaaaatgtgtttcgtaataatcgtatgtctcgaccgatatgtactgtttgttattctcgttgtcaattcccatccgtcttgctctttgatttaacctgttgttgttctctaagatgtttccaaaaagcggtccacatcgaacccgaatgagatccttgcatccggcttgctattgatttatctcaagtggatttacaacaaattcattgttgacaggttgtttcgcctcaaaaataacatctaaacacacaatttattatttgtaaatagaaaatatgtattaaatgtttggtttcataatatttaacttataaatttgtacatctgctatctcctctttcgttaatatttaaactttcttcgttactaaatattttatctttatagtatattttagaatgtagaataccccatttctcaaaatatattatgggtatttctactgcaatgtatagaaattttcatcatttaaatttattgaaaaggtttctttgaaaggaaggaaaatcaaatttataatttttaaaaaccttaacttgttagctgtttttacattattacagaaagcaatcattttgtaaataaaataaaagtcttatgagctgttaagattgtaaaatcaatttggacatcaaatgctctgtttttacaaaagctgatatgaacacaaatatgactaagcattattttctgatgacttatatttagttatttttctaacgaccgatctaacgagcatttaactagcctttaaatgcatgtcttttttccaaccacaaacaagacagagacaagtagatgaaagatgtatacaaataattaactgtaatctgtgatagatgatgtacagaactatagatagacagtaacaaaaaaaaagtaaaagaatcatggacgccacaaagtcttttgggcacataacattccttctttgtcttgagcataagtcattcgaatctcccaatgcaagcttcttaatatctcttccaatggctctaatatctccactttgtcacgcacaaccacccaacctccaggccttgtcaatctatccatctccaccacgatcgaagccggctgcttacacctgcgacaacaacaaagatatggagatttcacggccaggtttctcatttgacaagcaaatttggattcaagatccctactagtttacctgtttttgagccgcgaaaagagatgatcagcatgaagaaggtcataagatcttggatatgttccaaatggttcacaccaatcatggtatataccaaggaggcctctttcgtatatgaatggaagtgtgtctggtgaatgcacaggcactacattcattacccacacattctgcttcacaagtgatgccccaaatctgttgattattttgtgagaattcaaaaccagtaagaatcaccaaaattctgttctaagaagagtataaatgatctctccttttttcatacccgccatagatagctgtcatgtccatcacattccggatatgtaaccagtcgatgcctaatccagtgaggtaagatttgtttaccatagcattccaatgatttgtatcttccatagctttctctttgctggttaaccactcagggtatgtttcaagtcgctttggccattcttcaggccactctgctccatgttgttctatagccgacggtatttcatatatacaagttttcatcggcacatacctatccaaggatggagcacgtgaaaatgttcatcataatggacataagaagaaagaaaaagtcatgccatttagattatcaccattgctttacttaccaggctgcatctgggttttcgttgtcctcgcaaagaggtggatttttcttccttctcagttcataaatatcatttgattctggtttctgatatatcctcactcccatttcacttgcttcttcggtcttgtgtgcaagaatgttccaacaaatagaagctgtcaatgcagtcatcgctgcaaaacccacaccagagacaagttgataaatgctaaaagcacaagtaaaattttgatgtgttcaaaatcttagatacatcatgttgatgaaaagcttagatccaccattttcctaatattatggatttttcagtgcgagttaaatgacatatgaatatatataccttcatcatcctcaatcttgtcattattacttgacaaaatgaaatatccattaggccttaatattctgttcatctccaggagaagtttaccacctgtgattgcggaagtataagtactcatgactcgaaaagcatattgacaataatgacactgttagagaaactattacttaccatgagaatgccagtggactccgcaagcagcacaatgaatggtatcgaagactccactaggaaaaggaagtcttctacttgctaaagagctgacaaaagtaggaaacccgcgctcaagagcgacctgtgctaagtcgactagatcgtcctttaaacctagagacaccgtcaaaacatccttatccagcaatgcagctacaaaacttgaatctgagcatccaatgtccaacactatacgaacattcttcccccattcaatatctggtaccatctatcaaacaccaatcatgtttttatctctaacacagaacttgtctccaatgaaaagccaacttcagagagtaacaaatgatactcacctcttgaatgaattcaaggtactgtagaacatttccgttgaacgtagtctggttctgtggaaaagataggtattcaccggtttcattcacccaattatgcttcttaatatacgcagccaacttcggatgtgccacgttcttatacaatatctgatgttaataaataaaaaagacattagatcaaaagaacttgaaccaaatatctcaaagaagctccaaaaatttaaaccttagatttgctttcaggccaggaaacaggaggatcatagccatcatgtggaagaggaacaagacacataactggtttcttaggacaactcctctctctatgtctataactctgaagcctccctattaacccatcattatcaatacatggcatgtaattgtgcttgctcctagtgttacacaatctccagctatactcagctttaggatcaaacaccggacctttcctcttcctctttttacttatctcgtttacagttacttcctcattcttttcttccacttcttcatcaactgatgcacttgaatcatccacacttccatctccatttccatcagattctccttcattgccatctgactcagttccttcttctccatcttccttattagactgatcagaatcgtcagattccgcctcttcatgttcttgatcctccttaaccacaacttcttcaaccacaggctttggcacatccttcttcttatgtggatgagacacagcatgctctttctttttcttggtttcatgtttatgaacagacgaacctccaacttttttcccctctttagatttcgaaccagattcaactttacctctctcatgtaatttgctagattcagacacctcatgagctgacttagtgcgagatgacactggctcagctatgtcgtcgaagctttctctctggacattaaaggtagaagcagaggaagataagaaggaccagaagaagacgaagcagagacccaaaacaactatgaacgtcatcttcacccaaatccctcgtggctgtttaatcctacgcgcgaaataagcaatccccatttctcgttttctctccatcatttttaaaatcttaaagaaaccacttttaacgcaactgaacaacagagatctgcaaagaagtactttaaccaaacttgagataagctcggaggccaagaatttgatcaaaactaagcaaactctgggagctaaatcaggatctccgcaagtaaggttcttgagcacgatttagtaggaatttgcagtacccagattggaaaagctgctaaaagaagaaaatttacaaatctcagatttctatcacgggagaaaagaacgaaacacagtagaaatttgcagtaccccaaatcgaatcgtaaaaatttaagcttgataatcaatcacataactgaaaattacgactcttttttaagctaacactaataatattatcctcaatgcttttttctcacttttttccttgtatagttgaaagttgaaaaagaaaagagaagaagaaatgggaaattctggcttttcacttttggtaataaataataactgagaagtggtcagaactcagaagttggtcgggtttcggaaaagtgccaacaagagagtcgaaacagccggaggtgacggagaattttaatttttggtctctctttaacagatcaggcattaagcccaaatggatttgaagtaaatcagcccaatgggctcattacggttgtacaatatacatgaatgttgattactgtataggtaataaatacacagtaatgcatcatttcatcactgttgttacttgttaaaattcgaaagagcataatagaaatctcaacttccaatgagatttggattccataaattttgccacaatttatttagaactcacaacaaagtcaacattgctgttaactctagatatcttgcttcaattacaatagtctttacatcctttaaaatctttcaatttttttctttattcatacattacttgttctgattttcccattatactactcctttctatttcaaactcttgctttctgtcattagcaaatagagaaagtgatttcttaaccaaacttacaaaattggaacttaacaagaaagaagaaagttcgttttgttcacgtataaaaggaacatgctgccattttaggacaagtttgtacatttttaaaattttaaaaacttttacaattacagaatttagctaataattccgacatgctaaaaaaactctttttactattttttttttaagaaaaggaaataataaaaacagctcgtcatgatgcataattatgtcaagattcgtttcaaaaaaacgtggacccctaccgcctcctcctccactactactaccaccaccacctttggtttccgtttctctgtatattcattcctcgaaaccctccaaaaacccatttcaatcaatttctcgcttttgccctctacgtttctcgtcctgggtttctcaaatccagctcagtttattccccaattcaataatcaaaactctgtcttttggtgggtcttcgtcaaagctctctcctttacggtccttttctccagcgcatgaaataataaaggacacctgtatttattaaaatcactacattttccgtaacaaaaaaaatcaaactttgttttctcaatggacggtgccggagaatcacgactcggtggtgatggtggtggtgatggttctgttggagttcagatccgacaaacacggatgctaccggattttctccagagcgtgaatctcaagtatgtgaaattaggttaccattacttaatctcaaatctcttgactctctgtttattccctctcgccgttgttatctccgtcgaagcctctcagatgaacccagatgatctcaaacagctctggatccatctacaatacaatctggttagtatcatcatctgttcagcgattctagtcttcgggttaacggtttatgttatgacccgacctagacccgtttacttggttgatttctcttgttatctcccacctgatcatctcaaagctccttacgctcggttcatggaacattctagactcaccggagatttcgatgactctgctctcgagtttcaacgcaagatccttgagcgttctggtttaggggaagacacttatgtccctgaagctatgcattatgttccaccgagaatttcaatggctgctgctagagaagaagctgaacaagtcatgtttggtgctttagataaccttttcgctaacactaatgtgaaaccaaaggatattggaatccttgttgtgaattgtagtctctttaatccaactccttcgttatctgcaatgattgtgaacaagtataagcttagaggtaacattagaagctacaatctaggcggtatgggttgcagcgcgggagttatcgctgtggatcttgctaaagacatgttgttggtacataggaacacttatgcggttgttgtttctactgagaacattactcagaattggtattttggtaacaagaaatcgatgttgataccgaactgcttgtttcgagttggtggctctgcggttttgctatcgaacaagtcgagggacaagagacggtctaagtacaggcttgtacatgtagtcaggactcaccgtggagcagatgataaagctttccgttgtgtttatcaagagcaggatgatacagggagaaccggggtttcgttgtcgaaagatctaatggcgattgcaggggaaactctcaaaaccaatatcactacattgggtcctcttgttctaccgataagtgagcagattctcttctttatgactctagttgtgaagaagctctttaacggtaaagtgaaaccgtatatcccggatttcaaacttgctttcgagcatttctgtatccatgctggtggaagagctgtgatcgatgagttagagaagaatctgcagctttcaccagttcatgtcgaggcttcgaggatgactcttcatcgatttggtaacacatcttcgagctccatttggtatgaattggcttacattgaagcgaagggaaggatgcgaagaggtaatcgtgtttggcaaatcgcgttcggaagtggatttaaatgtaatagcgcgatttgggaagcattaaggcatgtgaaaccttcgaacaacagtccttgggaagattgtattgacaagtatccggtaactttaagttattagcttcgtttgaggaactgttattgtgtaacttcgagactaatccatggttgtttttttcttagagaagaaacccttagatttgatctctgacaatgtcaatgtgtttgttgtttatgtgttttggagagtttgtgatatttgagttacagttcttgagctcatgttttcagatcttagatgtgtaatgacgaaatcacagaataaaattagggacattgttaaacaaaaggttgtttgtttactattattgaagtttgctccaattaaattacagaaaccaaaactttcgtttgtccaactttgcctttcactgacactcactcgtgttgaatggtgtgaatatgtgaatccgttactttgagaatataaacaaggaacggtaactacaaaaaccattttcatgttcttgtaacgtattatttcgttactatctgtaaattgtctagatattttcctagtttattacttttggaagaaaatgaccttagtattgtttacttggttctgatttcttaatgaatggtcaaattggacagtgggacatgccaagaatgttatataaagaatgattttaaaattgttattatattgttgttttctttttcaaatcgaccgccgtttgcattggaaatagtcctttcatgttcgccaaacaacaaaactcccaaagcagtttctatcacatggtagctttcccatttggatccaaaacactaacatttgcatttctgattttctatacttaattcaagatattgttgaatacacaaatatagtgctattaatcttgagaatccgaaaaattacacacaaaaacaaaaaatcaaatttaaaggtataatgatatgcttgtacaagataaacaaattataatcaatgtcaagaagaaatacattgaacaaagcatgaaatacagacacagggaagggacaaaagaatgatctgtaatggagaaagcaaaaagtgaaaattttgtcttcttcttcctcttcttgttttgatcatctgaacaaagcttggatctcttcaagcgtttttcctttagtctcaggaacccaaagactcacaaaaaccacagtgaatccacaaaccaaagcgtagagagtgaaagttcccccactgctccatgctaacagcatatttgcagtcattgtcactaaccatgacacgaaccagtttaacaaagttgctatacttccggctaaaccctttatattcactggcagaatctgttttaccaacattaatcagtattaaaatttccagttgtgattttaacactaaggaacaccatgttttaatatttagtacctcagacataatcagccatggaattggtcccattcctagagagcaagaaataaccatagcctgtaaataactcagccagatttagtacacataccgggaaatatgtaaataagaaagtatctttcgttgtgtgaatgtataaaacaaacgacttaccacaactccaactacggaaaccatgcttagaatgttgtacatgttggaatcaggtgatacaaattcctaacaaaagattaagaaacctcaatatctcataattagagtgacactcttacattgtacaagtagagatgtcaaaagttaaaatgttaccttaaggtaaaatgcaactgctacaatcacgaggcttatcgtcattccgatagaagagatctgcatttcagaagaaaatgctaatattatgttatgcatacataaattcttcagactttgtaagatatacagatgaatctcaaatattcttcaccatgagtagaagccgacgacctgctttatccaccaaccatgtcgctatcccagtcgccactacctggtatagaatgaacaacggttagaaaaatcgaatctaatgtctcctagattgaaatgatatacctgaacaacgccaactccaaatgtcgccacattacttgatgtcaccccttagtgaatgataattgcaaacaaagaagcatagttagaaatctgtttattctatcttaggaccattccaataatcaaaaaaaacatatgactctacctgcagattcaaaaattgtactcgaatagaacaagacaccattgattcctccaagttgttgaagtgcaagcagccctataccaacctgtaacacagattacaggaaaagagtgagtttctctcatgtgttgacaaaattagttcaagagaggtaagagaaattgcaccatcagtgggaaatagtatctcctgcgcttgaggtctacaaaccgaactgcagaacgtttgctagatgatgccacagatctctgcagagtgcataaaatgaaaattttaaataagacaagaaatcacatcaaagcatttcttcagtttagtcactaccttgatttcattaacctcaacggtaatatcagtctcaaatccacgaagaacttgcaatgaagtttcgaaatcatctgtcaaacccatctttgcctacaattacaacaccaaaacaatttaggataaccaataatgcaacaaactcaacaatataagcaatacggttgtagaggcataccaaccaccgaggagattcaggaatgaaaaaaagacccggtatcaacaatgtacatggcaatactcctaaacataaagaagacaaacaagaaagtgattagactgtatcgatcaaaataaaataaaaacaggtatagtttctcccaagtcaagtcaaaatgttttgtgagttacccaaaactgcaagaattctccatggaacaaagagaccgagtaaatacgccagcattatcccaattgttacagaaagctataaacacaaaacatttattgtttagtgttaacatatgaatcagctcataaaatgaaacataaaaatagtgaagctaactaaacatgacaaacctggttaactgaacctaaggctcctctcatggtctgtggagcgatctcagctatatatacgggaacctaaaatcgcaattcaaaggtgtgtaattatattgatcactccaaacaaacattgctgaaatcaaagaaatagttgaatctaatattaccgtataggagataatcccaactccgaagccttctaacaatcttcccatgtaaagaaaagaagtatcctaaacaaaaaccaagaacaacaacaacttagtaggtatagagataagccaagaatatcagaaactttgagaacaccaaaacactcacttttgcaaatgatatcgaaagccatccaataatattgggaattgcagcaatcatcagagactgtcaaaaggaaagaaaaacacagtaaataagatacaacaagaaagaagatgttacatgacaaattgtcacagatgagaacatgttttagaatcaagaaacaaaactattatacccctttccgtccaacgtattcagcaatctgaccactcgcaattgctccaaccatagcacccacattggatagagacccaaacacagagtactaaaacatcaaacaagaaacctaaaagtcagaaaattacagaacaagagtctttacaaaaaaaaaaaaaaaaaacagaacagttcttaaataaagatgggaccttcatacctctgatacagttaaaccaagatccttagtaatggcagcttgagttggtgaggaataaccacactgaaaacaaaaagataaatcaaaatcaacactttcttagtcaatttgagcaaaagcagagaaatccacattgataaaaaaaaatataagaaagttgagatatttgtttatgttgttcttacagtgaatccgaattgaataggaccaagagcaacaatcaaaacacaagctaagacagaaattgagctgtctcgaataacttgagacgattccaacatactagattgtctcgaacccatccgataccaacttcctgtgtgtaagaacggtcgccgaagatcatttcttccctcttccgtattatcatccctaaaactcatctttttgtttttcttaaatctacaaaacaatcgtaatctacagagagaaaaaagcacgaatctttcggaggataaaaatgtcgatcctaaactagaaaatgcagaagaagaaaaatacgaaatttgaggtaggatttgagttttgggtgaattcaaaaagatgttagacttgttttgcttaagaattcttcatggtttgtaaaaattgagcctttgcgtggagagacgcagactgtttcatagttttccacctcagaacgcgtcgcctaacatcgatttatagaattcgtaaagggacctgttttttttcttctctgtcgacaaaaaaaaacttaatttaaaaacattttaatttgtaattaaataagatatcgttcattttaaattcttttatatcaaatttaactattgtttttttttgtctgattgtcgttttcgagttattttttgcgcaaagataattttttgaatcattgtcccatgttcgctcacatatacaagcatttgtagtcgctttgaatcatttattttcttctacatacttctacatactcattagtattataatgagcttttacaatgtaactaattacgcaacaatactataaaattgtggtacaggctgagactaaactatattgtatttttaagaaaatgtttttctttttgtttaggtaaactgtctacttcaaagatattttttggtaggaataataattaaaacttcccatattagaatacgaggccactagacattccttttgacaacaaaaagtgacaatgtcattttatattttagcacttataataatagttagcatgcattatagaattcatatttagatgttgtcctaactcttaacaaaatcagaataacaatattgtgggagaaaatttagctaaaacttcaatttaggacaaataataagattattaaagtaacacttaaatatgaatataatgctcgaatcctcctctactttttagcattttcgctacctcgttgatattgatgtcgataggtcacaaatatgcaagtgacattattttattagataaactcgaataattatagtttttgttttctagtatatgaaaaatatatggatgtcattaatttcgaatacttcaataaatataaatatttattcagatacaacattatttatttattttcaatatttaaaatctttgagaatacgacatgttatttcaatgtttaccaataacatcctactatattatttaggaaatacattttaaatataactttatttttttgtaagtaattacataggtatgtcattagaaataagattttaaagagtaaattaatttatttctttaaaaattaaaagtcaaatactaatttaattaattaaatttaactcaaaaacgaaatacattattaatttccaaaaaagtaaccaattaaaatcaacaaattagatttgatatctaaattatcatattaattttttattaattattatagttcacctctcatctttatatgattctatttttgcaaaaaaataatatcatcgttataaaaaaataattagaattttttcgcatatgccacaatttgaatttttaaaaacgaatataaactgttcaatacatgaaaaaatactataacgggtcaaaagtagatttaagaaatttttttactgagtactgtgtcatagtttgaatatttatattcaatttcatacatattattttaaaatttataatcttatatactacaataattaataacatattagattttttaatgtgtatgatgtgattcaatttttaatacaagctgaaaaatcctacaattgacgggtttaaatcaatattaatacaagatgatatactatatgtgaaactttaaaattaacaatcaaaatacaagtatataattttaaacactaaacaatataaataatatcaacaaaacatatacaactcgcagtttactatacatttaaaatcaaataaaataatatcatatatttataatcaactttacaataaaagtttttagtttaactaaaatataagactacctgctgtataatgcaagttaaaattataaataagccgattaccatcacgatggatgtaccatctcacatacacacctatcaaaaacttaaaacctttcaaaacctcttggtatattcaaattaggattcttcattcatggaatcattattccaagggttttgggatgtcttatgaaatgattttggcagaagaagatgtaaatttttttgaataaaaagtagtcaccaaaacatatgttttattgggattttttagataattaaatcagagaatagggctaggcatatgagtaacccattcgagttcgggtataacccgttcggatttgggattaatgggtatatgatttactacctaatagaataattctaaatattcggttcggatcgcgtccatttgggtttaggtcagtttggataaaaagtttcaggccctaaaaatactcaaaaaatagaaacaggtattttgtatgtagataatgcgtctccaaacaacaaaaacttttaaatttattaaattttaataaatttaattatatttaaatatattttactaaagtttgacaaatataacaaataattttgacaaacatagcaaacataataaagtatacaatttaatttatacaaaatattaatgttcgtgctgtatagcacgagttatgatctagttatgttttaaaacataagtttagatgacattttcaatgtttaccaataacattatgttttaaaacataaatttagatgacatttgatgttgtattggtgaataaaatatatgtattggaaaaaaaaaaaaaaatctccacaaaagtcattctctcttttttctaaaattcattgaagatatatttttaaaaaaaaagaaaaacagagtgttatttacagatgaatgaattgggaaacatttaagtaattttttaaatatgatacgtatgtaacctgttagttgttaatcttcttagttgttaataacgtcggcataattgagatcccaaaatcacacaagttacatacacgaggttttatttttttaaagaacttctaaatcgagataaatctatggtcgatagaggcaacgacaagaaaggccagtagatatcacaccaaacacgtcttattggggttatgattcataggctctgattcatcgttcaacatataataatattctgttgacccaacaatgcagattcgtatattttcactgttctgggtcttttgtctctttctcatctctcacgtgttagtgcttacatctctgtgtagccgtttccggatcccgacacaagcattctcttccattgtccccactttgcttagttggtctgatacttttatcggttttaatatcaataagtaacacgattttcaccatttaacgagtacatgcaacacgattgtacatgtcacatttatcttggcataaatctatctatgatcgttaacacgattatacattaaaaactttggatcaattattttttattttctcttttattgttgggagtagtgttctaattgatttaataatttttattgagaataataatcgaatttaaaatgcagtgtgtattagacaattagtggacttatagaggctaatttaagtaaccaaatttgggctttaataaggatccatactcttcggcttgaaagcccacattgtaaagttaaaacactatatcaggctctgttttcattatggctataaatacacgagtttttccagaaaccaaatcaggctctgttttcattatttctcgctgctgacttcacagacgacgatggctaatatctctgaaatttccggcgactctaatgacggcggagatccaaacaagaaaccagaagaacaagttttgagaagaagtagaagaatcgcgacaagaaacgagaatcaaaacaagaagcccaaggaggaagaagaaaaagataatcgctcggtatcttttccaattccaaacgagctcacggaagcttgcgtcgcactcatccggaaatgtgattaccctagtctatcttccgtctcaagttactttttcaatctcatcgcttcgtcagaactctacgaaacgcgttcgcgcctcggtctttccgaaacctttctttacgccgccatccgattccctgacacaaatcccccaaactggtacattctccatcgaaacaaggtttcttctttacgtttgagcaaactcgaatcacttccacctgtgccttatggatgttctgtcgtcacaatcggtcaagagatgtatgtaatcggtggactcctcgatgtaagacgtttacagttgatgactctcatcgactgcagaactcacaaatgtcgctcgcttccgaaaatgaaaaggggtcgttaccatgcagccgccggagtattcgacggaaagatttacgtaatcggaggtttcaggatgagaaaaccggatgctgaatggattgaagtgtttgatctaaagaaacagatttgggaatctttgcctggtccgtaccctaaaactagtatggattcccagttttttgcacatgcggtgatggaagacaagttatacattttgggctcacgttgcttgatttacgaaccaaaaagaaacggtgaatgggacgcaaccgtcaatgcaaatccaatatggaatctgtggaaagtgccatgtactatgcaatgtgtgatagatgatatgttgtatacgattgatcctcagtgtactcttggacatccaatagtcgtttataatccaaaggacaaaacgtggagacctgtgaaaggtgaatctttgaggacattgcctagttattttgtttctgatgggtctgaaatggcgaattttggtggaaagttggtgattttgggcagtaatgggagctgctatgatactggtgattgcattggagaaaaaggtatttggtgcgtaatgatcgagttggaaaaacgtgaaggaggtgagatttgggggaaggttgaatcactcgactgtgtgcttggagacataaactttctgtcggtttggctttgtcaaactctgaccctttgatgatacaagggatggtttcttgcaggtacgtttatgtgaatgagtatgaaccttttttgatattcaggcctcttctttagcctcaaggcttacatacttgtcctttttcatgatcttgttgcagatgaaggatctttattactcaagagtcaagagtaactcggtccttgttaacctttgtgtacaataataatactcttacataattatcatagccttgagtagatttattaagctgtaacaagagtggggctatctgcagttatacaatacattccttaccaaaacttgttgaaatgcatctttagttacagctatgttttggatattttgtgcagtttcacactttcactaatatgctatgtgctctctatttgttcttttctgtaagtaataatcacacacaatcaggtagtaacaaaaactcattctgtttctactatatgtgcaaatatgaaatcatttagaattcagatgaagcaaaactaaccgagtttagttaacttgaagattcaaagagaacagggtaagaaataccaagtagccgaatgtgggctttaaaaagcccatataatggtcatcgcgtaaaagacgtgttagagaagatataaagcctagttagggcagactaaatcccaaagtccaccacaatcacccaaacctaaaacccgtaacctaattccgccgcaatccaccgatgcatgtcatggggactccttgagatgaaacgaaaacgcagtttaagaggagctatgaacttgttttgcttcaggtatgattgacttcaaaaaataccttgaaactataaacctcagtttctttgaatttgatttttaaagtcaataataccttgaagcaaagctcgcgttcatcaccgccattcgagtagtccgaaatttcagagatataagccatcgccgtgtgaagtcagcagcgagaactaaaggaatccaaccctaatttgagctcttgtatattgaagtcagcagcgagcattaggctcacgatttattctttaggagatggtaatggtacattctccatcgaaatccctactcttacttaacctttgtgcagaatgtgaatataaacccttatgtagcttcttttagctgcctttttatacgatattctaatcaaacccttgttgagatccatatctagtcatagctatgttttggattgttgtgcagtttcactaacgtagtctcaagttcagttggtaagtaatcacaatcagatttaacaaaaacaaatttgcttctactgagaggcagtttcacttaggagaataagtggagtaacaaatgttaaaaataaaaatgatagaaaaaatcatatgaaaatttgaaagtgaatttctgttttgatttttctggttcaatgtgaaaatacagtttagtgaggaaaaaaacagctaaattgtagtattgtattaaaacgagttttaaggaagaaaatacaaatgaaattatgggtatataaatacccaaatacctttctcaaaaaccaaatcaggctctgtttccattatttctcgctgctgactttacacacgacgatggtcaatatctctgaaattcccgacgactctaatgacggctgcgatccaaacaagaaaccagaagaacaagttttgagaagaagtagaagaatcgcgacaagaaacgagaatcaaaacaagaagcccaaggaggaagaagaagaagataatcgctcggtatcttttccaattccaaacgagctcaccgaagcttgcgtcgcactcatccggaaatgtgattaccctagtctatcttccgtctcaagttactttttcaatctcatcgcttcgtcaggactctacgaaacgcgttcgcgcctcggtctttccgaaacctttctttacgccgccatcaaattccctgacacaaatcccgcaaactggtacattctccatcgaaacaaggtttcttctttacgtctgacggaagtcggttcacttccacctgtgccgtggggatgttctgtcgtcacagtcggtcaagagatgtatgtaattggtggactcctagacataagacgtttacagttgatgactctcatcgattgcagaactcacaaatgtcgctcgcttccgagtatgaaaagaggtcgttacaaagcagccgccggagttgtcgacggaaagatttacgtaatcggaggtttcaggatgagaaaaccggatgctgaatggattgaagtgtttgatctaaagacacagatttgggaatctttgcctggtccgtaccctagaactagtgcgggttcccagttttctgcacatgcggtgatggaagacaagttatacatgttgggttctaaattttgtttggtttacgaaccaaaaagaaacggtgaatgggacgcatccgtcggagcaaccccattaaaagatttgtgggacaagacttgttgtgtggtagatgatatgttgtatacgactgatcctcggcgtactcttggacatccaatagtcgtgtatcatccaaaggacaagacttggagacctgtgaaaggtgaatccttgtggagtttgcctagttatttcttttctaagtctgaaatggcgaattttggtggaaagttggtgattttgggcagtaacaagagctatgttactggtgattgcattggagaaaaaggtatttggtgcgtaatgatcgagttggaaaaacgtgaaggaggtgagatttgggggaaggttgaatcactcgactgtgtgcttggagacataaactttctgtcggttcggctttgtcaaactctgaccatttgatgatacatgagatggtttcttgcaggtatgtttatgtgattgagtatgacctttttgctgttcatgccttttctttagcatcaaggcttacttgtctttttcatgatcttgttgcaggtgaaggatctttattactcaccttaacctttgtgcacaataataatagtcttttacataagccttgagtagatttcttaagaaagtgggctagatgcatttctacaatattctcaccaaaacttgttgaaatgcctctttagttacagctatacttatacaatttcactaacatgctctcaagtctttttctgtaagcaataatcacacaatcagattataacaaaacctaatctgcttctactatatgagcaaatatgaaatcttttagaatttagttgaaagcaaaacaaaccgagttttaaaacttttaagttaacctgaagctagagatgttaacgatgggttaaaacccactgggtacccaaaacccacataaaattttaagcccataaatctacttttttaagaaaaaaaatacatgtttaaaatgggctaagtacccaaataaataaaacccatatgggtttacctcattgggttatgggtacccacgggtttttttaaagtcatttttcaagtgaatcaacattttcttgtcaaaaaagatttcacatttttccgccaaaaaagacattcaacattttcccgccaaaaacgacaatcaacattttcccgccaaaacgcaatttaacattttcccgccaaaacgcaatttaacatttttccgccaaaaaagacattcaacattttcccgccaaaaacgacaatcaacattttcccgccaaaaagcaatttaacattttcctgccaaaaacgacattcagcatttttccgtcaaaacgacattcaacattttcccgccaaaacgacattcaacatttttccgccaaaacgcaattcaacattttccgccaaaacgcaattcaacatttttccaccaaaacgcaattcaacattttcccgtcaaaaacgcaattcaacattttcccgccaaaaacgaaatcaacattttcctgccaaaaatgatttcacattttccggtcaaaaacccaatttaacattttcccaccaaaaatgatattcaacaacatttttccgccaaaaccgcgatttaacattttcccgccaaaaacgacattcaacattttcccgccaaaaaagacattcaacattttcccgccaaaaacgacaatcaacatttttccgccaaaacgcaatttaacattttcccgccaaaaacgacattcagcatttccggccaagaaaaggatttgacatttttcctgccaaaaacgcaatttaacatttttccgccaaaaaacgcaatttaacattttcccatcaaaaacgaattcaacttttttcccatcaaatatatatgtaattcagaaaataaatacaatttaaaatatatttataagcaaaatatagatacaatatacatataatagtatattagcagttaaacataaactctaagaaaatgacagaaaccaagttggatacccacaagtagtctcggaacaatcaggtttttttgggctttacccactaaataaaaaacccataggtttttggtaggggttttttttgggttcaagtcgggctgggcttttttacccaccacaactgcctataacctataagctatcacttttaagaaatactaagtagccgagtttgggctttaaaaaggaagtaaaagcccatataaaggtcatcggagcgtgagagccactctcgtacagagcgcgttagagaagatataaagcgacggagcagattctttttcttccctctctcctgagaagaagaagtaaagaagtaagatcaattctcggccgtagttagttatcctccgaatagatttccgattctctgtttcttctagattgaatttaaaaaccctacttttgaattttcacatgggagaacaatcaccttctcaaccatcgactcaatgccaaagtcatccacaatcacccaaacccgatactcataacctaatcccaccggaatccaccgatgaatgtctcgattcagctggagtttcaggctcaatcgtctcatctaccacaatcgacgctcgacggatcactgaactaggcaatgtatcgtctccgccgtccaaaatccctctccgccctcggaaaatccggaaactcacactcgacggagacgtctccggtgaagattataaggcggaggatatctcctcatctcaagtaaactctccgctcgcgacggatggaaaatctcccggtaaaggtaaattgtcgcacttacgagctataactgtgccgaggatccaagctcgtcctctgacatgtgaaggtgagctcgaaacagcgattcactatctccgtaacgcggatcctttgctcgcggcgttaatcgacgttcatccaccgccgacgtttgagtcttttaagactccgttcttagctctgatacgaaacatcctctaccaacagcttgcaatgaaagctgggaattcaatctacacacgatttgtttctctctgcggcggcgaaaatttggttgtacctgagacggtcttatcattaaatcctcagcagcttcgtcaaattggtgtctcgggacgtaaggcgagttatcttcatgatttagctagaaagtatcaaaacggaatcttgtcggattcggcgattttgaacatggatgagaagtctttgttcacgatgctaacaatggttaatggaattgggtcatggtctgttcatatgttcatgataaattctcttcatcgaccagatgttttgccggttaatgatctcggtgttaggaaaggagtgcagttgctgtatggcttagatgacctgcctcggccatcgcagatggagcagcattgtgctaagtggagaccgtacagatcagtgggttcgtggtacatgtggcggctcattgaagctaagagcacatcaacgagtgctgctgttgcagccggagtgtcattacctccattggaagatattcaacaagaacatcagcagcaacagcttatggaccctcttaatggtgtgttcagtatcgggtaagtaaagtttgtttcttttggaaacttttgaaagtttttctctgtacttggagtgtgcttagcttaagtagatagattattgaaaactgttacttgctgcaaatacaaactaatatgtttggtttggatcactaagattaaatatctgagctttggccaactatttgtggaatgcgcttatggttgataaagtattttaggcctccaagattaggtgtaatgtttagttggtgacattcatgtatataggagactaataatgagcttacatttcatgtttgacaaaaagtagttgcttgaaaccatctagtgagtagtgagtgaggctatatttttcatcacctcgattgactgacaccttcagggtgtctacatagtgtcgtaggagagtttttccagctatggtcttgatttctctccatgattctttctacgctaattcttctgattatcgatctatgactctttaacagggcttggggacaatcgtagctgttcttccacgttggtcctggatggtctgatggcttacatgagttattttgttctggacttggggtttgtgcctagtaaaaaaaaaactgtgggagaaagaataataaaaggatgtgctagtctgggttccttgagacacaagctgaagtaacagtgaatatgatcttcttagttgagtgaaagagtctgtaatgttaagagtgagtagctaatgacaaagtagtgtcttctttatttttgtcggagacctaactctcttgacagagcttcctcatcatctctaaaacagatccacacttctgtatcgcatcgttgctcagtctaactaacaatgaaaatactactataaagactggcgacagcgagtcactgccgttaaatttactctgtttcatccgaagccattaaatatatactctgtttcaaaattaggtacgggaaaactgttgaagttgattttgctcattcgaatgtttgcctcatccttgtgggcctgtgttaatctcatttctagatttgatgccaatgtcgtcacgagagcacttttctggacaagtatgtatgtaggcccaataacagcccaatcacacattatttatataaaaaaatgaaaaggtaaatactaaattcaataggcacgaatcgatctgtggacgggaggaaaaatatatcaaagagtttgtacccgccttcgccgcaaccgtcgttcctgtcgccggtaaattctgttcctcggttctcttctttgctagatctctttttctctgttttgacttttttcctccctcaaattttcaaaattcctgattcgagattcttcgttatgcaactttactgttgctaagctcgtaaaccctagctcggcaaacgtttgctacttgtttctggtttttcgagaaagagtgtggatatatcttgaatgttgaatgaaacaattgaattctcgctttagacaatcatcaaacactgactgattgttgcttcagtactaattcccaggaacaagtgtggacagatcaatggatggagaagaatgtaatatatcactgtttgattattctgctgagagtcatctaaaggcagtggaatctatcactgatttatgtggtgaagctaatgctgatattgatgagaatgatatcaacatattgtcatcatcagttacattcttgaggtgcgtaaagaattaattatgtattcatataagcttctttctattgtaacttatgttgaagtggttatagaaagtgtttctcaatgtggcggtaagagtattctactagacgatttaacactcacaaatctaattcttgcctactgaatttttgtatagggaatggaggcattataatttcgaaccaaagagttttgcattctacaacgaggctgagaaaaaccatcaaccaaaggatataaacagtcaaactttgcctcaattttcttccgcacgagctcccaaggttttgtgtaattacgctaaaaaattatttctactttggttcttaactctccatttacttcttaaattgcttcaacgacaatgcattttttaatctctactcttattggtgcaggttaagatacatgacgatgagtcatcatcatctggtgaaatcaggtaatagttaaaatatatatgagctgtgatcatttaagctgttcaacgggttctgctggctagcaaaagtaatcttgaccatgggagatgaacataggtttccccagttagatgaatgttaattcactgctaaagtgctaatttaatgttcaatccgaaccaggactaggttgctaattggttagacaggacattgacattccatgtttgtgtatatgtgtctgctcttgtccctctttaattatcaaaaagagttgtgctagtcatgatcgtttatctgatggattattattcacctctgcagcaaggactttgtgatgcatgttggaggctctgtttgggcaatggagtggtgtcccagagttcatgggaatccagatgctcaagctaaatgtgaggtgattaggtcatatttttttgtttcattactccgtagaaatgggaatcttaggttttcattgttgtgaactttactgttgcagtttctagctgtggctactcatccgcctgactcatacagtcacaagattggtattcctcttataggtcgaggcatcattcagatatggtgcattataaatgccacttgcaagaaagatagcggccaagtttcagataagggtaaaaaattgacaggaaagtctcgaaaacaaccatctggtgaaactactgaaacaacagaacctaagaagccgagaggcaggcccagaaagcatccagtagagacaacagagcctaagaaaccaagaggtagacctagaaagaagagtactgccgagttacctgttgagcttgatgatgacgttctgtacgttgaagctctgtctgttcggtatccagaaaattcagttgttcccgcaactcctcttcggatactacgagaaactccagtaacagaaactaaggtcaacaatgaaggttcaggacaagtgttgtcttcggacaatgcaaatatcaagcttccagtacggagaaagagacaaaaaaccaaaagtactgaagaaagttgcacacccatgatattagaatatagtgaagctgttggaaatgtaccgagcaaaccgtcctctggtatttctgaagacatagtagctcttccaagggttgtcttatgcctggcccacaatggaaaagttgtctgggatatgaaatggcgtccctcatatgcgggtgattctcttaataagcatagtatgggatatttagctgtcttgctggggaatggatctctggaagtgtaagctagttacttcttctcttctttttatcctaatgcattctgtgccctgcacgatttttcccttctgctttgatttctatcaccgtatgccatctgcaatgatgtagcacctttctagactgcatatactctgcaaaatgaacgaccttatgcaggtgggatgttccaatgcctaaggcaacatcagctctatatttatcatcaaagaaagctgcgactgatccccgttttgtgaaactggctcccgttttcaaatgttcaaacttgaagtgtggcgacacaaagaggtcagtaaatttcttcaatatttccagtttttgcttgtttggtggaatgaaaaacaaagcagtccttctatgtttttaagagttgaatatataattgattttcagtttccttatgctttatctattggctttctcttgatatggtgctcctctatttttatacagtattcctttgacagttgaatggtcgactttagggaaccctgatttcttactggctggttgccacgatggcacggtaattagtaaattatttcactttcttcactgactctatcatatttttgtctctgttttcttgcatatgtgtaaatgtattcaggaacaagaattgcagtgcttaattgcgttgacccctttatttttgttatcttgcatcaggttgctctctggaagttttctacaaccaaatcttcagaaggtaagacctgatatgtttgtcctgatgccagatagtttcttttcacacggtggccagagaaagtgatttcatctgttgatttcatatttacctttcacgtttttttgtgcagatacaagacctttacttttcttcagcgcagatacagctcctattagggcagttgcatgggctcctggtgaaaggtagtgacgtaaaatcacacccataaaatcaaactgtgaagaggattcgcttattaatcaaaagtaatttctgaaagttttccagtgatcaggaaagtgcaaacatagtagcaactgctggacatgctggtctgaagttttgggacttacggtacacttcattaaccttatcagctattacataattttctttaaactttgatgctcatgcaattaattaacaagactgcactgtttattcttttatttggctctccatagcttcttgcttacttcctatgttttttctgcagtgatccgttccgtcctctgtgggatttgcacccagtaccaaggtttatttacagccttgattggttacaagatccaaggtatcaatcactgttctatcctcagttgattatacagtctttagatcaatggtttgaagtcctgcttaaacatgtggtttcaaatatctgtagctgcgttctattgtcctttgatgatggaacattaagaatcctaagcttggtgaaggttgcgtatgatgttcctgctactggaaggccttatcctaatacaaaacagcaagggttaagcgtttataactgttcaacttttcccatctggagtattcaagtatcaaggctaacaggtaaatgttctttatgggcttgtctttgtgttcaaattcgtaatcatcggttcatcataataaataagtcaaaatataacttctcaggcatagcagcgtattgcactgcagatgggtccattttccatttcgaggtttgcataaactgcacaattacttcacctcttatgttctttgtcaatttctttgagatttcattttgtcttgttgggattccttacagcttacgaccaaagcagtggaaaaagacacgagaaatcggactccacactatctctgtggacagttgacaatgaaagattccaccttcatagtgcatagtccagttccagacatcccgatcgtattgaagaaaccagttggtgagaccggtgaaaaacagagatgccttcgaagtctcttgaacgaatctcctagccgatatgcatctaacgtttcagatgttcagcctctaggtcagttgaaaccagtctaaattagactgtctaatagatcaatctccggaatcacttagtccttaccttgaactggtttacttgatcttttcagcttttgcacacgttgaggatccaggtttagagtctgaatccgaaggaacaaataacaaagcagcaaaatcaaaggctaaaaaaggaaagaacaacgcaagagcagaggaggacgagaacagcagagcactggtctgtgtcaaagaagatggcggagaagaagaaggaagaagaaaagcagctagcaacaatagcaatggaatgaaagcagaagggttcccgcctaaaatggtggcgatgcatcgtgtgcggtggaacatgaataaaggaagtgagagatggttatgttatggtggagccgccgggattgttcggtgtcaagagattgctccaacctcagattggaaacctcggagataacaattaagtcccttgtaacaatacacttatataacatcttcaagtgtttattccaaaaagaaaattaacgtaggattttgtattaaaagaagattatttgcaagaaactgattcaattgaagaactttttgattctgcggtcaaaaaagggaacaaaccctgaaaatatgttatagaactgatcaagaccggaacggaacttcaagcgagaagcaaacagattccggatgatcttacaaaatggcacttttaactttgtgccaaataaccctaaatcttacaatggtacaacatttgctattaccttgtaaaaacaaaaccagaaactcccgaatactaatcttggataagtataacaataatccaacttttgtttggtggatgagtatgactctttgttttggtgtttatgtaagaaagccgaaacaatgcgaaaatgccccggacaaaaagaaagggatcatgaagtaccttcagtgttttaactggtaagatgaagaatatatgagttatccgacctgcatccgacattgacggccatggaggttcttgagccttgtgagttctttccgtctctttctagcttccgctgcagccaacgatccatgctttttctccggtagagaaatcaaaacatgatgaccaggcggcatcagtgtaactccattagttgtctcagaaacatcttcatgctttaaactataagcttgctgcgttacaggaaatccatctcctccttctgagaggacttcagtagcagattcgttgagatcatataaaggtctggtttcgggtgaaccagagtcctcttctttgattctagttggtagatgggaccgcggagtttctgtgacatccatcggtcttgcagaagaatcatcgatatggtgcccgtttgaaaaagtacctctttgtgtatcttgaagcccgaaaggaacaccattgctgtgatcaggaggagggagaaaccaagggcaaggtacaacgtaaaagtgagttttttgcccattatcatctgcagcattttcatgctcctgcgtggtaatagttttagcagaagctcctcccgaagtagggaattcaagtggcgatatcattggatttgatgattgagtaacatgaggccagcagaaaagctgatatggattctggttgtagaagtaaaacggagtagatgatgtagacatctcaacttgtgatggcttgggtgattcttcaggctcttttgtatcgggttttactgacttcaatacctattaaaacagacggtaaatcagatatagcagtgtgagcaatagtgctcctgatactgatatggtctttgatagattgtgtaacctgttcctttaaatgcttgttaatcgtctccaaagactgaaactctttcaaagcccaatccttttcctaccacagcagaaatgtcattagctataacaacggtctctaaggttcactcgatggaaacgtaaatcgaatagtttactcaccctcctcaaattctcattctcatatgtcagatcagctgcttttttactcaactcctcacacattgcctggatatatacggtataattaatacttaacaacactagtctactattcagctaattttcccaatatggaccttgttgatagaaacaaggcatcagtaaacaatacctgtcttcgccgaattgtctgcctcgcagattctctattagctaatatccttctgattctacgttcttctctttcagcctagagattagtattagcaaaagtaagttcaagtgtcacaaaaaaagaaatatggtagacaaaacttttggccttgtaataatcatatacctcacttaaattctgtcttgatcggccacaaccatttgatctactacaccttattagagtcgaagcaagaattggtttaggtgtttcaccattgatttcagatttaaccggagctttagttagttctttagttattggttcaacttcttcttcttcctcttcttctttcactaatcgttcctgttttagaaacatcttttattatcatcagattgttttaccagtagcttactaattgtaacatgttattcacctaatcagtgcaatcactatttctatctattcaaaatcgattatttggatctaaaacataaaagtttcacaattctaaaaacagaatcaatgaaagtgaggttctttgaaaaaacagactaataaaaaaaatagggaaagcgaagagacagaacctcagctagatccggagtaggtaacgtatcagagtcaggtggtttcaaaagcgagtcagaaggaggagactcagtcttgactcgcttcctcacccgtttccctttacttccccaactcgctgcagattcgaaaacctgctctcgcattatcgcaagctgcgctaaatccgccaatgcttctgccgcctccatctccgtcatgttcgccgccgcagtattctcctccccagaagaagaagaagacgacgagcaacaactcgatgatataggctccaactccatcgacaaaccaaaaaaaattcaaaacccaaaagattttcccaacaaagaaaaaaaaaacgtaaccagaagagaaaaaaaaaaaggttatagagagagagagagaaaaactgtaacttctctcgagaaagagagagagtgggaaaaaaattgccaaagaggagcccacagagggtgagagagcgacacgtgtaatgccagctcatcgtctacaattggttgcttaagtatagcccatgtatctgtgaccgccacgtctcgctttttgttaccaagtcagcatactcggcacgtgcggagttgattcgtgcgtgcgaagccgagaattgggaccgccgcgacctcagaactgggaagaggcgcagagtttaagatttgcaaggtcggttttgagagttgctcagattgcgacacgtgtggtggttttattggatatttacgtggcgacgtctgagccatgagattcagtggtgaataattacggctgaggtttttgggtgcatccaccaacacacaatcattttggttctagacctctttgttggacatataaatgggccaggtaattggccggttaataacaactggcccgtcgcaatcatagttgtgatagtgatttacggttttattagttggagagctcatgcatgatagataattgtcacagtttatggccgcctagtctctagagcaagttttagaacattgccacattggtatagatgttaacggatatagaaatgggcctagtaatgtatgataatggccacatccttgtgaaactaaacgttgtcgcacatatatttcttgagaattatgcggtatgataagaggaataatcaagctaatgcattttgtttaagagattgggttaccgtttacatatatatgcattgaagattaaataaatataatcagttacacataagtcgatttgggacctcttttggtattaaacacaccacaacttaaaagaattttgtgcattcctccttttagaagtggattccccattccctgaagaaagataacaaatcatatattaaggagggattatggaaattgattattaaaacaaaattggtgcttacagttgataaaatcataaaaatttaatgtttaacctaggcaaattactattaaatagatacagaaatcatggtatcatcaaatagatttataacgccatgggtttctgtggtgttttgtatgaattatcatgttactatatatcgaatttagattcagtttttgtgttgtggtgttgtatcgtaggaactaaaaattaaagttacgggatagtaaaagtgatttttgtaccaaaaagattaaaaatattcaaaagaatcgtagacatacttggctttatcaccgaaccatccgtaaacggatttgaaggtggatgatacggtgtcgacggcttgtgggccgccgtgttcattgaatgcatcggtgacactcgtcatggcggagtctaccctctgcccaaccgttggttcttcctcggccaagatatccaccgagtttatcgagacaagtagcattaccgacaacagcacggccaccgatattttcgccatcctatctccggcaaacttttttgcttcttcttcttttattggtttataaaaacaagaatgatttaataactagaggtagctcgtaaatttgtcttaagcttgtaagaaacaaaagtctatttgtttacgtacgtgtttttcgtgtttcgtttggtttaatttgaagttccttatttatatgtgaaggagatttaaaatttggttttatttactggtggaacgatccaacgttggtagtggttacgccgaaaatagtacgacgtgagatggctttagtttcatgccagttccaaattaagcaacagttttatggttttcgatttcattttttttttgggtccatatagtgaattggtgatattcgtttcttttaaactttattataaatgctttatctctaagaaatttaaaacgttataaatgtatgcaattacatgtgatgtttaagctttagtttattttataaacaaaagtgattgttaaaatatttatcaaagctctagatcgagatgctaaccagctgatgattggttggaggattttgcaggggaatattcaagtctttgcatttgggatttcaatcatggtacaatgtatacgtttttaatggtaaaaatactctcattttcaacaagttttggaaattgagattacgaaatggaaatcagttgttttactaggtggaatagatgtgaaccaactatactgtataatgataaatccccgtccatagacaaattaaaaaaataagaatttgacaaaaatagattagaattataaataaacaaaaccaaaatagctagatgatttgttgtgaaataagattaaacagagcaaataagaaacacaatgaaaagggaatgatacactcatcagtataagaaagaagaaaacatatccctttgaatccttagacatatagcaatcttcacatcatgtaacaacttcactggattctcatattcttcattaacctgtcaaaaaacaatagattaattaatataacttgacactaagataccacttttgttgatcaccgaccagtgaaaaatcagaatcacttttgcattaatatataccgttatatttaatcgtattcgaataatatagaattagctagatatatacatatataacattatatcattcatataagattcaaaagttgaggacaatgtgcatgtgatggtgcacaaacaggattagatttcatgtgactcctttccttttaatgagaatgccggaaatagaagggatggtgcgtgtggttgcatgtttcttattattatacctatattattattattatatagtccaacgttcatcactagttttaatatactactaccaaaagaactcatttatataatcagattttgaaattatttgaactaaacatatgtttctactaaatcactatagaaatcacaaaaacgaccacaaactctaaaagatttggtaaggacaaaaagatttcacctcaaatcaaaatcatcgatgcctctagatttacttccaacatcgacggttttgtatttaggcaaaggtactaagtcttgttcgatgttcatgagatcttcaacgaggatgtcgtagtgacgtttaacttcctctgcagatttacttccaactgctttagccacgttttgccaacggtcgggagtgtctttatcgtaaacggctaaagccctctcgaacatcttgttttgcttagacgtccaagaagagctcgagctcatagaactagaggccattttatttaaattcttttgggaatatatgagatatatatagggaaacaagaaaagagaaagaaaagggatcgatactaagttacgaatacaaacgaatgccaaaataggctccttatatggaggaaaagagagttgagagattccgcaagttgtagtgtttatccaatatttttttagtttgtataccaaaataaagaattatagttctttttatgggtctacattttttaaggtccataagggttttcagagcatagtgtcgtattgtatgaagaatgtcgagaagtcaaccgttaattaacgctcgtatgtgttcttatgaagtttaaaattagtaacctctttaaattatagggtttaagcgtttaatggttatttgttgagcctatgacttgcagggtacgtagtagaatcatctttggttttaacataataacgtaaaggaatcattaaaaactcaaaagaaaagttaaagacattggtattcatagaaaaaaagagtggacaaacaagatcccgtcttttatactccaatgaatcagattcaccttagctataatgtaagtacgtacaaagttgtgctaagacgatgaattatgatagtttattcacatacgaaatagtttttgttaaactggtaaaatggttttatataatcatcgtttgatatgaaaagaaaaagaaaattccttaatatcgaattaatggattcgatatgtcatctcctgtactaaacttcatagagatttttcataacttttatttgttattaacttattatcgattaatatacaataataataataatttgaaggagatgggatcgatactcttgggcactttgttttaattctaataacttatcccgtgtgatggagaaaagtaaatttggacgacaaccattttgataagagccacttaaatttagctgaaaaaagaataataccataagagatattatcgtcttcttttgggataaaattccaatatccctatctctgcattgattctcattcatagttgtacatttttatccaatcctttcttgttttatgaaaatgaattcattttaataattataagttataacaaattatatgttttttttgtcaaaaatatagtaaagtgtatgtttcattatttctttttcttaacagaaattatatatgtataattgattctgataattatacaagaatttggagattcagtgtggtctcatagcataataatgtctttttgcaccattcctctatggtgcagcaaaaacaccacataacgtttattgtgaaaagttttaagacacgtcgtactacaatctcttccaatataagttagaagattacacgactcatctaaattatgtggtttttactccatattgactagagtgagagtgatgaccacaccattcaccatatcctactctctataggtttttgttagctatgagagaaatagtttcggtcactatggcaaatttaatcccgacatgaatgaattatgatgttttggtgaaggacatttttgagaacaactaattgagtcttcatagataatacatgatccgagtttggatattggatgcacgagtttttgatgtagtcacctttgttatcactcattcttactcaagtactaggtaatttgtttttagtttttagtattagttactagttagaccattttattttgtgtggattgtatattactatatttgtatgtatcatttttgtgcttactatatcaaagaattgccatgattaccgcaactatacgaaacctttatctacttctgacttagaaacactagttacaatttggaaagaacgcaaacttatttagaaaaatgcactcacgccgcctaactttgacatacagtaaaacctctataaattaataatatttggaccaataaaatttattaatttagagaggtattaatttatcgataaataaataaaattgtacaaattttgtaaattcttacaaaaattcgatataaaatatagtttttttccctataatcaatagtatttctaaaaccaattacaagtagaaagcaattattaagtttgaaaaacaatacaattttttcgatattgtaaaatattagaattgaacactacaaagaattaacaaaaattgaagaaaaacattactagactcatattttacatatgatatttataatatatattgataaatttatataattattaatttatactattgatggaccatataattatataagattttcaaaaatattattatcttattaatttatcgatttttatcaatttttacattggtcccaacttgctcagaatctgtgctcattcttatgcattctaaagaacttgctcagactctctgctcattacagcaaaacttctataaattaatacttgaaaaatttattaatttttcaagtattaatttatagaagttttgctgtatatgtttggcttatgatgtgtaatttgtttgaaattggagggaaatgatgggactctgagcacagggtcaaaagagaaactttagaatgcataagaatgatttaagtattatttctaaacttgagggttctttttgaaaattacaaataaacggcaagccaaccctaattcgagtcccatttctgtgatcttgacctcttcctttctcactcaatttctgagctaaagttagggttttgccgagatttatcgtccttctgttaaactcttcggagaaagatgaaatctttcctcctctctagacaagcgatccaccgtatttcactattatcttcaaaaaccccaactttctgcagaaacttctccgccattacatccaccatttctcactctgatcgtcatctaagaagctacgacgaacaaaccccattccaaaatgtcgaaatccctagacccatttcatcattcaatcgatatttccactttactcgcgagtcccgactcagtgaatccagtgccgccattgacgactcaaatgaccaagaggaagatgacgaagatggaacaacaaacgagttcctctcacgattcgtttggataatgcgtgggaaagtctcagaagcttacccagattgtgacaagaagatgattgatggtatgcttctgcttattgttgagaaagtcgtggaagaaatcgaaagaggtggattcaataaagttggatcagctccaccttcaccgtcatcggagtttagcgatgatctatgggctactatctgggaagttagtaatacagtgttgaaagatatggagaaagagaggaagaaggagaagatgaagcaatacgttcaatctcctgaagtgatggagatgtgtaggtttgctggagagattggtattcgtggtgatttgcttagagaacttagatttaaatgggcaagagagaaaatggacgacgctgagttttatgagagtttggaacagcaacgtgatttggataattcgattagggaatctgaaactgtggatggagaagtagaagaagaagggtttgttccttctgatgaagttgaatctaggagtatctcccttcctaaacgaaaggggaagttgaagtacaagatctacgggcttgagttgtcggatccgaaatgggttgaaatggctgataaaattcatgaagctgaggaagaggctgattggagagagcctaaacctgtaactggaaagtgcaaattggttatggagaagcttgagtctttgcaggagggagatgatccttcagggttgcttgctgaatgggctgagttattggagcctaaccgtgtggattggattgctttaattaatcagttgcgagaaggaaacactcatgcatacttaaaggttagactttagtttcaatcattaaaatgacttccgctagattgttcttctgaaattcataatcaaatcaaactttgatgcatatttgtttgttgtattggcctacttctatagtgttggttcttgactgatttccccaattgttcgatttaagcttttttgctaattggattgctatggaggtcatttgatggggtggaagttctgtggtttgatttcgttacttcttttaatgggattcttgttgttgttttatttgttactctaggtagtttgttcaatcaagatggtggtacttgtatgcatatgtctaacatgggtttggaagagatgatttttaatcaattggtactggttttgatgtttcaacaggtggcagagggtgtcctggatgaaaaatcgttcaacgctagcatctcggactactcaaaactcatccatatccatgctaaagagaatcacattgaagatgttgagaggattctaaagaaaatgtctcaaaatgggatctttccagacattttaaccgccactgcgttggttcatatgtacagtaaatcaggcaactttgagcgagcaacagaggcatttgaaaacttgaagagctatgggttacggccagacgagaagatctacgaagccatgatcctgggctatgtaaacgctggcaagcctaaactaggtgagaggttgatgaaagagatgcaagcaaaggagttgaaagcctcagaagaagtttacatggctctgcttcgagcttatgcacaaatgggagatgccaatggagctgcggggatttcttcttcaatgcagtatgcatcagacggtccactgagctttgaagcatatagtttatttgtggaagcatatgggaaagcaggtcaggtggataaagcgaaaagtaactttgatgaaatgagaaagcttggccacaaacccgatgacaagtgcattgcaaatttggtccgagcttataagggagagaactcattagataaggcactgagacttttgttgcagctggagaaagatgggattgaaattggtgtgatcacttacaccgttcttgttgattggatggctaatcttgggcttatcgaggaagctgagcagcttctggttaagatctctcagttaggagaagctccaccatttgaactccaggtgagcttgtgctgtatgtattcgggtgtgaggaatgagaagaagactcttcaagctcttggggttttggaagctaagagagatcaaatgggacctaacgagtttgacaaagttataagtgcgttgaaaaggggtgggtttgaaaaagatgcgagaagaatgtacaagtatatggaagctcgaaagtttttaccttcacagagattgcagatggatatggttgcaccacctcgagcttttgggtctggatctggtagagtgagacgatttaactcgtaagtggaaaaatcttttgaaacttattcaccatcgtgtgttcaatgttctgagccaactcacattacgagtttccattgattaaactgtagttgtgttctgtaataatcttgttccttggaattttggaatctatttactgcttctttttagctatgagatttttcttataatccatttccaagaagaactcttttctgaaatcaactttctatttggtttctcaacattttccttcgtttcttccatctgaatgtatttttcatggaaacgatcagtttcatttcgtgtccgaaaagttattatgtttcctctttcatagagaaacatataaataccataggttctctcttttgaacattctcctctcggatcattacaattttgccaattattgacaaaatcgcctaaaccgatcacagtgtaggccgggacaagattgatttttattaggaaaattaaacggatacttgaatttaatttcttttgttaactaactttgtttctttgtgatctcaatttccttttgacgtatacctcaactttgtaaaaagcgaacatacaatttcttttatcaagtagatataacttcaagaaattcgaagagataatgtacatgtgtgaattgtgatgtgtctgccacgcatcgtacacgtgtcgctgtcagcaatgaaaaagtcagaacaatccattaacgagctaagacaaaaacaaaaagtgttgaatccagttgtttatgcaagttaagccgactaatttagtattgttatgcagctaaatctgttttggatcgaagtgtccatcttaaacaattttccaaggttatctcctcgttacgtttgatatcgatcgttccacctcaaagacgaaacttcggcatcatcttttgtcatgttttagtttgtatccttgtataactgtattgctttcaagaaatttcatatttcgttgtctatctaaaactttggaatcaggaccaaacgaaataaaatgggatccaaaactacagatgaatttactgtactaaaaataataatcgtagtcgtcgtaggagacaagataaggttggaaagttaatatcttctctgtctatagattttaataatttaatcaattccactacttaaatcagtgggctattaccggagttttccaaagccaaatcatgggatttagttttctcaagttatacgaacttggaccgaatagccaagtaaatatataatattaataaactaaacacaaatttaatatctttgggggataagaattatctagatgacttgcatactttgcatggagcactatatatagaagaatgttaacacatgatcctaccgacattaatgtttactaatcagaaaatcaaaaggacaattggaaaagattaatagcaaatgggttctttaatgtcaggatgggactctcgagtaagggatcccaaatcaggtaactaatatcatcatgtatattatattttggattaatattcatgcatgtatgagattatattgtatgtttgattatacaatagaaactaaaagatgatttttaacataaattcagtgagaaggtgcaagtcgctcacaagagaagaaatcgacactttttggaaaacgaagaagaagaatgaagaagaagaacatgttcaagccttttccaagttggtaactcaggttaaaaccaaactttaaatttatttatttcttatttcccaaggaaagagacaatatttctactatcagtgatcttagtgaaaatcagagttcgactttaaaatttaccaaaaattattaaaatgatctaaaaaaggctttgaaattgtttgcaggaaggtgcacaaagccaagcgaaagagaagaagagtgtagatgatctttttgagaaccaaagcaagagtagtggatggtaattttttttttgtgcaaaaaccaatctcgtaactaagttctttaagagatatttgaaatgataaactgatgtggttggtcaggtggagaaaaacctactgggcgttcttgaatgagccgagggaggaagagggtcgaccgaacaactacgtgtcgcaattcaaagttgctcacatcgccaaaattgcgggctcgtaatgacgctataatcaccggctaatcacatatatatctcgtgtgaaatgcgattagtcgtctgccgttgtggtttaatcaccggctaatcacatatatagtatgttggccgtgttagtatgtgaatgtgtgagtagagcatgtaacaaagggtgtacgattttaatgtaagaatgtgttttactttatatgtgtcatgtatgtatttttttggttgtgtgagggtgtaatttacttttcaatggatcttcttaagtcttttccttgatgaaatagcgtgtgcttatgaattacgggagtcttgtgcatgataaaaaaacaaagatcaataataggtgatcatgaagacttttctgtttgttgtttccaaataacatttttacgccattcataacatttgtctaatctttatttatttttcattttaggaaagattgtctaaaattttgttcatatgtaatcttacgtatacattgataatacatttcatccaatttttacaatatatgtactcacttacaaatttcatatagtttacaaatttttataagacacgaagaacaaatatatgtaaactaaatcacaatagtagtggagcatatatagtagagcaaatttgttggatatgttaaaaggctattatatgtatttaggtagattgttagtaacttattttgaattcttttttagaaattgtggtagttttcttaattttccctactaattatgtgatttttaatatataaaaataaaaaagttttgttttgcagtttctggatttatttgtgatatcctataatgatataattatgcaatgtcaccaaaaccaaaaccaaactctaaaagtgaatcatcaatgtgaatgcaatagctgtcacactctgtgtctgtgggtcacaaaagggtactttggtaattatataactcggggccgttcggttcccaccgaacgaaaatataaaaccgatcaatctgagacggttgattactctcacttcagacttctcttcaacgaaactagccagagagatgacgagcaagattctagttatcggagctacaggtctcatcggaaaagtcctcgtagaggaaagcgccaagtctggccacgccactttcgctctggttagagaagcctctctctccgatcccgttaaggcccaactcgttgagagattcaaagatctcggcgttaccatactctacgtacgtagtaatcctcttctcatgcttgtgcatgtcttattctaaccttaccttctcaaacactgtatccaatctttaagatcttaattaagttccgtttcatcttttaagcatttatggaaacttattcaattactagtagtagttaagttggcttgatttttgattatatgtgattttagatgaattttcaaaaaaatgttaggaaaagatattttaaattgttggaattatttacaaaaagtagttactaacttttaaagtttttttttaccaaatcatcacgtgaataatggtagattttactaattaatgacgacagggaagtttaagtgataaagagagcttagtgaaggcgattaaacaagtcgatgtcgtgatatcagctgttggtcggtttcaaactgaaattcttaatcaaaccaatatcatcgatgccatcaaagaatctggaaatgttaaggtccgttttcaggcacatcctttctaacaggctctacaagaagatctcactaatattttctgatctgtctgtaactaatctttttcacatagagattcttaccgtcggaatttggtaatgacgtggatcgtacggtagccattgagccaacgctatcagagttcatcactaaagctcagataaggcgtgccattgaagctgcaaagataccttatacgtatgtcgtctcaggttgctttgcaggtctttttgttccttgtttgggtcaatgccacttgcgactcagatctcctcctagagacaaagtttcaatctatgatactggcaatggcaaaggttgtgatgtcccttaccatcatcagatacttgtgcaaaatttgcagttgtggttaaagtctgtgattctttcctttttgttgtagccattgtcaacactgaagaagacatcgttgcatatacattgaaagctgttgatgatccgagaacacttaacaagattctctacattcacccgcccaattacattgtatcgcagaacgatatggttggtttgtgggaggaaaagatcggtaagactctcgaaaagacttatgtttcagaggaagaactcctcaaaaccatccaaggtgatcatttaaaaccataaaaacagtttttgatatccaatattcatcagtccaaagtactaaagtcttgtttttatgtttggtctttacatgcatttgcagagagtaagcctccaatggattttttggtgggtctgatccatacaatccttgtgaagagtgactttacctccttcactatagatccttcttttggagttgaggcttccgagctttaccctgaagtcaagtacactagtgttgatgagtttcttaaccggtttatctgaaaaaaacttcgtccattattttgtgtgtgtagctactgttaattcgagtttcgatatggacgcaaatcttatttcaagctagtctccttatttgatagatacaaatacataacataaaaggtccaagtacattatttgactgatataagaaagagaccttgaacagcattacaacaccaacaatctcataacggtgcatagtttcaagggttgaccttgggagcccatccagagatcacacacttttcctcggtcttagttttctcaaaagagtcgagcgagaacagagtcttcatgtagttatggacatggggaaagctctcagggacagaccagcttttgaaatggccaagagcaacttgaaggtggtaaagctttggtgctaagctaagatccaccgcggaaactctttccccggcgataaaaggaccatcgtgactcttgagatggttctccaaagcttctagctcaacaagaaaggcatgctaagattcatcattggatctttgctcttcaagaaagtcccgaaagtaccgaaaatgttggagccaacagaggcaaattcagcaggagtcttgagaggtggatcaggatacttctcctcgaggataccaacggtggcgtcggaatcagtcacccacttgtcgtcgatcttaagcactggtactttcccttgaggactaatgtcccagaacatctcgtgtgatggagaagagcaaatttggacgacaagcattttgataagagccacttcaaatttgctgaaaaaagaataataccatattacccatcaaatccaatccaatggacagacaaaggacgaatactcttgacactcaaatcaaagttacagcaacaaagtagtagcaacaaaatagtaactcattacatgagtagtacatataattgacaaaaaataaaaatgtagctacagcaccaaagctctgaccactgccccgtttaataccaaaagtgaaagcctaactttcccatttattcttttcttttcattttcaactttcaactacacaatgtatgaaaacgacaaggaggatgaaatcgacacggcgttctcttgaccattaacaaaatgtaggccagtctaaaaaaacagagcatttgatgtccaaaatgattttacaatcttcacagctcataagatttgtatatttatcaaatgcttgcttccagtaatagtaacaagattttttttttaaattataaattttgattcttcttcctatcaaaaaacttttacccataatatattgagaaatggattattctatattctagatccatatgcagatatctatattattaaaaagaaagtttaaactttaacgaaagaagaggtaccaattgaggagaattttttttttataagttacatattatgaagacaaacaatttatacatatcttattcttaaaaataataaattttatgtttacatgttatttttgagacgaagcaaccaatcaacaatgaatttgttgtaaatcaacttcagataaatcactagcaagcgcaatttgttgtaaatcaacttcagataaatgcgggtaccatgcggacctcttttttgaaacattttagagaacaaaatctctcaaaatacttcaaaatggatgggaattgacaacgtgaatgacaaccactacatattggtcgagtcatacgattattaagaaacacaactggggatgactcatcttcacctctcgttttcatccatgtgaagtctccgagggtacatttgatatgaaaagtaatagcacaatgatcacatgtataaaaccatttctttggatttaattcttcttcgcatacctcgcaccagtacggctcactcgttttttctccgtagcatagagacaaaaaatgatctttatcattttcatgtttaaccatctttggcaaaatagaacatttaaggtccaaaacaaattcacactgctcacaactcataaccatatttgacttatctccacatgtattacaaaacttgtctcccgttgaatagttgatgtataatgaatgaagaggatgactttcatggataaaaggctcagaaatagaaccacatcgcacatccaagtatacattactataatcacttttgtacgtaaaaccattatgaacgttttgacaagcattgcaaatgttcaaaaagcctcctgcgagtcttgtggttaaagtaattggcatcttgtagaaggaatctacttttttttttggcagataagcacaatttttatgaaggatgaaatcatcacattccatgcaactatagaatgggctaaacaatataggatatgtgcatactttacaccagatgcaatcatcattatcactttcttctttgagctttaaagtatgacccttgtgactgaaatgttttatcactccttctttgatcacttcatatgatctaacctctacaattttttctggtatgccttcgagttcaatcctatcccaaatcccggaccttgtggcacatcttacatgataagcaaaattaggacatttcaaacaagaataagccccatgtgtccattttatctctttatgacacactccacagttccaatttccgacttcaagacaatgattataatgaatacgatgatcatgacgactgatctttatgacgcgtggtatgtcaacacacttccgatggatcatgaaattgcatggaatacatatataaggatttggatcgtcatccagtccacaaacattacaaaaaaaagttctttgcggcataagagtgagtgaatgtttatgagccttaggttgaacaagagtgaaagggggtggattctttgcacaatccacatccacactaaaattacaaatagaacagctatagaacacgttatgaagtttgtttccacataaacatttttccatctgagtaatttggaacacgcgtgaaacgcttgagaatgtgactaggatgacaagagtagttgatctctggtgtggattcggcgcaatctttgtgaaaactcaaatcacataaggtacatacataagggaaccgatcatcaagccgtccacatagataacaattaaacataaccatcttcggaataagggataaacaatgctcgtgggtttctggactttgaattattattttaacttctttttttgcacatatcaaatcgatagcaaaatcacatgtagaacaataataatatatttttggcaagttacctctacaaagcttgcattcttcatcaacattttcattttctgcaactactttgataaacaaagaatgttgtggatgatagaggttatgaatctctatattggagtgggcgcattggctatgaaagaagaatccagaacgaaagcaacgatacccatcgctataatagtctttacctagattgcagccgtcacattttagcccacgcgtttttactagtgagtaaatttccttttagtatttccatagatgaaataaatctatgcttttacttctagttttgtatataattttcttatgttttggtttatgtaacgatgatagctttcagtttatatatatagagtgactatattgagtttcccctttcgacaaaaaatatctatattgagttatactttgtttagatgaaaaaagacctccatagaattatgcttgtcttaatattgaggataatatagacttaaacgaatacatcttatttattctttgtttaactaagaggaagtggaagccccctgccccattaaaaattttattctttggttcagatacgttaaaaaaaatttaaagatctttaaaaagtatattaaattcaaaataaataaaaataaaaagtgcaaaaataactccaaatgacaaaaaaagagagtgtaggatcaaccatgaaataagaagaagaaaaaacaaacttcaacctaaattttcttagactagctagccaaaacgaaaacggcatggtgttctcctgacgattaacaaaatgtagccgccattaattatgtttctacacagccaaattgcgattaaggtttcgtgtttattacaattgaatgaacttagtgtgtttaagttctctttgtagttcccaaaacacattttaattcccaaaacacattttagttcccagaaagacatcgaatacaaactttgaccagaaagtatattcaaaaaaataaaacgacgttcgagatatggaaataacctagtcagtagtaaagtctcacccccaaccttccacaatatcaatttcttttgcaccgtttttctctgtacgtaactgttcactctgctgtgaaagaagctcgagcatgatgatcgtgacactaaaccgtccaatctccggaggttacgacgtttaattaaaaggacattgccactacatagagttccggttttagaaagcttgcgtctcaagttttgtactttaccatttcaaccagaagatatcaaactatgcgttgaatattcttctcatcataacaaatctgctacattgccaatttgcttgtacacctgcaaatcgctcgagaccctcacattctgtaatgcaattctcatggttgttcctcgtatggcttttcttccatctctgaaaaacttgcaactaggacaaattaaaggacgaacactcttgacattcaaatcaaagttacagcaacaagtagtcgaaagacggggatgtacgagagaagtcattaactcataaacttgagtaacacacaacaagcgaaacattgagaaaataaaaatgtagccacaccaccatctggagaaacaactctcaaatcgataaaatgataatacataatgggacgataggatacttgttatttggaacgcatcaacatcttgaattcaagcgacatctggtttggtattctagtcgttgttctccttatgacagcatggtagggaaaaccgtgacggtttgaaaaggtaacgtagaagtttgcattcgctgccttggccttcatcgtcagcttcggctcccaggtttgcacaattacatatattagctccaatggctttgcccactccactagcttaatagatgcccagtgggagaacaatgtgatttccgcgtacagaagaaacaattcctggtgtcttccatctctgattttctcaacaagtagaatttcggcttattaagcataaacaagagtaagaacgtagtagtaaattaccaaaggtggagccgcccagtctaccgtctggggatcagaacataaatctttgtagatttcacattccggcctttctcccggagccggttgttgatattttggtgaatcgggtgattcatggtcagcatgacagctgtcagttggtgattctgaagagggcaaggatggttcatattcctcctccggtgtaacaaagttgtcatctggatagccttcagattagaaacctcttacacgtccccgctcatatgggtacggtggatcaggaaaaacgacgtatccctcagaagaagagaaaaaacaatttgatgcaaatcatgaaaatcgctggtcatccacaataaaatccgattaccttacgactgctgacggtgcgactataactgccttctcccaggaacattcttggaaaatctcacccaaccctacattcacccgcccaagaacattgtatcgcagaacgatatggttgatttgtgggatgtaaagatcggtaagactctcgagtctcgacaagacttatgtttctgaggaagaactcctcaaaaccatcaaaggtgatcagttaaaccataaaaacagtttctgatatccaatattcatcagtccaaactccaaagtattaaacgagtcacttgcatttgcagagacccagcctccaatggatttttttgtgggtttgatccatacggtccttgcgaagagcgactttacctccttgactatagatccttcttttggagttaagacttctgagctttatcctgaggtcaagtacacaagtactgtcgatgagtttcttaaataatttgtctgaaaaaacccttgtcccttatgttacgtgtagccagtgtttatccgagtttcgatatggaggcaaatcttatttcaaaataggcttcttatttgattgatacagtacattacataaaaaggtccaagtacattatttgactgatataagagagagaccttgaacaacattaccacaccaacgatctcataacggtgcatagtttcaagggttaaccttgggagcccatccagagatcacatacttttcctcggtcttagttttctcaaaagagtcgagcgagaacagagtcttcatgtagttatggacatggggaaagctctcagggacagaccagcttttgaaatggccaagagcaacttgaaggtggtaaagctttggtgctaagcttagatccactgcggaaactctttctccggcgataaaagggccatcgtgactcttaagatggttttccaaagcttctagctcaacaagcaaggcatgttcagatccgtcattggagtctttgctcttcaagaatgtcccaaaagtaccaaaaatgttggatccaacagaggcaaattcagcaggagtcttgagtggtggatcaggatacttctcctcgagtataccaacgatgacgtcggaatcagtcacccacttgtcgtcgatcttaagcactggtactttcccttgaggactaatgtccaagaacctgcatcatatataaaaccaaagccaccaatttcaagttccggttaacacaatgctcgcacatgaagccaatccaatttccggttaacacaaagctcgtaccagttacaagtaaaatttcagagattatggctaaacaagttcaaactagaccgatcttaagggtttaggcgtgagagaaactgaccactggggtttgtcagagaggttaatcagatggattttgtaggtaagactcttctcctcgagtgtgagaagagcccgttggctgaacggacctaaaacgacaaacaaacacttaaattagtaaatttaccaacgatcaaagctcagaaattaagaattgcaaaatcaaaagcttaatgcaaaacaaaaacagagagagaaagagaagatggttacagtcgccgagatgatcaggagcaccaacagcagctttcacacagatttccagagccatcttgattcttcttcctttgtttgcagagacggatgaatgattgagttaatcagtgagaaggcttagcttttaaactgaattattaccattctccacccaccagtgggccatttttacccgatgtttatcttttctcacgtgttatgcgttgcaagtgacgacgatacgaaacgacattgttactgatagggccatttgatttttggtcggcaggttttggaccgttcaatttagtgaaaatatagtaataaattcgtaccgaataatataatcggtttaatgaaactactacctgaaatatcgaattagatttggttcatatttcgtattgttttggttcgattaaaccatattaaaccactgtaactgtaatttattgtttcgccgtcccggaatgttcctgttgaaatccattttcgctgattttttttcttccgtctcttcttcagcttcgaccattttcgtcttcttcattcagtgttgagtcctcgtttacctgtgagctcgaagaaagtgacgatcaatgggaaccctaggcagagcattttactcggtcggtttttggatccgtgagactggtcaagctcttgatcgcctcggttgtcgccttcaaggcaaaaattacttccgagaacaacgtaagattctgcgtaactctatttttcactccgatttcgaattcgtaaagagtgaggagtttcgattgggtaattcagctcacctattctggttaggttagagatctggaattgatgtctttgtaggtatagcgattctggattcgaatggcacaagggattaattgatgtggaatgtgttttgctgcttagttttttttttgtttcctggtcacgaaatttgcttatatgtaattgtggttttctctgtgtagtgtcaaggcatcggacactgatgaatgtatttgataaggctccgattgtggacaaggaagcttttgtggcaccaagcgcctcagttattggggacgttcacattggaagaggatcgtccatttggtatggatgcgtattacgaggtgagctagctactaagcctcaatgtttggtgtttggtggttgactattttagtgactgaagttttgtttgaaatagtatctacttctgtatccttagctgtgtcaactcttacgatagaaaatagtgaacgaatatctgttttttactcttctggttaagcgatgaacaagactactactcaaaatggagctttctagctttattgaaggatcttaaacagatcattactacatatcgtatcttgatgatactggcagttgctctaatgggtgattgggtatatgatatccccaatcatatacagaatgctttcatgtcataacaccagaattagttgaacgatatcatatacagattattgagtttgagttgaatccttattgcgagtatgagttggctagtctggatttttatttaatggtgatgaaatagggttgtcctttttacagaatgctttcatgtcataacacattggtactgtatggctaagcctgttagtactttaccaggaaactgggataacatacaatctaaacttgctttctctctttttttctgcgcaggcgatgtgaacaccgtaagtgttgggtcaggaactaatattcaggacaactcacttgtgcatgtggcaaaatcaaacttaagcgggaaggtgcacccaaccataattggagacaatgtaaccattggttagtgggaatctcttactcactgtttattttgaaaatgtttaatatgcatacatctccaagaagcatttgggatatagtcttaaattaaatgtgtaacaggtcatagtgctgttttacatggatgtactgttgaggatgagacctttattgggatgggtgcgacacttcttgatggggtcgttgttgaaaagcatgggatggttgctgctggtgcacttgtacgacaaaacaccagaattccttctggagaggtatgattttgggtttaacatttctgattacctgaaaacccacaagtaaccattggtgcgggtatacttctattgctacttagacagcataggctatattattgacattattagtgtctttctttcattggctgaaagtattggaggttggtgtgaaattgaaatacagtttctagtcttgagaattcttctcctctatctggatagaacgtatcttatccacttttcagatgccctaacagattataaatgttagttagatgaaagtggaaatgttcttctagctatggtttatctgcatatgaatgccaaagggtgttagtctctcatcatggccttaaaatttacttcatccgccatattgactgacagagttaaaatgttcgcattggtctataatgactcaggtatggggaggaaacccagcaaggttcctcaggaagctcactgatgaggaaattgcttttatctctcagtcagcaacaaactactcaaacctcgcacaggctcacgctgcagagaatgcaaagccattaaatgtgattgagttcgagaaggttctacgcaagaagcatgctctaaaggacgaggagtatgactcaatgctcggaatagtgagagaaactccaccagagcttaacctccctaacaacatactgcctgataaagaaaccaagcgtccttctaatgtgaactgatttttcaggggtatgttttctggccgaagccctacagggtgagatactcaaggggattatgtttcggtctctggtttgaatatggcaggtagagtacattagggtagacggatttacagcttttgaagaagctatgttcaacattttttcatggtttcttagggagtattattgtctaatcaaactttgtatgttatcacttcggtcttttgaacgtaagaatcaagttcatgaaacatgagtgaatattagtctgatgcatgtgcgtatgcaaaaatccatgtgcgcctatgttgctaggcaagcatgaagaataaagatccaaactggatatatcatatatttatctttttataattactgcaaattattagtggggttgatggtattggtaccgtgaattacgcttgcttggtcgtctttttatttttttgataaaatcaaatcttgtatcgtgtatctattattatgattcgtctccttccttttgtcaaaggccgtttcttttcttgagatttatcttttgttttctagctttctggctgtcgttcttttaggattcaagtattcaaccatttgttacaataatactaataattggatttctcccttgtcactttgtagatctcaactaatgggccattttttctctcaatttgaaccacgagacatggtgttggaaatttgaaacggtagattgtgtaaaatgttcaccaacttagacatcgcaagccttataaaacttacggtaaacagatcaaaaatccttacaaacaatgaccaaagaaacagtacgattttgcaagctgacggaatttacaaattgcactaatctatatcatagtttcatgtaacaacaacaatgtttttagagtttataataagaaaaattttaattgatgtaacaaaaaaaaatatgtagtgtgggaaactttaaaacatatcagtgagtttagataaaaatttgaaagttttaactacaattactaaatgacccacgtaatagcgagtcgtaaatctacaaaggatacacaacggatcgataatcaaagcatataattcggagctgataatctactatggccgctaggttgtgtactttaaatggtttccatgattgtatatgtactacatacaaattaaaagatatgataagtctaacactaatttaacatttcaaagagcaatgaggctctttcaaataatgaggtttttgaatcattgctaatatcttaaccatagtttaccatgataacatttcacgataaagtacttttgatcatagaaaaatgttaaataaagtaaattcttaactttttttatcatatgcggcacaaaatgtaatgcttgatgcacgaaatgagatgctaaattacttaatgcgttgattttgcacctctccttttcattgattcactttttgttaaaaaaactgttaactatttgttacactcaatgacacgagtgaataaaacttaaataattaacaggaaacaaaaaagcgtagggaatttatctgatcagttattactgacctataaaattttaaataaaataaattcttaattttattttatcatatgctgtacaaaatgcaatgtttgatgcacaaaatgcgatgttaaattacttaatacgttgattttgcacttctcattttcattaattaagattcattttttatcaaaaaaaactactattaactatttgttatcctcaaggacacgaatgaataaaacttaaatcattaacaagaaaacagatagcgtaaagaatttatttgatcagttattattgacctataaaatttgatttgatttatgtaagggtagtttcgtaaatatccaataaaccatcatcatcttcttattcctggctttcgtctccacccgccgtatatataaaacctgagacgaagcttgatgagaacaatcgggcaaggccttatagagattacacaacacagatagattacacactgagaaacagagaatggtagctgaggccttgcccaaatgccctgaagctccactcgtacttggactccaacccgcagctcttatcgataacgtcgctcctgttgattggtctttactcgatcaaattcccggtgatcgcggtggctccattgccgtaagccattcttctctgtttttagcgttatttgagtgttttcagtgaattatctcgttttttgatgtgggtttaagcaaaagtttgaatcttcctttggtatcggaatctggatttgaattgttattgtacttggcggatcttttgtgattctaggtgcaaaaggatgagttagagcacatgctaaaagagcttgatgcacatatcagtgtggctccattaaagaagatggctggaggaagtgtgaccaatacagttcgaggcttgagtgttgggttcggtgtagccactgggattattggtgcttatggagacgatgaacaaggccaattgtttgttagcaatatgggttttagtggtgtgagtatctcaaggctcaggaagaagaaaggttccactgctcaggtctgttttgtcaaactgttaaattttgcttcttccttattgggaagagttggttttgattggtgttgtttcttttagtgtgtttgcttggttgatgactctggtaatcgaacaatgcgaccatgtctctcgagtgctgtgaagattcaggtttgtgtttctaatttttttgggatatatagttatattgaattggtttgtcagtgagaaaggatggtaaaaactatttctctttcaggcagatgaattaagcaaagaagatttcacaggctctaaggttggaagcctagctcctttaatctctctttgccattaggaagcattgtaaaatcaatggagatttgttctgacaactttgttgatggtctttttctctgctgcagtggttggttcttagatatgctgttcttaatttacaagtaattcaagcagccattcgatttgccaagcaagaaggtctttctgtttccttggatttagctagttttgaggtatatctttgattggaaaaacgaaactcttgtttcagttcctccttttaaaatatgatctgtggctttacaaatgatcaagcatttgtgactagatggtcaggaattctaaatcagagcttcgacagcttctggagtctggtaacatagatctttgctttgctaacgaggacgaagcagcagagctccttaggtaattgatgtttcttcatcccctgcaatgatctactcagggtttcttttaccctttctcttgagtccatgaaatactcttaagctctggattgtgagtttcaggggtgagcaagaagcgggtccggaggcagctcttgagttcctaggcagacattgcagatgggctgtggtaactttagggtcgaaagggtgcattgcaaaacatgataaagaggtttgtctttcctaaaaaacgtggtagcttataatgtagctttacatttcacttagccttaatttaactctttaaagttcatagcgaattagtattttcatctccttacgtgtgatcaggtggtacatatatcagccataggagagacagtagcaactgatgccacaggagccggtgacctattcgcaagcgggtttctgtacggactaataaagggattgtctttggaagaatgttgcaaagtgggatcatgcagtggtggatctgtcatccgtgctctcggtggagaagtaaccccagaaaactggcaatggatgcacaaacagttgcagttgaagggcttacctgttcctgacatccacaactgatgatatcaccatcagattgtagaatttcaaacaatttcgttgaagggccggttctgattcaagcagctcttagcattatgttgttcacagagattctcacagcatttacttcaatacacattgtgttgttttcaatctttttttgtgaaaaataaaaatgcgtttgtcagggtttaggatcaatcttacttactccacctttctgttccttaaacaatgttcctttttctggctcaaacccttgaacaaagagaaggccgatgatcgagccgacgaaatatgtgatgccataggcccccatagccgacatcttctctctctgttttgcatgagtgacagtaggaagagcggaagggatacccgaaaccggaaacccccttaataaaggaaattaatgttgtgaggctgaatttcgactattgggcctgtaagcccaaaccaaaaaaaacaaaatttcgttctttcagctttgagttcaacccaagtatcgggtgttataaacgtaaggtaaatgctgtgaagtttagcaattaatttaattaattaacctagagatattgttgcctctatcaatatgttatgctgaagaagatagccttgccagtctcttattatatattttatcaaagaaaattcccaaaaaccaaaggggaatttttattactgaaacccaagctaaagataacggttttgacatatagggattaggatttgctacaagatataaaagtgaccgttgaagaagattcacacaactcttaagagtatgcttgcttcagcaattgaagtagcagaaacatgcgaaacccgggaactgagcgtgacaagccccgtgtgaagcacgttcccatctcttacactgactgtcacagccacgagtgttgccacaaaaccctgtccatgtcttgcttctcctctcgcaaattcttccttccaccgccatcatctctgcaaattctccaatcacaagattttatatatcatcatctttcatcaatgagattcatacatattacaaagagattacagtcgaagaagcttagagtggagtgatgatcataccagtggaagctataaggaagatggagaggcaaaggaagagcataagtgtgtaagaagaagccatgactttttgttgtatggttaatattcactagctgagagctctttatatacaaatgtattaaaaacccgtttaatctttgactgtaaaacgattatcgttctctagaactatccttgtattttgtatggtgtgaacaaggagaaactatgaagcctactatttatccaaattcttatccatacaagttttgactatagactttgtgatgatacacttttgacgtctaatttgttcggacatgttagtgttattagttcaaattttatgtttgccttaaacaaaaagttaaacgcaactaataacgatatataaacgtaaatgaagacacaaaattatgaaagtctatagtcaaaaactgttcgaacgaaagtgcatggtggtcaaaacaggacatgaatctaactaagcatcgcaaattaggtctagcatgaatgtaacagctaaattaatttaattttgtacgatctaattatttgcttgatatttttggaaaaaaaaatggtataattatgacaaagattgtttgatagcgaccacagaatcagagagtgtttggctctgcacatacataaaccagtcttgtctgtaatttcttttaggctaatctattttctgaaataaatggattcaacattgatcactattcactgaaaatgttacactccatctttattattatgtgtcaactgtgaaattgcttttgagcacatgactcatctcatctcacgtgattctcgggtctcgaccatttttcttgattttgcgatttccatgaccctcgtgattgtgatactaattcagtaattctgaagcatttatgtgtggataagtttgttcttggcgcgtgactttcacgtgtctgcttaaaggggtttacaagtggaatttaggctttattgtttatttatacatgctcaccaacatctatttacatatacttcttgttcttcgcctatgcactactacacatatcttgtaaaatttgtatattgttaaagataggcattgttgctttgtagaaacttaaatagttgtagttatatgtagatgcaaaggaacattttactttaggaaagattcagaaaacagctcgagttaattaatatctacacccaaatctagaaaactaattaatgaggtgtttatatcggaaacttgctggatcgatatgagatcttacaaatattctgcaacctaagagtatatatcaattgaacatgtcggatataatagtatctatatatgtatgtgtatataaaatggaaaagttctagttttattaaaaccaaaagatctaccaacgcaagcaatgccaataatatagattgaagtaataatatatatatcttgcaatgacattttaattgacactaagtatccatatagtggccaaggtacctagataaagaatttatgttaaacatccaccatggtaattaaccttttaacctacatgcttctatatatgaatttcgattataaaccctgtaatctatgactatattttattattatatgcacatactaaaacactcctaatcagaaatgttatagcgcaaaacattctttcataaagttaaaaagaaccatataatttgcctaacacattagctaaaaacataggaaaattgggacattattggtcgagcgaccacaatattaaaactttgagatagcaaagcaaaaacattactaaatgaccattatgcaatcatattaatttattataaagtccctataaaatgaccacactggtgatcgtatccatctcggtatcagtgtgtctctttctccaaccagaatattttctttctcccatctttcctttcattaatccgattaacatcccaagaacatttatcatatatattcacttgcccgtttcattttctcgcaacatattctatagatttctttctaacattttcacatacatatctataaatactaaaatacaccataataaatctcaacaatttcaatatataaaaaaaaatggaggcagagaaagcagaggcgagttggacatacgagaatctgttccagaattgtaaatacaccgttggattgtccgccgtcgtagccttcggttactgttgtttaccggtgatcgtcaaccaactgcacgggtttttcatttggttcgattggtttactttggttctaagaaaccttttcttcctttccgtcgtcgtaagcattatcatcttcctgatttacgttatctttagcaaaatccaaaccacggaaaaaaaggaaccagatctttacgatcaatatgtagccgccgtccctccaccctccaccgtcacgccgttcgattcctataatatgtcaaagtttgaagatgttggatattacaataactcgacttacagagagaatgtacccgcgtttcaagcggttaaggcggttgaggagagtagttatagttacgatcaagaagtggtggagatgagttcgaagagttacaggaggacgagcagatcggagaagaagatgacggagaggatggtggagtatcggaagacggaaacggagagagtgacgaaaacggggtcgtggaggtcgcagtctatggatggtttaagcagcggcgaggagtttcgtaggacgatacagacttttgtctcggagcagaagaagatgcatataatccgagctagcggcgtcgatgatcagttggaaaacggctacattcaccgagctagcggcgtcgatgatcgtgttcactattgggaacacggcgccgttcctcagtggcaaaacgatgacgttcctcagttgcaaaacggcggcgttcctcattggtggcaaaacggcagcgtttctcagttgcaaaacagcgatgttccacaatggcaaaacggcggcgttcttcagttgcaaaacggtgatgttccacaatggcaaaccggcggcgtttctcagttgcaaaatggtgtccatgagcctcaaaacggtatcgttcagtggaaaggatctcgtgacgatggaagtggtcgtcatcgtcatcgccatggtcatcgtagtcgtaaacataggcagtaggctcgagggtggctctggctctaaagtttctggttcgtacttagctttatcgaattagggtttgtattaatttttctgaatctggttatatcattagaaatatctgatttgccaggaaaagatctctatactagtattattgtagctttctaacgcttttaattttaacttcggtgactcttttattcttgtggtatcttaattttttctttttcacttgttccttttaaactatactcataaatattaattaatacattcattaaatattacacatttggatatgattcatcgcatctaggaagtaggaacacatattgagatataaaatctaatttgaaacatatgaatttacaatctacgtgacacgcgaattggatatccactcttcaatcttgcaaacaatgtccacttttcaatgcttggatcttcatctactacttcccatcttcaattttttttttcaattattaaaacttactgttacaggattattcaatttttttgcaatactaaagaaaaagtcgtacgaacctgtaagttgttataaaacggtggagaaacactaacatcatggctttggccaaagcaagtccaagacatgttcttcctcccatcccaaatgctagaaaactgtttgcttttgcttcctcctttatttaatttaagttaattaagtaaaaccaaaagcatttgaataaaggaactgtaaatttcaatatatttactttaaattgtggtttatttacctcaaaccttaaagggttgaacttgtgaggttcactgtatacagtaggatcaagatgaatggatcttgcgtcaatatttatattccacccttttttgatcttatatcctttcaaatcagaaaacaaaatgtatctaagtcagagatcatttattaaaacaaatacaagaagaagatatataggaactaatatttttcatgataaattcttaaagcaaaccttccatttcacagtcttgaaggactaatcttgggaaccaaggcacaacagacgccattctcagagattctttcaccatctatttccaaaatttacatgtacatgtaaacatataattttaaacaaattagtccattgaaaaaacgtttatatataattacctttgaggcatatggcatttcacttagatcttctagttcaagaaatggtttatttgatgccttctttgtaatctgagattgttcttcctgttgaccgaccaggacaatgacatgttttaaaactaaaaccctttaaattcgtctttattgaaattgaaaagcagcaattaaaatgattaatattttttttaaaacaaatttaagtgataaatatatgttaaagtgcataccacaagagaaactaattatagaacttacaataagaatatccaaaaccttctgattttctccgaggtacttgaccatccatgtcagagcactagcagtcgtgtcctgtcctgaatttttatttttattttattaaccggattcatcataaattaaaaagatacaattaatctgatatgatattttattttatttttcttaaccctttattaaaaaatatatatttttgtttttcttctctatatataagctggtctaaaaatgatgggtattaaatgagacctgcaatgatcatggtcagaatattgtccttaatctcagcatcagtcaactgaggagtgtcgttatctactgcaagaagctgctgcagaaaatcttcatgatgattattatgactatttatttcatttctccgttctctaattatcttttctaacatctccataactcttcctcttgcctgcatcactcaaaacttctcatgaatcgaaccacaatcaatttaaattctggatgagtatataatatgatatctaaaatagggtaattgaaactacgtagtacgtaccatgatccccttgtggaatctagtccaaggtaaattgagaggaaaagcgagcatggcttcacaaacaaagcccacatctctttgcatggaacccagttcttcttccttttctagacttactaacatcttacacattgctttgaatgttatctgcaacatcagttaagatttgccttcaataagaaaaatatatgaaattttgagttgactaaagttaatttatcatagtccttcctaatcatttcagaatttctattttagcatatgagtagaaaactgggccatgatccatttaaactatgaaccgaaagagagaaggctttaaataggcccaatacaacgaagtatgtgaaacaaacctggagcaaatctgtgagcaagaccaccgtaccacggtgttcccatccaccaagagcgtccacgacgagttcatcaaagtgtctaaccatcagagccgtcgatcttttggagaacaagttgatcaaacggctacggagaatcttgtgatggtgttgaggagcacatagaaggctccgatcacctacaagctcacctatggactttatgtaccgtttcgtgaacatccctgagtcgttgttcagaacaagccgagctgactcggtcgtagacaggaacacgtgtgtctctccgaacaaacttgtcctaaagcaactaccgtacctgtaatatataaaaagtatatgatcatgtgaagtggaaaccttctagatgggccagaggcttcttttgtttacctgatacggcgactacggacgaattc

SEQ ID NO: 1136 - DNA, 90341 bp, Arabidopsis thaliana
gaattctatcaactattgattgataatggtgaatattgaataattttacttggtgttgttacgggcgagcgaagctaagaataaatagctagcgcatcacagccgtcggattgattctgagattagctattgtacaacgcagactacagtaagaccaaactggtaaacgtgtgaaaccaagccacgtgttttccttgctgtcaagctgctgtgtttgatttcgacaatagttggatgttgactttatttttcctctctattaatattaattctaaaagctgaattatattcacaaaaatttcgagataaaacaatcaaaaactgattgaaacaatttatgttttaattataaaatatttcctgaatttaatttgggtggtgagcaccattatttcaattaaatcacaagttgtttaatctaattaaaaaagtggataaaatgtgtaggtagacagtagacatattagatgatatacctaatgcaaatatttatgattattatgtaaagtcgaagctatttgatcatattttaattaagaaaatgacctcaataatcatattcgtttagactttactcttcacgtctcgttctttaaaacgagaaataatgtctgcttttataattgaaaataagtcgctatataggaaaaacaatatctgatttttataatgaaaataagtcgttatatcagttttgggttctcaatttttttcctaaattttaattaaaattgaaaagtcatatagttttttttttctctttacttttggtccgtggaattgctatttacagactgtagtgtacaaacttttgttcgctggcttgtctctaaaactatatgaatgcaattgtaagaagttaggaccatcggctgaatgaatttaataattatgtaaacattttcatgcatttttggttgttcgtagcatatgaccaaaactcagatttgtatttattatctatttttgggaggtaacaaaaacaagaaatgatcgtcctttttaatttccgttaagtttgagataaggtttaattaaacgagtggaaaacaaacgcttcaaattaatatcgtcggttgctccgtttcccatatttagtccatttagtcacttaccataatcatttttctacatattatttcgaaatttacttactacagtattaaaacactcaggtttcatcctaatcattctcgatgtaatactaatcatcattcatcagtcaaagtaattaaaagaaaaccagtcaaatttcttgatataaacaaaaaaaaacgcgaagaattatttgttaggagaacacatttaatgaacatttaatttatgtatattatcttccagcaaaatctcagtttaatgaagtgcattatcatcaacataaaccttctgtactaaatacaatctgtcccatttattttaatttatataaaaggaagattttattaaatactattccatgcttcatatagttgtagtggagtaaacagtatgatcacgatgtaaaaacagaaaagataatcataaaacagtcaaaaacgtttttttttcttttcaaaatgatcacatatacaatgtttgtatgaggtaagctaaatttatttctcttacaattacaaaatgttcagtaacaaatacgtctaagtataatactgtttatttaagtatcgcatgcaacggtaaatacaataaacgcttttcagaaatcaaagattgaaagtctcgaaaacgtcaatggcttaggtttattttgttcaggtcttctattaatagggattgtataaaaaggaagcacatgtgatacatgtcattgtttggctatcatcgtgataagaaattttaggaaaaagcctatctattcattccctttaacaaaaatagggctactgtgtatacggatttagtatttttatttgtttccgacttaaaaccagaattattactattaatcaacaggccaaatatctaaataatactatatagaattcaactaaattgaattattaaaagattattaaggagggtaaataaatagaaggagaataaaaaaaaaaaaaaaagaagagaaagtgaaggtaacgattagtttaaaggagagcctctgctacgttttaggctttgaagtgatacagaaggcattagatagatagatagattattttcaccatcaacatcaccatcaccgccactatcacaccataacccaccactcttcttcttcttcttcttcttctctctctttctctgtatctagaaacagagagtttttgattctctctgttttcaaatctgttccactaagctctcttgctttcgggaagattctgtttcactgctgcattttggatttttccggtgagtttttttctctctccatatatactctcctcctttcgattctacatttcttcggaattatgcttcgaaatcggagaactgtatatatcatgctctgttattagttcatttacaaaaaaaaaaaaaaaagaggaatcggcgtcggtgacttttggttttgtgatttgactgttgagaaaaaagcgtcggtgatttggttttcgaggtatttttttcttcgtctgccatttgtttggctttatatcctgaagttactgattctagtaatggcttttgtctccattttacttgatttttggaggtattcctttactagtttgattcctctcttcttttcatttacaagtgttcacagttcatcgaaatcagaaattttctagtcgattgcgatcgtcggtagtcttttgcctctgcatctctgattattttttactttctggcatttgctttctgatttgacttcaccacttcgtttcggaaagttcttaattatttttccgaaatcccaaaattgtatatatttggtttaatttttatgtttttgttttctgaaaatgttgaattgtttgttgattatgaagatggatcgtaagagttggccatggaagaagaaatcctctgagaaaacagctactgtcacagaagttgttgatcaggtactttgatcactaatcaatcactctttaaatttctcagatttgtttcatttaattctaagatttatgttttgattccttcacaaaaaaaaaaaaacaggaaaatgggaagaagccgagttatatccagatctcatttgatcaatacacgaatctaaatggtttaaaagatgaagtcaagagctacgaagaaaaagttacaaagcttgaggatcagatcaaagatttggatttgaagctatcaacagctaatgcagatattgtagcaaaggaggttttagtcaaacaacactccaaagttgctgaagaagctgtcacaggtaataaaatttgcatgcatttctgtgttttttcttttgagtcacatgtttttgatttatgtttggttttgattcaggttgggaaaaagctgaagcagaagcatcagctttgaaaacacatctcgaaaccattactctcgcaaagctcactgtcgaagatcgagcagcgcatttagatggagcgttaaaggagtgtatgagacaaataaggagtttaaaggaagagaatgaacagaagctgcatgatgttatcgctactaaaaccaaccaaatggacaatcttagagctgagtttgagtctaggattggggaatacgaggaagaactgcttcggtgtggtgctgagaatgacgcgctttcgagatcgttgcaagagaggtctaacatgctaatgaggataagtgaggagaagtctcaagcagagtctgagattgagcatcttaagaacaatatagagtcttgtgaaagggagataaatactctcaagtatgaaactcatgtgattaccaaagagttggagatccgtaacgaggaaaagaatatgagtatgagatctgcggaagcggcgaataagcagcatttggaaggtgtcaagaagattgcaaagttggaagctgagtgtcaaagattacgaactcttgtgagaaagaaacttcctggtcctgcagcacttgcacagatgaaaatggaggttgagagtttaggatttggagatcatcgtcaagatcatcgacaaagaaggtcaccggttagaccatctagtcctcttatgtctccaatgtcacacatgtctcaggtttctgagttctcacttgacaatatgcaaaagttccataaagaaaacgatttgcttactgagaggctacttgctatggaagaagaaacaaagatgcttaaagaagctttggctaagcgtaacagcgagcttcaagtgtcgagaaatctctgtgctaagacagctaataggctacaaaccttggaagctcaaatgatgagtaaaagtccaaccaagagaggttttgaaatgccagctgaaatcttttctcgtcaaaatgctagtaatcctcctagtatggcttcaatgtctgaggatggaaacgaagatgctagaagcgttgctggctctttgatgtctgaactctctcaatctaacaaggataaagccaacgcgaagatcaagaagaccgagagtgctaaccagttggagctgatggatgattttcttgaaatggaaaagctagcttgtctaccaaatggctcaaacgcaaatggttcgacggatcactcaagtgctgattccgatgctgagattccaccagcgactcaactgaagaaaagaatctccaatgtgcttcagtctctccctaaagatgctgcatttgagaagattttggcagagatacaatgtgcagttaaagatgcaggtgttaagctgccttctaagagtcatggagctaatttgaacggtcttacagaagaaaaggtgatagccatgtcaaatgagactacagaggaaaaagttaccattgtcgaggtaataacacaagaattgtctgatgctctttctcagatataccagtttgttacctatctttcaaaggaagcaacggcgtgttctgagaacagaactttctcccaaaaagttcaagaattctctaccacattcgagggagtcttgggcaaggaaaagacattggtcgattttctgtttgatctttcgcgagttttagtcgaagctagtgagctaaagatcgatgtgctagggttccacacatccacagtagagattcacagcccggattgcattgataaagtcgctctaccggaaaacaaagcacttcagaaagattcatcaggtgaacattaccagaatggttgttctcagagctcagattctgagattccggatgattgcaacggaacatctggctatgaaccaaagcttgcaacttgtaaatttacaacagaggagtttgaaggtttgaaactcgagaaagaaaaagcagagagcaaccttgcaagctgtgaagcagatcttgaagcaactaagaccaaactacaagaaacagagaaacttcttgctgaagtcaaatcagacttggaatctgctcagaagtctaatggcatgggcgagactcaactcaaatgcatggtggaatcatatagatctcttgaaactagatcatcggagctggaaatcgagttgacttctcttaaaggcaagatcgaaaacttagaagatgagcttcacgacgagaaggaaaatcatcgagaagctttagccaaatgccaagaactcgaggagcaattacaaaggtaacagcaaactaatcattactctctttttcaatgtagagtctctaaaaatctctaacttcacttttctacaaaacatcaggaacaaccaaaactgcccgaattgttcagtaatcgaagatgatcctaaaagcaaacaggtaaattttccaaagataccaatttattaccttacctaacagagatttcggttttttaaatttataattcatgacattgaatgtttttacacaggacaatgaactagcggctgctgcagagaagctagcagagtgtcaagagactatattacttctcgggaagcaactcaaatccatgtgtcctcaaacagaacaggttgcttcttctccaagccaagaacaacaagccctaaaccctgaagaagaggaatacgcaacttccacaaatcctcaagacagcaaattgagttcgccttcagacaaggatacaccatcgatgaatacaatgaaatctccggtcgcgtcgaaacatagacacacgaagtcgaactcgtcatcgtcctcatcaggacttactcctgagaaacactctagaggattcagcaggttcttctccactaaagcaaagtaaaaataaataaaaagaattaaaaaaagtataaatctaactatgttgtatatcgtatctattgctactatattatatgggttttgtttttaattttttactatgtgggaatgttattttaacttaggttttttcttactttctttctttatttctgtactgacaacaatttggtgttgaattccgcggcgtgtaaatgtcaagctaccaaatctcgttttctcattggtgtgcgttattttttaatctaaggtttcttaaaaacatctcaatttaatatcttttcccctatctttaaaaactgaaactacaagttctgtgttctgtaaacaaagccaatcaggtttcaaggtttaatgaaatctcaactttgggcttagcccagcccacttacaccgtctcatatgctacttgtttgaaggtgtatatagaatttcttgtgaaatcacatcccgtgggttgagaataacgccaacatttttctagtaatttcatacgaaatgcttgtttgaaggccggcaaaaacaaaagaaatcaagaaagaatgtctcagtgatgaacactccgatcgattaattggggttagtgcaacgatcctcattgtgggaatataccttttaaagcaattagcgatcatttactgataatcaatgttttgacagtttagctactgtttggtttaatagggcatcacatgttcacgtattcaacacctacacactattacatctaattctgacctatatcacaattcatttacttagacatgtcagacattcttctttctatttaaacggtctataatacaatgaatgtataattgaaaaatgatccgctgacgttattcaaatatgtagccaaaaattaatatatctatggagtacttataacctttcacgatgcattctcttgcttatcgtaagtgtacacttttcaggaatgccaacgaaggaagtaagttaaaaggttcgatgtggtcgtacgttagattgcaaatgacttataaaaaatagattccatttagaagatctaaaattttatgagtccggcagtatctaattggtagaacatttctgagagctgtcttcatacctaaagacagtatacacagtcctagctacatgtgttggtgatactcagattcgttctttttctgaaagaagctgcaaactattccaccaattagtctgacagttttaaaatttttcgatggaaactaatttataattaatgtctaatcttaattaggaatttctgaaattcagacgtaagtttgtgttaagtcattgtcattgaagacagctaatattaagatttggcttttgtcttaccattaaccctacataaaaatagtttgcgcttataaattaagatttgttcaaccaaaaatagtaaagattctgattatgataatgtattataccatgtggctttgatgagtatccttgtcgcttctctctgtttggttaatcatatttggtttgctctggttttgagataacatagttttttcttacatccaaatccattaaaagttatatacgtttccaacttccttaccatatcatcttctctaataaatattatacgttcgcgaagacaacggccgagccattgaaagacattcaatacattttgtagttgacttacgtataatatcccataatattaacatagcactttcgtattttgtctacatcaactcgtttttagctagctagggaagtggaaatattgctttcaacaaaaagttaggacgatcaatggggctttgaataaatagtcggctaaaatttgggaagtatagttgacctgattatacaaatcaaataatttcagctaatgcacattcagtggctctctagtgatttaatcactatttatggtcaatacacattcattgcaaatcattatagaccgtccttttttggggggaaaatttcatagtattaacacgtcggctttatttcattttttcaaaaatcattacaaacgtcagagacttttcatattttggaaattttttaacattttttagtatttttaaggctctctagatttctgaatctcaatcaacatatattttcgttaaaatatgttgaaaataaaataaataaacagagttgattttcatcgtgttgtgaggttttaaggaaactcgaccgtccgttaagtaccgtacggtctgaagaaggagcatttaggtaaaaataattgaaacccgcatgcgatatgtttgaagtttgcgttaaatctgagccctcaaaaacatgaacgtgggtcatcacgtaccattcttgatacttgattagcatacgatcattatcataactcgaaggtataataatattgcagggagatatctacttttatagttttatcagatttacaaagttttgggtccacttgcatgtgctatctctcagacattgatatgacttctccaatgtatatattttgttaaaatcgtagcttttttttttggtagtaattaagaatattttttctacagagaattaagtttcaagtgactaataaattcttaatctctttaggtgactaaattcatgatttatagtcgggtgatattatttgtaattatattgatatttagatgacatgttacataagatcgaagaattgttctgtagaaattgttatagaattatcatgatttggttattccctggtaagtggtgaaattggagcaactcgtggaatcgttttagaacttttattccagacgttactaccaatgccaaatacattattttcatggcagagatgtcttctttttaccaactaagcgcatttctgtagtgaataaagggaaaggccagaaaacgggcatgagaattgtgaataataaaattatattttcctgcttctgcatgtgtgtgtttatgcatagtgtcaattttttttgtcattatcctggaatcagcatttcgatgctttcttaactatttatttattagttcaacagttttaacttttaacggctaaaaaactgccgattccaaaagaaggcatccttcgccttgggattccttgtttggacgatgtcgcacagtaacgtacttttttaaaaacttcaaaaagtaaaacaagttttgcgagcaaactaaatcgatatcatactatatgcaacgcgaattccactcgtgtgaatgaaatgagtttccatttcttcaaatggaaacaaatatagtttttttggatcaaattatacatgcttttaacttggttaaactatgtacagatttacattatattaaactccttgaatggagtatatcatatatgcaagaatatatatgatagaaaatggacaaaaccaaattataagaagaaaaatagcattcatcactgatattatataatagtccctcaatgggttgtacagataatcacaccaccacaacgagaaaaattatcagagtatttgcttattttcctccctacaaatctaagataattaatataaccaaactggttttatagatcactcttagaggcatctctagagttagtctcgttctaatagaaacacttacccccattgtaccccaaaatcacctaaaattttaaaggctacctaaaacagatctttatcctcaagaataaaacactaaatatatgttggctgaagcatagaggtgatgagagatttgaaagctacttcctcacaagggatagtgagacccatgttgtgatcgaagccaaactcttcctcagcttgttgtagaagaagctgaaactcgggtcgggtcaaaaacgaaatgggtaagacgtacctgacccgattccctcctacgtagaccacgaagtgacctttgggaacatccagaggaagagagtctccatcatgttcatgtgtatcgttatactcactgctctgtttctttcccaaacttgaacacctcttcaagatttgctttatcatagtcgtttgtgtcagcttgctccggtttataatcgccattcccttgggaaatggggttttctttgttatcttctatgtttttgttgtggtttgctagaggagtgaggagatagtgaagaagggtatgctgagttatggttttggggtatttatggatggttacactaaatatatagagttttataaataaatttatatactactttataatattagagtcttgtgatgggtctaaccgtctaagattcactagacagatcctagttttggaccgggtcaatgtttttttgtttaaggtttggaagaaaaaatagtttattttggtgttgtttattacataagagtctatataagaccaattaggtggaggttttaaacctgaaatcagaattttgttcgttaataatccaaaattgttagaccatttttatttgtatgcgtggttggagccactaaattctccatcttagggctggttcttgtaacatcaatatataaaatgtatatacaactatttttagctagtgtacatatatccttttacaaatactattgtacatctatgcaatgtatacaggaagaggtgattttgaggcgtggggtaaagtaagatgtgtttgtctcgatatatgaagaatgtgtctgctacagaataaatatttgttgtaccttgttaaaacaaattttgtcaataagttgtatatatgtttaaattatgtagatatacaatacaaattatttgtcgaggttttttgttttgtttgataacatctattgtccaagtcaaatattattttggttgaagattagagaaaatgttgtagagaaacgactctaggtctttataaaaaaacaacaactcttggttcatcaggtttagcttgaaaaagatggcaaatataaaatgttataaaactccgatgaatgcaaattaatggcacacattagtcgcaatagaggctgtatctaactttcaacatggattcaaagttgtaaacttttctaactacctttcgggccacacaaaaaactctaattaaatatacttgattatatattgtcggaatgtatttgcatgccttacttcattacaatttcaaaataacaaaactagcgttttaaaaaaaaaactagaaacaggaatataatgtgatgtactattttttttttttccagttttgaacgtaactaattatgcaaacgctaatgctagccgtgacgtacttgtttgtaatttcagtttaaacatcgaaaagctaagagcctgagactatatctatcgatgattagtaaccaaaaagggtagcttatcgatgcgttggtgaaaaggacaatataatgcaaacgtgaaggactaaggacagtaccatagccaattaaggcttcctcaattaatattcctgccattgcaattatgtatgcacatgcacgacctaaaacccatcccattcatattctatttttctatttattgttttgctgattggggtattcatgttaaaatccaaaattgttttcaaaattaatagtcgccgtatgaattttgctttagaccaaaagacgatgaccaataaactatagatgatcaatttatttagctaaagaaaaggagtttaattgttgtgtttagtggttcatactttaatactttatacattgtgcatatatattacatgaatgtcatgttagctggtctgcaacggcgcatcgctatgtcttttggtttgtgcaaacgagctgtgactaaactttattattgggctttattgtagcccaatatgaattacgcggcaaaagatggattgtgaacttgtcaagatataactacgaaaatttaacctaaataatttgacaaataccaaagtcgacgatggtgaaaagaggtcggagcggcggcgtttcaaatcggagatttcaaaacctagttctccagtcatctgagaagggatcaacggcagaggaaatagtcaatgagctccgttcaaaggaccgtgaatgggctcgattgagtcgtcatgttctgctacttaacgtcaaccaaacccttcaatccagaaatgtaagcgacaaagacgaagaagaaagcaatgcaagatcaaaatcacggaagagagccgccacagcttcaccttcaggatcgtcgtggtctgatgccgtggggacggaaatgtattagatgatagtggtaagtcaactccacagtttgatttgataaatgaaaaccttagggcttcgtatgatacaaggaaacatattagggtttcagatgtggaattagagatagggaataagaataaaaaaggtaagaaatttaaggatcttggtgggttaaaggagatattgcatgacctaacgaattgagtaaagaatcctctgctttttcctgaaatgcatgaacgtcttcaagagaagccaatttctgggattttacttcatggtccacctggttgtggcaagtctacattggctcgtgcatgccattgctaatgaaactggtgttccttttcatatgatctctgcttctgaggttgtttctggtgtttcgggtgaatctgaagagaatataagaaaactcttctctaaagcgtatagaactgctccttcgattatctttatcgatgagattgaggcgattgcgtcaaagagggataatcatcagcaaaagggtatggagactcgtattgttacacagttgatgaattgtatggaccaagagtatatgcttcaaaagatgagagagtctggttctgaaactagcggccatgttatcgttatttcagctaccaatagacctgaagctcttgatccagctttgtgaaggtcactacgattcgacaaggatttttgtctcggaatgccagatgagaaggcaagagaagagattcttactttgatactacggaaccgtcctcttgacccaagttttgatattgcaaggattgttcgtaagacttcaggatttgttggagcggatctagcacttttggttaaggaagctgcaaatgtggcaatggagagattagtgaaatcaagaggatcagaacttggaactgatattgattctttgttgagtatgcagccatgtccatttccaccacaagtgatagagaaacttttctacactatctcggattttgaggaagcattgaaaaagtttaaaccttcgttaacaagagaaggattctctactactcctagtgtaacatgggaagatattggcggtcttgatcatataagaaaggagttttatagcgatataatcaaaccgttgaaatatccagaagagtgcgagggattcaagttctgttcagggagggattttttgctatatggaccacctggttgtggtaaaacattagttgccaaagccgtggctaacaaagcagaaaccaactttatccgtgtcgagggaccggagctttgagcaaatacgttggagatagcgagaaagcgattagggagctatttaaccttgcaaggatgtgttcaccgtgcataatcttcttcgacgaggttgatgcattgacaacaaaacgtgggtcaggagaaggtgcttgggttgttgaaagaccattgactcagttgctcaatgaaatgagcggtggaaaagaacgagatggagtgtttgtgattggtgcaacgaatagaccggagatgatggatcctgcgattacaagaccagggaggtttgggaaacatatctatatacctcttccaaactctgttcaacgaggtttgattctgaaatctcttgcgaggaagattcctttagacacaagtgttgatttggatgctatagctaggcgttgtgagaattttagtggagctgatcttgaagctttggttatagaagctggtttggcggctcgagacgatgagacaggctcgtaccctcgtaggacaaagatggttcattttgaggaagcgtcgagtcgtatgcaaagcggcaggtgaagagaaaagtcaagagattggccaagtttttccagttttcaacattttttcaaaacttcatgcttattttttttggattattggtcaagtaagctagtttggttttaccatgttatatctgcttggtcaaataagatgttatgtcataagttcatagcataacattttaactccgcccatactgattgcaaattttccgatgaactatatagttcaagattattcaatgtgtatcattattggaatagaaatatagcaatctttctgttctttctaaaatgatgttactttctcaatttaagacaactgatttacataaacccatctaaaccacaacaaaagaagacagaaaataatatgtcaaacacagttcttcaaagaatctccagcaccttgaaagaagaaggaagaaagcacaaagtccgcgatgaagattccgacaagagacatgacgacagcagaagttgtagattctccaacacctttagcacctccagtagtggttactccccaagaacaactaattaccgatattatagctccaaagacttgagatttaatcatggcactcacaatgtcccatggtctaagtgctcggtgagccgagtccatgattatgttaatgctgatcccgtaaactgcatcagagagcagagcgcttgaagccataccaacagtgaaacacatgagtgtcagaaacggtagagccaaacacgaggcgatgactcttggagtgattagataatcaattgggtcagctcctaaaacacggagtgtatcagtttgctctgagacttgcattgtccctagttcagctgcaaatgcacttcccattcgtccagcaacaacaatcgatgtgatgactggacttagctctctagagaaggctaaagccaagacacctccaatggatctgtttagacctagtctagtgaattctctaacgaactggattgtgaaagccataccaacaaatgtagaagtcagaagacaaactcctagagatttcggtccggttctctccagctgttgaagagtgtttctccagtgaatcttaccctttaaaatccggagaacgacttgtcctgctataataggaactgataaacctctccatatgtacttagaaggtgaccatttgctgaacggaagctcggcttcttgactgggtgcgttgttttcagtagaggtttcttcttccaacatagacatggatgggtgaccatcattagcattcaaattcacatataatcttctttgccgtatcggacttgaaatcccataagattgagtctttccaatgaaaccaacttgacaaagctttgggggcttaataccaatcgaagcatcaaaccgtggaaagactctgcaaaattaatattcaagaatccaaaataacatattctgacaatgaagcaaatgagaaagcttataaacttatggcaacacaaaatacctatgagggaaacaaaacgattgatggatacaacaagtctgcatcattgtggttgccttcttctttacgacctcactgatttagtgcctctcaatttgtagcaataagcacgatttcaacagctgaatctgtaataaacccagaatcaaattgatttacaatcaaatagaattaggacacaacagattttgcataagagatccaaatcgagacaaaaagtttccggtgacctgatcaattaatcaatctctgactctgaggcagccaaattcgaatcccagtataagatatgtacggaccaatctaggtgaaatctctactatatagaaggggaacaaataattaggtctatcaatcttcttactgaaacaaaaacttgaaaacttacatttagaaacgaaactaagctcggaagatcgaagaagcttgcttgagagggttcatcgagagagaaagtggcacagtgccaacaacaacaacacacacaactaacagttgcgaagaagatgtgtgggtttaactcccaacaaaacaaacaaaaaaaaaaccaatggcaaaacataaattggtccgtgggccgtaaagcccaatatacttttacaagtaaagcgtgggctctatgccattcacggcaggtccacttgtactttacacatagactgatacagaaaagtataaataagaaaataacaatgagtgtttttctctattgatccaaaatgacaaaatatatgatctaaacattttatgttattctgtatatgtaaagtgttaattatttaattggttgtataaatctacaaagctattatatgaaatgtttataccaagacaatcaatcaaataaaggcctacatttcatgtccagatttgtactaatatccccttcattgcttactaatatatagtaaatttaactaaatgctaacttaactataatataaccaatatcgaaaggagaaagatgtgaaaagaggaatggtggtggtcacgtgacagtgatacttggtaacctttacggagacaacaacgttatctttttcttcagccggtccgttctttaaaagcacactctctgtataatatatgcctctctacgttttatatactcacgtttaccctactctacactacaaaccaaaagcactacttctctcctacacaaaacgtgattctaccaaattgaatgcaagagtttagtagagggtctcgattcttaaaaaaaacaaactgtcctagatgatattttggaaatataagtttaaggaaacgctgaaattggttgctttaattcgactactatatctttcgcatcttagaattatattagaagatattcaatatttgtatcttttacattttatatttttatgagtattctattttaattagaggtattaatttgttaaggttttagagttttatgttacaaatttacaatattcaagtgttacgtttttagcaaaacttgtcttcatttccggtagattgattaaaaaagcacaacgaatccccaaaaaaatggtaattcaggtattttaaattaatcgagttccttgaaccgctatgaacactcaattcagtaccttccaaaggaaatgtgtctcaagatctcatgttcaagcttcgctggtagacaatgtactatttagttcatatcctccgactcgagaaaactttgacccttggttattgtaaaaagtgttctatacgtatacttatattcgtaatttcgtagatagagagaaagcataatgtgatgcatgtgcatgggatgggcagatggggcccgcgggctttacaaggcccataaagctaaaagaagaggagaggaccacgtggcagggagctagctagtactacaagtggagtggatactaagaagtaagaaagtaggaatgagttgaatctcgtgatcgcactgtttctactattggcaatgcagtgttgctttcgtctagggtttcagagctatagccccctcttccttaattatttctttttttcactttacttttctcaccaatccatgtccaactacacttaaaattgcattaccgcaacatcttatatgtgtctatattcgaaatatcttctgtgtatagaattgtataagctagctacggaattacattttcgaacgacatatatttggatgttctagtttttgtcatttttttattagtggtctatcaagccgatgattcttgaagtctccattcccggtacattattgaatgtgaagtttaacctctcttaagattgatctctcgcataggatcgaatcccaaacattagcatgcatgctttcaagtttaactaacggtgtttgaataaaacaaaaactatatcttaacattcccttagataactttcacatattttatgagggaggatcgttctcaatcatacgctaatggttaacagttttggttacatgagtgttcactaatgagagttgtattatatgtgttggtaatgttatttttgtctctgttggtgattgtttcttatcccttttgtaacgattttaacaaaattgatcattaattaagaccgaaaaggaaggtgtttaacatattttctcatattatatattttattatttgataacacaactattaaagggtagttgagatattgcgtgtatttacatagtgtatacgaataaagtttctatatcttaactttaccacgaagctttgagtcacttcattcctttatatattcaacaagacaaaaagccattctaggcggaaagagcgtaattatcacttttctttaagctaacaaactgatggttaggaatgaggaaccttagcgtcaatcttatgttaattttaacaaatctacatccaattattgtcgtttaacatcatacgggagccaatatggctccaccggaactgaaatcattctcaaaattttttatatatatatttttttagttcggaaaattttttggttgaatcagacaactaatttctagagtctatatatatcgccggtaaagaaaatttcgttgtggtcacttaaaaaattgtatccaacgaaaagtaatttatagtttagactaaaatgacaacaactatttggacaaccattacttgatccaaatttaaactcatatttgttttttttaccaacaagaaactctaattttggctatgtttttttgctgaatacaaacgctctcgtttcaagaatattttacatcctcttagacaaggcgatagagaatcgagatgtgtactttcgtattcatctaaagttttggttgagcaatactaagccaggagcaatatctcagtaaattgtttttgccatcagtattagccaattaacaagaaaaatcgtactcctagttggcaatactagtaaattgtttttgccatcaggagtagatacactagctaacaaggataatgattgacttctagttttatcctgtaagagagatgaataggtagagagagaaagtgaagggtaagcacaaggctcgagggtgaaagacataataattgggacttctcttcgtccataaatttccccaaacaagtcatgcactctctacttacctttctgtgtgtattgagtctattgccaaatcatagtaagatcatgttctaataatcatttgttattttaaccactaaacactactgtactaccttgtatgctagtatcatttgccataattatttctgagcacgcaatattttttctcaactccaatataatagtatttcctctgtttcattttaataaacgtttaaggtttttgttaaaaatcacaaaaatcttatttagttttttttttttacataaaaatatcattaactacaaatgattcaactaatagataatatattataaaatataattggtaaaaaattattaaatatatttagtttttgcatatgaagttgaaagcatcaagcaaataaaatctctaaaccatcacttaactactgcggaaatattatatgtaaattgttagtttggatcaccaaagttcgctgttcaaaaaaattgcaagttagtagtataagtttggttacctcgttgttacaaattcatatgtctaataccacctataatgttgatccctatggttcgaaaaacattgggaactttcatcatttgatcatgtagtacaatctcattgcctaggattctaatttataggacagtcattccgaaataaaaaaaattcttagtgggatatatatataaattaaaattaataaatgggaagtcaaagtaaaaataacaatggctgttaaattaacaatacaaagctaggttttcatcgagcgcaacaaaaataaagaaaatttgttgagaaaagacaaaagggagattaggcaactagtttaatcattgaagatccagtcatcaaagttaggggttcattgtttcagttctgccaaaaaatattattatttgtgaaaattgtaaatacagacaattatttattatagagtccacacaaaaaaaaaatccacggtccgttaattagtattttttattttatttttaataaacgatataattaaagcgtagttgttgctaattcgtaactcgaaacccataatgaaatgtgttgaattttattaatggttgcaaatttgcaatgtttcattatatatgtcgtgtatattaaatggtcggttgataacgatgcatttgttgcatctacgagaagtcaaaacctcagttgagtcgtgacttttggactgaactaaacataccactttacatcaatacttatttagttagacaaaactgtatagtcatgactcatgaatctgggttacgtcaattagttttgcatctgattttctcgttgattgtaatatatttattgagaccgatttttgtatacaagcaaggaagatttaacaatagctatccatgattttttttttcttgggggtcagatataccatttgaatgtagttcactattgacttttgacttaaaattttgtcgattttggtcttatcaaataccaaatgacgctatatactaattaacatcaaattgcgccgctaaatcacgcggttccatgtgatcaaagtccctggagtggatttgcttgtttggtctcactctcacgccaattaaaaggtgtctgtttaaccttttctcctttagtttatagactatgatatggtcaggaattacttaactataccacggatttataagaggtatctcaataaaagatctaatgaattttgaatcagatacaaatatatgatttttataattataaaacctttaaactatctcatggagtagtttggttggaaaacgaaatggatcctatccatccgttagttgataattattactcgtgacctaaaacttagactatatagggtttgctgtcaagcaagtattcattaaaaattgcacatttatataattactttgtttaaccgcatattcacagcacttgttaaagtttcaattatgaaactcagctatagtcttatactgttattatgttcacattaatctcatgaacggcaatatagagactgttggataaggtttgaaataacttaattctcatacaacagcacaatatataattgtttacgatccaatttagtgatttgcaaaataatgaaagaaaacatgtgaaagtaatagtaactgataactttccaaaatgatctaattatttcaaatctttgtaagattttatttcagccaaatagtatttttgtggtgtcttatctttgattaagccaaatgaagcaattgccgacaaaaataaaagatgctaaagacgtaattaaatattaaaatattaccgcacgagggaccttttgaaaaatcaacattccatcacataggtaaaattatgtcaaatgaccgtctagctaatcacaccatctgattaagcggcaacattttttaagtagttctaaatctaaccagtgttttgatttcggagtgatccggccggtcggacctttaaacatgcgacttgaatacgactaaactatagttcgtttggtaagcgatttttctttcacccactagaactaaacatgcaaaaacttcggcaaaaactagtgatccggtaaaatccacacaagggcggtctttaacacgccaaatcacaattttttttttatcctggtaacctctgattctttttttttttttctttctaattttgatgacgtgattgatatatttatttgataaatttgactctctaaaataatttaatttctgctaagacatacaagaactaataaaatcacacacatatatatatatatatatatagaacgtattatatgataaattttgattttcttggagaattctcatgctgattttttttaataactttaggaataattaattagtttcaaatcactctagaagacatttacttaatcatagcctctgatgataatagttccgaaacaagaaaacaaaacatacaatatatattatttattttatttttaattttataatagatatcaaaattggtgatatttattgtgatggggattcattgaaactggaagacaactgtagagaaagtgccccatagaagaagatcttcatagtactctccatctctttactctccttctctttctctctctctatctctctatttctctctctctctctctctcacccacagagaaaaccagcagtagtagcagtaaattgcttgagttcttgatgacagatcgacaatgtcttaaatgatgaagagaaaagaaggaaagcaataaaccttggcggcgtttgcagcagtttcttaaatttcctcaccatcattactctctcatctgctcccaaatctgctccttttaaataccaaacacatctccaagcctagctagaaattaatgtgatagagagcaaaagaaaaaggtgaacacaaatccccaaaaataattcatccacaaaccccaaaaaagtctcataaatcctctttctttctttttgtttgtgttttgtgttggggaagtagaaaaaaatggctggattgttctatctaggagggagagatcacaacaaacaagatcatcatcaagaaaaggatcataatgaagacaagagcaacaattatctctatctatacaaagacgagatctacaacaacaacaagggttttgagattttccctcctcaatattttcaacaacaacagcaacaaaatcatgcggctgctccaacaaatctctactcttttggtatggtcccgagtggtggtaacataaacaataaccggagtactaatcggagtttgtacttcaacgtcgtctccgatcatgagccggtgagatcctcaacgggagggtttacggtaacgagacaagggaacatgaattgccaagactgtgggaatcaagccaagaaagattgtcctcatatgagatgtcgtacttgttgtaagagccgagggtttgattgccaaacacacgtgaagagcacgtgggtctcggctgctaaacgccgtgagagacaggctcagttagctgttttgccagctaagcgtataagagacgctaactcaaggggtggtggggatgacgatgatgatgacaaagaggacgagaaaaatgacagttgtggtggtggctcggctcttgcttgcacccgtgtggttaatgctagttcttcaggtatgacgatgagttttcaattaattaacatagagaaaaaatttcaacaaatctagaaaggatttaaaaacaaatttatgtgaagatctggttatgaatgttttgtcaagaaagcaacaatatgatttgattgtgaatatatgtccaccggattttgctcctttctttttgctgtttgattttgattgtgaataaatgtccaacaaaatgattttagtcactgttctatggtaaacctgacgacacaaagggtttagtcgatttttattcaatatatgatgtaaaaaataaacaatggttaattatgtcatgtgttttaaagattttgattattggattcacgaaccaaaacgtttttgaattttatagtaattctttggttttatgaaattagggttagagactagtcacttaccaccggagataagttccccggctgttttccggtgtatgagagtcagctcaatcgacgatgaagacgaagagtatgcttatcaaacggctgttagcattggaggacacgtgttcaaaggcattctctacgaccaaggtccatcgtcagatcaccaccgttacagctcaagcctcaatggcgaaacctctcatcaacaccatcttaacctcatggactcaactccttcagccgcaactacaaacgccgtgaccgccgttaacactaacaacggatctattgacccttcttccctttacactgcggtggcaactccgttcaacgcctttgtcgccggtggtacgcctttctttgcatcttctaggtgttgagattaaaacatctgaagatgttaaatcttttaaattacgtttgtgattaattataactactcttataactaccagagatctatctacgagtacgagagataatttatttgagtatttttattgttgtcggacaatatggtgactgttcgtacctagctagggtttgtgtactgattaacatgcacatcgtacgttttagagataaatgagatattatcattaagttttttttggggataaacgagatattaaattaatgtcagagtttcaaattttgatcttctgtttgtttactttaatgtttgatcttcccaatgtgatcaacataacttctttttttttttttttctttcgaatatgtctgaattattttcaaaaagtttggtcttctatataaaatagggtttaaaaaatatattctaattttcttctgtatacaaatagggttgggtttgatagtgaattagctttctggctggtgatgaactcgaagctactttttcccagtttatccgtttgcttgccggatctaaacaggaactttactaggtttcgtgttccattgagcaaacaatttcaaatctatttatatataagagaaaaactttctgttacccaatccaatttccgcagtaaaacagtggaaaccatcatcatagtttacgaataatttgttatgtttacatttatgtaatattaaaaaaaatatttgttaccgatatttttcttaacaagagagtaggttactcccaaatttcatcacaaaaagaccttcaacgcttgtatcaatttatgtaaatccaatcgtatcgttctattctttcattaaaataaacaaatttttaaatttgagaaattttcaattgtcggcgtttcttgaatgagcttgatcagtttcagtgtatgagacaatcggactaatactaatccttgaagaagttttgttgtcgttctcacatcacatggacatgacgacttatagcggacgttaggtttaattgttctggagaagaaacatcaaaattatgaggacaacatagtgcatgtgaagtattaacttttgtagatgaatgtaaatggaaagtattctagctagggtacttaaatctactaaactacttctctacaaaatttttagcattttagctatttggatgtaacgtgcatgatgtgactatcattggatgtagtattatagattaacctaatcataattttgtaacttgttcgatatcattttcatatacacatttgtttatgaaatgtttcaaaagattttttatttatttatttagaattttcttttaaagaccaatttttgcctagtaactagtaaaaagtaggtggacaaaaaaaatactaaagaaaaatggtattaattatatctttaaaggcggtttggcaaattttgaaaaatggaaagaaacagttacttgtttaattattagagaaaaatgtgggaaattatgttggaaataaaaggatacaattgggtcaagaagcatagtaaaagtcaatggtcaatgtataaaagaccacatagagtttaaaacataggtttttgatgcatcccccacaaggccacaacatctgtatacccaattcgattatgactgatatgacatattatttatcaaatccttttccaaaaagcaaaaaaaaaggtctttacatataaaacaacgaccttacgaaaatgttcgtcccttatttagtgtttaagaaaagtcttacattatataaacttttttctttctcttattctgacaacaatttagctactttgttttctcatcaatatgtgatccattctccaagaaaatgtacaaatctcaatatataagtggccatagagaaaaattcgtaaggtagaagaacaaaatcaacgagatcaatctttctttcacgttgttaattaattcagattttcttagatctatgaatgttaattgttcttaaaatacagattagatgatacagattcgagggtttcaatgtcatctaatgctacgggaatgaagaagcgatcatgttttggattgtttaacgtaactagtcgtggaggaggaaagacaaagaacacatcaaaatcatttcgagaaggtgttaaaatcggatcagagggtctaaaaacgatcggaaaatcattcacatcaggtgtaacaagagctgttttccctgaagatctaagagtctccgagaagaaaatctttgatcctcaagacaaaacacttttattatggaacagaatgtttgttatctcttgcattcttgctgtctctgttgatcctctgttcttctatctccctattgtcgataactcaaagaactgcattgggattgactctaaattagctgtgacaactactactctaagaacgatcatcgatgttttttatcttacacgaatggctcttcagttccgtaccgcttacattgctccttcttctcgtgtgtttggaagaggtgagcttgtgatcgaccctgcaaagatcgctgaacggtatttgactcgttatttcattgtcgatttcctcgcggttcttcctttacctcaggtagttaataaaacgcttcaatcttttttgttttgtgcattgttttcaattgaatagatgattcttggtggtgttgatgcagattgctgtgtggaagtttcttcacggatctaaaggaacagatgtattaccaacaaaacaggcgctattacacattgtcatcacacagtacataccaagattcgttaggtttattccattaacttcagagctcaagaaaacagcaggagctttcgctgaaggtgcttgggctggtgctgcttattacctcctctggtatatgcttgcaagtcacgtaagcatttcaaaattcatccatcagcactaggttaaatatctattgtttttttttttggttctgtttttaagaaatgttgttatactttgatagataactggagcgttctggtacatgttgtcagtggaacgtaacgatacatgcttgagatccgcttgtaaagtccagcctgatcccaaggtctgtgttcagattctttattgtggcagcaaattaatgagcagtcgcgaaaccgactggatcaaatcagtccctgatctttttaagaacaattgttctgctaaaagcgatgagtctaaattcaactacgggatctatagccaggctgtgtcttccggtattgtatcttcgacaacgtttttctccaagttttgttattgtctatggtggggtctccaaaatctcaggtaccttccttggaaaatcgatgaatagctgttagactgtggtgcaattttattgacttgggtgttttcttgtatagcacgttaggtcaagggctgcaaacaagtacatatccaggagaagttttgttttcaattgcaattgctgtagctggacttcttttgtttgctcttctcattgggaatatgcaaacttatcttcagtcacttacggttcgcttagaggaaatgaggattaaaagacgtgattccgaacagtggatgcatcacaggtcacttccacaaaacctgagggaacgagtcagacgttatgatcaatacaaatggttggaaacaagaggagtcgacgaagaaaacatagtccagagtttaccaaaagatcttagaagagacatcaaacgccatctctgtctaaatttagttcgcagggtaagttttcagaaatgtgaattgcctaaagatcctacacttcattcacaaggaacaatgttctttcttttttttgcaggttcctctgtttgctaatatggatgagagattactagacgcaatatgtgagagactaaagccaagtctatacacagagagcacttacatagtgcgagaaggagacccggttaacgaaatgctcttcataatccgaggccggttagagagtgtaacaacagatggtggaagaagcggtttctttaacagaggtttattgaaagaaggtgacttttgtggtgaagagcttctgacttgggcacttgaccctaaagcaggctcaaacttaccttcttccacacgaacagtgaaggctctaactgaagtagaggctttcgctttagaagcggaagagctcaagtttgtggctagtcagttcaggcgtcttcacagtcgtcaggttcaacaaactttcaggttttactctcaacaatggaggacttgggctgcttgtttcatccaagccgcttggcgtagacatttaagaaggaaaatcgcagagcttagacgtaaagaagaagaagaagaagaaatggattatgaagatgatgaatattatgatgataatatgggtggtatggttacaaggagtgatagttctgttggatcaagttctacattacgttccacggtatttgcatcaagatttgctgctaacgcgcttaagggtcataaactaagggtcaccgagagttcaaagagtttaatgaatttaacaaagccatcagaacctgactttgaggctcttgatacagatgacttgaactaagtacttatagattgcacacttccaaacattttcattgtaaaacatacaaatttacatctataaccaaagctgttacacacttacacttacacaagataaacacctagaatatatgattagatatacacacaaaaaatcaagggaaataaaaaaactttctttagagattcaagaatccaaacctaataagccatacgattgtctttgtgaagcctaaagaaataagctgcagcgcttaagacggcagtaaccaaggcaacacctttgaaggcatcaaactcatcatccatgaaattgaagaagatcaccacaagaaccgacacaatcggccacgtaatgacactgatcacattcgacaacacgctcgaaacagagtagacaagtccaacaatcccaacccaatagacctgccacgaaacagcttgaccaaccatagccatcacataagaacctttccctttcgagaatccattcatttccctcttcaaatcgtgttgctcaccggctataagcagacccacgacggagatgatcgtagcaacgagagaagagaagataataacttcgaaaacagaggcaaagcttggtttttgattggttgattcagttcgtttgaagatgtaactgtcgaagacgttttggatgttacagagaagaagagcgaaacagattccagcgaacagagcagcccatgagcctctagcgtaattctcctctgcttcatcaggctcaccaccgaatgaagaagacagagtaagagctccggtgatgatagctaagatcacagagataacaacccatcgattgaatttgattttgttaatgaaagctgcgaagataggagtgaagaagagctgtgctgtgtagatcagagtgaaaacaccaaatgggatctcgagttttcccatggctgcgagtcttccttgaacggacatgataattccgatgcaaatgtagatcacagctaaggattttaagtggattgaatcggaagtgatcggaggttgttgatggtggttgcgtttgttcttggtgatgaagatgaggaacgggagaagaaggagagggaaaccaacagtttggagaagagattgagtccaaacgccatcgttttgacggttttcgttgtattcgcttcggttggttttgtcgtagtagaagttttcgaggagtttcgctatggattgaccgatgatgacgaagatgattgagatggtgatggttggccagtggtttggtttccggattgtgtttccggtttggttcatgcgtgtggttgaagaatcacgctcgatgttgataggtatttgcacaaattgttctgcaaaaagaaacagaggaaattagaatcaaattgttttgtaagaagaggagatcaagaaacgagagatctggtttgttgattcttattattacctggaggtttggtctggaaaataggttgttgattctgagccatggattggaactgattgtcggagattctgagcggatttgagttcaatgtatgtcggcgattagatttggtaatatgtgatatttggagtggatgatgttgtgggataaaggaaagagaagggtttattatatatgggcacgaaaagtctaccctggcggcgtaatggtcaatcaagcgagcctcatgtctacgcgtcgtcgttttcaacttgttccgggttgtttcgtcatccaaaaaagtgtgtaaacaacacttagaagtaacttattcttgtctttacaaaatccaagcaataatcgacaaaagatgatgagaaatatttgaggttttgaatcttgattgttttctatcaacgaatattccgaattggatttatggttcgaaggttatataaggaaatggtatagttaagtttaagttatattgactttgtttgttttgggggtttgacctttgggattatccaacatcctacgtttcggaaattttgaactaacacgatgcccacttggcagctcactacttgtaatatgatactctcttaaatgcgtgtcttcttatgacttcatcttagaatatcatacttcatgtaaggattttggtatatgacattttataatgctcaagatataatcccaaaggtgcaagattagaatgaacttgaacttcgaatcaaattgtttgcaataactaaacaaattttgaactcagattcaatgttgttcaacgtaacattgatcatttttcaaccaaatgagcttcgaaagtttggattttacaaaataagagattaagggtaacaaacaaaggcaatttccttggtgctcatttgacacattttacttaagaatcatacaaaatctctatgtacacaattgcctcgtttgactatataaacgtcctcacactgtttccacgacgctatacccattatgacccataggcatacatgctctcaaatatacactggacccgtaattaaaataacattttaatacttaacaaattagcatgtcttgaccaagagactgaagcagccaaagttgtccagagcaatagctcaagtaggcataacctattactgtgttaatagattcacaaaggcaaaacaactattactaaaccttcatggattactcatctatataagttctagacatgtgttttgaattccccggttcatcatcggtacaatagtttcagaactaaaacgctatggggcattgaatttgaaactgtgatcacgcaaacttcttaaatagaacacccattagaacacccatatgacccataggcataaaagctatcaactacactggacccataattaaagaacacagcatatcaccaaatcaacttgaggcagcctagccacagttgtccagcttaagtaggcataatctgtcatgtgttaattgaattcacacagacaaagcaactattactaaccttcatggattatacatttcggcatatcatcatctataccagttttagacttttgttatagtttcagtactaaaacgctatggggcaatgaaactctgatcaacaaaatttctttagatagcatttccacaggcttttcaatgaacatgccacaactcgagaagtgaggatttggtattaaaagccttaacttgcatcactacattattctatgataatagagccaataaagtaaaaccattctgtttgaccaatccagtcatatgatccgatgatcatagaggcaaccaatgatttggcattgcaacaccgattaaggaaacttctttagaaatacctttcaatgaaaatgccaactcaacaagcatggatttagtactaagaaccttacttgtatcactacattattccttaatcacaaaggcaataaagtaaaacccaattcttaatcaatccagctaaattttcctatggtcatagaaacaaagaaggatttggcattgaaactccaattaagcaaaatttctttagagagcatttcgacaggctttcaatgacaatgccaacttgagacgcaaagattttgtattaagaacgatacttgcatagttgcattattagactattctttgatcatagaggcaatctagtaaaacccttttcttgatcaatccaaatataacattcctatgaaacatctccaccatctattccctaagtttctgaaactttacacattgatcaaatataatgtatccaataactgaaaacgcttgaaagagagaccagaagaaatttctaaataccgatttaactatggctgcgatgggaacacatctttcactgcagaagctgcggtcaagtaattgtgaagacatagaaattcacagattgagaaagaagtcttgttttctctcagtcgctccagttgtctttatcttcagctacttcaccttgcgcctgcaaatagacaaatcttgattaaagagacatccacaacaagactgcctaacctctaaattatgaaaatttgaagtagtactagaatttagctcaaccatttcatcttccacggatccgcctggtgaccacacaattatttgtctatctgcgccacttgtgtatagttcctatgagcaagtataacaagtaattcggatttagaggtgtgttcaagcaaacttacaaactcaaatcactcgcgaaattcgggaagattctgaggattgagtttatacctgatcattggaattaaagcagcaagtgttcacgctttcgtagtgtccacgaagcatcagtgttgttctacccgaccacatgccaaaacccttatatacagttgcagcaacaattcatcaaataatgcaagtactggaatggaaagatttgctgatacaatagtaaggtggtgactaccttcacagtcttcatgcacggaacaaatacgagagctggatcatcgcttgtatctaattgaatcgctctgtctgtctggatgcgtccagtttcaaagttcaccagggtattgcgtccagattcaatatcccacaatcttattcttgaatacgaccctgaaacataatagtaatagactcttaagtcttaactgttgtatcaccactgatgtgtacggtagtaattagtgctaccacaaattgatatagttcacttgatgctaaaacccctaacacatcacttccacttcgtagagaggcatgtattataacatataaccagcagatgctgcctataccaggttgtgacagaggtcaaataaataacctaaagaacaaagaaattagccaggacaataagaactcaccagcactaagaagatacatcccatcgttagttgcctttaagccagtaacaacaccataatgagccgtagcacgatctagagtagataacattccagggtgaattctcttctgtcgagacttttccactgaaggtttctcgctagatgatccctttacactttggctgccagtgtgtttactctgcaatgtcttcaaccaattttggtcccccagagaagattttgcagctgaaaaaaactttacaacaagataaaaaaaaaattactacagggaatcccctatcaataaaacagatattgattatccattctgtctgtcaattgtaggcttgtagacatgcaggttaaactggatataaataatggtcctaaatttagaaggcgtcatgcttatgggagaacgggacgggacaaaatctgaggcaattattgttgtgtgcagagaaaggctcaacaacatatggtgacactgtttattcagattcagtagcatcttaggaatatataaacgtagatccttcattctggggccacagtccccttgtacgagatgatacaggatgagtgtgacttgagcattttggtactgctaagtattgtccaccctctggtagaaattgttatttactacatatctggtcgtttatcaggtcttgcagtcatactaaacaggtggtatacaaatgattgaagtcgcgccaacacaagaaaaccccaactaactttttaacttcggaaaattccagtttgaaaatcttcacacaaagttgggtaattaatgctaactctcactagcatgtcagtaacaataaattacactcttacacagatgcgtctaaacaatataagaagagataccagtttaaatatacagacttcagggaatttaaacagaaaagaaatcaataagtaattcataacttgtctattcaagaaattgtagtaaaaaagaaattcaggaataaaccttactgctaaccgctggtcgctttaaaattggtggtcggaccccaagttgtgtttgtgagttatctagaacacggaaacatccagcacgtctgatgtcccagaaacgtattgcaccatcacaccccccagtatacaaaacccactcgctggaagtagaccattccactgacataacaccatctggcatatcatcaaaacatgacaatttggtagcctggttctttaactaatgaattttgaatatgaggaaaagcatgagtaaagtagcttattatcgttccagtaatcatcaactgaatacaattctatataaaattttgatacacttcttttccaaagaaaaaaagaaaagtaacataccacggtgacccgataatgtgtgagagaatgccccagaagcaatatcacagaggcgaacctggacatcatcagttccagcagcaattaacgtgtgagacattgccatagaagacatggcagttctataaacctttccaggcattttaaaatccacaaccacctaaaacatatgaaaagacaaaaaatgcgtcttaaaaatacgaaaaatggaagtgatataccgtcttagttaaaagcttagtacctacctgcgaagtattggtatcccatacttttacgtaatgatcaaaagaacctgtaatgaacatcccagtgtcaatgggataccaaatggcagaggatatggcatatttatgtccattttcatgttgcttacggacagtaaaaatacacttgtgcttggcaattagaccacttgcctcgtaatcggtggcccgcttaacatcaaatacagcagctgaaccatctgctgctccagagagcagatatctcccctccgtcaaatcaacctgataacacagttaataacacaaccagctaccaaaatatggctactctagaagcagcaaactacataaactagattcagtcccagatcttttatatttttagtgatttctcagccaaagactgagaacaaaagtcacggataagaagagcaagaaacatctgagagaacctgaagggagttaacggagccacgatgaggagaaacaaaatcttttcgattagagagctggagagacaaaatccggcgggatttgaatcgattggcgaaggaattggaacgaaatcgaccggtttctctgtctttaaaagccttccacattctcctagcatctcgtcttctgattctcgtggatattaccagactttatgtgtatatatactcgagctcgaatctcccttgtccagctccaaaacccctaacaaaagctttgatcctcctccttttaaagttttgtgttagaaaaacaatgtcgcgcgataaccaacagcaatcgaaagaacaaaaccaaaccacctcaaagaacttgatttcggtattaaccggactaaccgtcggttttcatatcatctttggatttattttccggtatatacagtagttttaatagccaattaatttgttgatttaatttttctctcaattttttatttttttcgtagagttaataatttaccccaacaaaaatacatacagttagtcctaaatcttcactaatccactaaaaacaatatgtcaaagagaagcatccatatctttacttgctatcgaagatgtgtgagcttataaaaagaattttgccgagaaacagggataatagctaactgaggaatcgcatgagcatattgaatctctcaattttcccagaatcttcttcactgcctcaaaagaaatatgaggctttggcactcacatgatttatacaatttctaacctgcctctcagaaacataaggatgacctaatattatttgttgacttgtttgttttcgtgtcattgatccacaaacaaaaatacgggattattcaacatcctacgtttaagaaatttgcacaaacacggtgccaggtctcttgagatttggatataacaagataggagattaagagaggctaatagagaaaggcaattccttggtgctcatttcacgcattttacttagaatccagagtctacaaattgatacaacaccagaacgcaatcgcccgcgtttgaccattaaaatgtccccacactctttctatgacgctacatgcattagaacttaatcaatcttttaaatattgatgataagaaactacactacccatagtccatagacataaagaagctacacgcgacccattaattcaaatcacacatcctaataccagatcaattaagcagtcttcacacagaaactgaggcagccaaagtggtccagaggcatagctcaagtgtgcataatttatcctcttattaataaactcaaaaagacaaagtaacaattactaaccttcatggatcttacatttcagcttatcatctaaagattctatactagttttagacatgtttcttcgagtcatcatgggtgtaacagtttcagtactaaaacgctatgaggcattgaaacactctgatcaagcaaacttatttagatgaaaatgtacatgcttttcattgaacatgccaactcaagaagccattctttggtatcaagaaccctactagtgcaatcaagtaaaacccttttcttgatcaatcctactactgtatataatcctatgaacatagaggcaatccagagtctggcattgatccgaataagcaaaagagagcatcttgagaggctttcaatgtaaatgccaactcgagccgcttcgtattaagaacaacacttgaatcactagagtaatcttttatcatagaggcaatcaagtaaaaacccatttcttgatcaatccaaacgatcctatgaaacacatctccactatctattacctaagtttctgaaactttacacattgatcaaatataatgtatccaataataactgaaaacaccgaaacggagaccagaagaaatatctaaataccgattaaactatggctgcgatgggaacacatctttcacagcagaagctgccgtcaaataattgagtgtattcctcagcgtctccctctctctctttaacctagccgccgtatcttcaagctccagtaacgcttgctgctccatcggagctccttcaaacgtgcttccgacgaagaacgagaacggagtcggaaactgattcttcctcagatcctgagattccttatctggtttcccattcaatctattcgacaatcgaatcacttctttcatcagaacctcaacttcattcgccaattcgtccagattctcttcaccggacggtcgatcttcaagccacgtcactttcgcgacgaggtaaggtttcgtacggacgagatcggtgactcggaatcgttcctgacctttacagattaagaagaatcgatcgtcgactagacgctcgtgtttcacgatttctccgacgcatccgattccagctgcggagcctgaaacagcgtcggagtagacaacgccgaatctgagatcggattggagaagcgtttgcatcatgactcggtaacgaaactcgaagatctgaagcgggattgttgcgcctgggaagagaacgagaggtagtggaaatagaggaagctcgactaagtcatctgatttgggtggattcgcgttgttgtggtgtttctcggagaaggaagaggatgagcaacggaaggagaggagtttacagcttcgacggttgatgctccggtaagtagctggaagatgtagaggtttagggttgaaggcggagagataaggtggagttgatttgaaggaaggagatgagacagtgcttggaagcgccattagagagagtgaaggaggagaggtttcacaagtgaacggcgaaattgatttaagattttaattgtttcgtctttaaaattaaaccttatctgtttgagaaaatatatttcatcagatatttttatttcataattcctgtggctagaaatttgtttagaatagaaataaaaatatatacgagccatttggttcgtgtgtaagtgtgtagtacatgcatttgagacaccggtccacttggatatcatttcgtagtaaccatgaatttgcaggggtaattgtgtcaatatctcttggtcatatataggttacaaagatgaacggaagaaagaaaaaaaggtgatcggagattttggcttattctcagatttgggagaaatggcggcagaagagggtcaagtgattggttgtcacacgaacgatgtatggactgtgcaacttgataaagccaaagaatccaacaagctggtctcgattctcacccctttgttatgcaattctctttggttgtattggatttgggaattaggtttttgtttgattagggttactgtttctagtgtcaaagaaagcattatggtttcacatgttatggtataggttttgattccggctaacgtagagttggaataaacggattgttaaggagatcacaacattagatgtgagggcaagtgaatcatcagtgaaacttacgttttgatgtgtaaacttttagagtattttctttaattgattcatctttgtgacttttgttgtgttcctcttttccttattgtagctcagagtcacccctctggtaaaaaaaatcattttggattgggttatttaggattctgatggtgtgataatttcattgttttcagattgtgattgatttcactgcttcatggtgtccaccatgccgcatgattgctccaattttcaacgatttggccaagaagttcatgtcaagtgccatcttcttcaaggtggatgttgatgaacttcaggtgaacaaatacactttctttacaaacaaattaatctcctcactcttagactttagaattacactgatatattctatatacttgtgatgatgtttaacagagtgttgctaaagagtttggtgtggaggcaatgccaacctttgtgttcattaaagccggcgaagttgtggataagctcgttggtgcgaataaagaagatcttcaggcgaaaatagtgaagcatactggtgttacaactgcgtaaatcagtttgaggcataaataataaggtctaatttgtttatcttaaactagctagacataacgggaatagtgcagattggagatgaagtagaagttattgatctctgactgtcataaaaccatgctttttttatatggtctttggcttttgcctaattcatatgtttaggtgttctttctatacctccatagaccaccactcagtcgaattttcagatcagtgaaatagactcttgtgaatgaattgttccatgcatatcataatttgaatatctgaaatctgaggccttgcaaaggtgtaaaataattttgtgcgagcagctgtttccacgtgttataatttgattggaagttgaaattcttatccaccaaacgtttcatattttgttgccaacgaacccattaccgaggttcttcgtgctttcttatcttctttcttcttcgctgagcttactctgtaatcttgtgaactctcgttgataattcaaagaggaaacggagataaaggagaaaactttagagcgtgttcaagttaataacagttctgtcgataatggaaaagctcttcgtaccatcatttcccaaaacttttttgaattatcagactccagctaaagtagagaattcgcctgaacttcatccaaaatccagaaagaaaaacctatcattcaccaagaagaaagaacccaatatcattcccgacgagcaattcgattacttgtgtagaaacggaagtttgctcgaagctgagaaagctctggactcgttgtttcaacaaggttccaaggtaaaacgaagcacttacctcaaattgttggaatcgtgtattgattctggttctatccatttgggtcgtatccttcatgctcggtttggtttgtttactgaacctgacgtctttgtggagacgaagctgttgagcatgtatgctaaatgtgggtgtattgctgatgcacgtaaggtgtttgattcaatgcgtgagagaaatctgtttacatggtctgctatgattggtgcttactcgagggagaatcggtggagagaggtggcgaagctctttcgtttgatgatgaaagatggtgttttgcctgatgatttcttgtttcctaagatattacagggatgtgctaattgtggagatgttgaggctgggaaggtgattcattcggtggttataaaactcgggatgagttcgtgtcttcgtgttagtaactcgattttagctgtgtatgcgaaatgtggtgaattggatttcgctaccaagttttttagacgtatgagggagagagatgtgattgcttggaactcagtactgttagcttactgccaaaatggtaaacatgaagaagctgtagaattggttaaagagatggaaaaggaaggaatttctcctgggttagttacttggaacatactgattgggggttataaccagctagggaaatgtgatgctgcaatggatttgatgcagaagatggagacttttggtataactgctgatgtgtttacgtggacagctatgatttcgggtttgattcataatgggatgagatatcaggcattagatatgtttaggaagatgtttttagcgggtgtagtgccaaatgcagtcactattatgagtgctgtgtctgcttgttcatgtttgaaagttataaaccagggctcagaagttcattctattgctgtgaagatgggatttatcgatgatgtgcttgtgggcaattctctggttgatatgtattcaaagtgtggaaaactggaagatgcaaggaaagtttttgattcggtaaagaataaggatgtatatacttggaactcaatgataacagggtattgccaagcaggctattgtgggaaggcttatgagttgtttacgaggatgcaagatgcaaatttaagaccaaatattatcacatggaacacaatgatctcaggatatattaagaatggagacgagggtgaggctatggacttatttcagaggatggaaaaagatggaaaagttcagcggaatactgcaacatggaatctaattattgcaggttacatacaaaacggaaaaaaagacgaggccttggaactttttcgaaaaatgcagttttctcgcttcatgccaaattcagttaccattctaagtctcttaccagcgtgtgctaatcttcttggggcaaaaatggtaagagagatacacggttgcgtattgcggagaaatcttgatgctattcatgccgttaaaaacgctttaacagatacttatgctaagtcaggggatatagaatactcaagaaccatcttcctgggtatggaaacgaaagacatcataacttggaactcgctgattggaggttatgttttacatggtagctatggtccagctcttgctctttttaatcaaatgaagacacaggggattacgccgaacaggggaacgctttcgagtattattcttgcgcacggtctaatgggaaatgtagacgaaggaaagaaagttttctacagcattgcgaatgattaccatattattcctgctctggaacattgttctgctatggtatatttgtatggacgagccaacagacttgaagaagctctgcagtttatccaggagatgaatattcaatcagagacacccatctgggaaagcttcttaactggctgcaggattcatggtgatattgacatggcaatccatgccgcagagaacttattctccttggaacctgaaaatacagccactgaaagtattgtttcgcagatctatgcattaggtgcaaaacttgggagatcattagaaggaaataaaccgaggagagataacctgttgaagaaacctctcgggcagagctggattgaagtcagaaatttaattcacacattcacgacaggtgatcagtcgaaattatgtactgatgtgctgtatcccttggtggaaaaaatgagtaggctggataatagaagtgaccaatataatggagaactttggattgaggaagaaggaagggaagaaacttgtggaatccacagtgaaaaatttgccatggcgtttggtctcatttcgtcatccggtgcatctaagacgacgataaggatcttgaaaaatcttaggatgtgccgagactgccatgatactgcaaagtacgtctctaagagatacggctgtgacatattgttggaggacacaagatgcttgcaccactttaagaatggagattgttcctgtaaagattattggtagagtgattattgattagccaaccactaaggtacgacttaacttaatttcaacagtctttttaaccacatgatcacgtaatatatatatcattctcatattttttacagctataaaaagattattgagttagcagcatggcgtgggtaaaattagttgaagtttgaaagctaaattccaatccttgtaactaactacggaagttgaccaaaggttcattagtgcgtatttttgttatcttgtgatatatgattctttgaagaatgtgattcttttttccccccatgatttcccttggtagtggaaaccagaatgtaacgtgtattatgcaatttgatttgatatattccagaaaattcccaaccacaaacggaaccttttaatccatcataaattcccatcaaatgtctaagctatgtgttgcagtggtcagctatctgtttactcgagcttcttacacttgctttgagtctttagagatcatcttaatctgaggatggtattaacatcatcttatgttttctttcttcagtttctctatattaaaatttcaaccacaaaaagctgatattgcagttatgattatgtgagattaacttgatcttgtttctgcagagtgttgaaggcaagcctgcatcacttggcccatggggaggccagagtggtcatgcctgggatgatggaatgtacaccacagtaaagcaaataattatagcccatggttctggaatagactccatacaaattgagtatgacaaaaacggtagctcggtttggtctgaaaaacgtggaggaaagggaggcaagaagtttgataaggtatgatcgagactctttatcctataaatattgtgttggtggttctcagaaattaatcactgttctcttcttgctgtttaggtcaaatttgattacccacatgagtatctgatttcagtaaatggaacctacggtagctttgacgtctggggaactatatgtgtccgatcacttactttcgagagtaaccgcagaaaatatggaccgtttggtgttgattcaggtacattctttgcattgccaaaatcaggatcgaagattattgggttccatgggaaggctggttggtatttggatgctattggtgttcacactcaaccaattcctaaagagaataatccttcgtcgaaaatccttttgcactcgcatcaaagtttttctcagggtgataagaaacatgagtactcagtgctacaaggaagtgtagggcaaaactttgatatagttgttaccctcagaaagaaagatccaactttgccttcttttgagtcccgagattccgcaggagccgaggtcaccaaacataaggtgatgtcaagacttttctgttatacattcgaaaaacaggtcttattggatttttactggtttcttaacaattttttttatggaatttgttttatcagttggtgacagatactgagaagtcacagtcaaaaattgaaggtggcgcgaaaacatatggaccatggggcggaaccggtggaatcatgtttgacgatgggatttataccggtattcgacaaatcaatttgtcacgcaatgtcgggattgtgtcgatgaaggtctgttatgattttagaggacaagctgtgtggggaagcaaacatggtggcgtgggaggattcaaacatgataaggtgcgtgaatttgaaacgatttttggtctacttaagtttaattacacttcatatttcacaggtttaaatgtaacttgcagattgtatttgactacccttcagaggttttaacacatgtaacgggaacatatgggccgctgatgtatatgggacctaatgtgataaagtcactgactttccgcaccaacagaggaaagcatggaccttatggagaagaacaaggaccgtcttttacacatcaaatggacgagggtaaagttgttggattccttggaagagagggtttatttcttgattccataggtgttcatgttatggaatgcaaaataagttcccttaagccatcatctcctcacaatgcaattgttcctcataataactccggcactgcgcaaatagaaaattccccatgggctaataagctagtccttgcagcaaacggccatggcgaagaggtaacttgtagattctatcaccatggtattttccggtttttcaagttttcgatttcatgaatagcagccactgtataacaactctactatggctcagtttatatggtttcggttttaatacgttatatatatcttagccaaattaagacctgtttgatttttaaatcgttcgtttcaagtttggttcggtttatctagattaaacaccctaatagcagcctacttgttgggtaatcgttttcacaggttgatcgtggagtcgtcaaagaaccaacaccgagcgggcctggaccgtggggaggtgacggaggtcaagcttgggacgatggagtattttcagggatcaagcagatatttgtgacaagaggaaatgatgctatcacttcaatacaaattgagtacgataggaatggacaatctgtttggtccattaaacatggtggtgacagcaatggagtcgctacacacagagtaaacaacaatatttctcctttcacataaagctacttttgtgtttgatgctttagaaccatttctaatgctctcaaatctgtgttgcagattaaatttgagtatccagatgaatcgatcacctgcatttcagggtattacggacctctgaacaattcagaccgatataatgttgtcaagtctctgagtttctacacgagccgtgggaggtacgggccatacggtgaagaaaccgggacgtttttcacttcgactacaacacaaggaaaagttttggggttccatggaaggagtagctttcacttggacgccattggagtgcatatgcagcattggcttggcaacaataagtcttattacagcagggctagttgtttcaagctcttctgataatcttctctgcgcaacaagaaaacatctaacctggttccaccgacgcttacagttatcctctaaagagttgcaaatacatattcatgctcctaaacgcattgaatttactttccagttaaaaacactgtttctataaacagaataaatacgaaaactctatagagagtgtactgtaaaatgaagtaatattggcatttccttgctaaacttttgtttaatgatccgaattggttgttcgtgagtgaatttttgcatgttgcaacacttctctgagcacagaagctattcgatgagacatatgatgttccaagaacatctcttttaccctctcataccctttcttccccattgtattcctcatcttcacgttagtcgccagcttcacaatgtttttggcgagaggtaacacgccatctttaccagtgttgtgcaatagacctgttgttctgttcactacaatctccattgtgcctcctgctgcagtcccaagtacaggaagcttaaaggccatggcttcaattgttattctcccaaagcattctcctctggcttgggagttttggacaagaacgtcaatagctgctaaatatggtgctaccttcattgttttgttgacaaagtggacaattttttgaagtttcatctcttggacaaagttgcgtagctctgtctcaaatttcgtctgtgcgctcatatcgcttcctactaccactgcatgcattgttggtacctcaagtttcttagtctctttgattactttaagactttcatggaacgctcggaggaatagatcttggccctttcctcgagatacacctgcataagagaagcaccagtcagaaagcaaattaaccaaaattttgagtcttttgcagattatgattcttaaagaaactaaggaagagaaagaatgtaagaaatgactaactattaataatgccaaatagtatgtcttcattcctcactccaagagattctcgaacttgctcacggagaacattcttggcgaaactatcttcagctacttccatcaactccttgctatttcctaggtgcacgacataagttttaggcattttaatcctgtgttacaacaataaaagaataaacactgttaagcttatgacaataacgtaaactaatatatcgcaagactctacagagaggaaacagaccctaagcgatcatgagttctgttcttccagtattcagctgttgcgtgcgaatcaatcatagcacctgcaacaaacggaaggtgcttgactaaatccggtttgaaatagtgacctctcatctcatgaatccaccagagtactttaggaagaactttaggaacattgtccttgagaactgcatcaagccatttcccagcaacagcagtgtttaaaacaaccagatcagacttgagagctgtatctatagctttctgactctttgctgatatcacctgaatgattcaaaaaagattgatcactaacaattatgatacgaatcaaagaaaaacaatggaggtggttagctaaatctgaacctggactcctcgatccaacatcttgtgttctagaaccttgatcacttcatcttcttcaactggtttctgattcgtgatccaaacaacttcagattcaactcctctaagcaaaaacgccaattccattaacaataaaggtccacctaaaatcatcacttcaagtttagccatagagattttgacaagagagtaacacgatcacaaaacatcacctgagagcgagagttcatgagaaacaagtaaaacgagctttgatttcatgaactcgagaggattcaacgatccagaaaccgattggatcttaatgtcactgttatcttccttctctcggctacatctctttccactaacactacaggaatcaaaagtagatctcacgagaatcattcctactgttgatacagataaaaccaatagaatcatcagtggccatctcttcttctgcaatgttgcccacatactcgttgatggcttcgccattgtttctctctacagcttagaatcacatcctagggtttacacagtaacaatcgatctcagaactttctaaggatctgtcgtcagtgatggagaaagcttggaacgaagaagtttagaggagagatttaatggggaaaagccgctaatcagtgttgactctttgcagaagtttgcaattcacgccgtttttgttatttagaaggaagttgattgccgtttctcagcaggcccccgatggaatcctctcttcatatttataatgggctttaaaaggcctatttgctaaaagcctaaaactaaactagttatgatgatagttaatgcatactatatggttttaattctttttttttcttaagctaagctaggcttcagattagttttgctgatacaattttggtttggttttgtttggttctaataatggagagcataatgatttcgatccatagaatataaatgttacaaacatgaattttagtggtgatgatccgtcttcatatatggtccaacaatgtatgtggcaataaattcttttactttttgttacacggccataacttgtggctatttattataaagttttttttcggatatatccatgtaattaatatatttgacaattggcaagaattattatacttcaacattttcctccaaaccaaaggttgttcatttcttactcacacacattttcctcgtttagcatcatcgattcatcctcaactttaaaatatgatttacagaaccatacggttttaaaaataattacatcattaataatctaaatttttagtagatttaatcaatctctcaccagctaactgcctaattaatttatttttaatcatcattataaatcaagatccacgtggaaacaaaagtcaatatcatcatctctcaaagactcaaaacacatgaataataattttccaacacaatggtacttgccaaatgattttgtgtcggctgctctaaatccaatctccaacaaaccaaaacgaaactacttgttattttaaaaatcagaggaaatggattatattattagtgtagctataaagataatcttttacgtattcttcattgtggaatatgcaaatacaaacatgtaagtgtataactaaaaggtttataacaaaagaaataaaaagacaagagaacttagaataaaaattgggtataacagaagagtaaggagggactcaccaactggttgttaagtcatttaatccatcaattaagcaattgagcagacacacacccacctttgttttatcttcttccttaaaccagcttatcagggtcagttttgtaatctcatattcctacctataatgacgtttctatgttttatttgatggagtttaatttccgctaccatgcataactaaaagtatatccgttatatcaaacatttaaagaaaacctcaaagatattgaactacaaagtgctcaagaagttctattaaaaatgtatcgaactttaactttatgatgaaagcaaggtgataagaacaaatagtttaaaaaaacattttagtttgaaatccaaatctagactctataatttgtggcaggtaataatttcactattttggagcctcacgtacacaaatcaggaagtcgttaaaagtttcccacgataccatggtaatgtacgcattatagattatttcgtttaaatagttagatttggtttttttttttaatatacaaatactaaacttttcatatataaacactcattccttcaacttttttcttttggttgtatttagttaacttatacggaaaagtagtatgagtctcaagtcaatgacaacacaacatcattaaagtataatacaatcatctataaaaatccatttatttgtgtgtgtggaattgttaagttttgtatgttaaagtcgtcataagaaatattatcacgtaatcaagaaaagaaaattggtgatttgtaagctctcacgtgtttctctatgaatggttggcacacaaaaaaaatcatattaatttatctttactctaagcatcagaaacagaagcttctgccgcaaaaaattaaaaattacaggtagcggttgtcaaatttttccggtagtgatcattattttattttattgttgatattgcataataatatttttaaaaattgggttggtgtctaatgtcccaatgataagttgggttggttttattgttcttgtggactgaaaaaaatttgtttatttaagaattttgcaattattaatcgcctctttctctatctctctcgggattgggtctcaaatctttttttgtcttcaactgttcgaaactcttctgcttttgtgtttcctgattcagccacatccacactcacaaacacaatctctaggttttttttcttccttttaactttgattctctccctcaggtagtttttaaaaattcaagttcttgattcttgattcttgatatgattaatcttgtactgtgtttcttgattattattttttgtatactttctgtgttttttttctcccttgctttttggaaattctcctacaagagatgaaatcatcaagacactttacttctttatgtaataattgaatcttctctgcttttgactcactacgttgagctacacaatttctttttactctgcatttttttttccaacctcaaattagggtttttttctcctctcaatttcacctccatagatcgggtattcctctacgattacacaattcctgtattgggtttttctgggtttcttcagttcttcacgaaaaacatttgctttttatcaagaatttgactttaatcctccgaataatttggtccgattctgtttgttgctttcgaaactgtttatgtatgatatataaaaaaaatggtttggtgtgaaatgattacgatgttttaacctctcttagattccatcagaaatttttaaaattccacaccttacacgactcttcttcctcttatttttttgcaggatctcatttcccgaccaaactcatcgaactaagaactcactgtaataaaacttttaaaaggtgtaaacaccaatggcagtttattacacaagtaatgtcggttgttaccagcaagaaccaatctttctcaaccatcaacaacaaaaccaacaagcttcttcttcatccgccgccgcttctttcaccgtcaccggcggcgatactgttcgaaacgagatggtttttatcccaccaaccaccacaggagacgttgtaacaggaaacggtaccgtttcaagcagcgatctaagctttcacgatggtcaaggactgtctttgagccttggtactcagatctctgttgctccgtttcactttcatcaataccaattggggtttactagtcagaatccttcaatttcagtcaaggaaacgtcaccgtttcatgtggatgagatgagtgtgaagagcaaagaaatgatcttgttgggtcaatctgatccttcctctggttatgctggtaatggtgggaatggcttctacaacaattatcggtataatgagacatcaggagggtttatgagcagcgttctgcgttctcggtatcttaaacctgctcagaatttgcttgatgaagtggttagtgtcaagaaagaactaaaccaaatggggaagaagaagatgaaagttaatgactttaacagtggttctaaggagatagaaggaggaggtggtgagttatcgagtgattcgaatgggaaatcgattgagttatctacaattgaacgtgaagagcttcagaacaagaagaacaagcttttaacaatggttgatgaggtaactaacttacatttcataaaactacctttggtttataacaggattgatggtgatttggttgttgtggatgtgttaatggttgcaggtagataaaagatataaccaatattaccatcaaatggaagcattagcttcatcatttgagatagtagcaggacttggatcagctaagccttacacatcagttgctctcaacagaatctctcgccattttcgtgctcttcgcgacgcaataaaggaacaaattcagattgttagagaaaaacttggggagaaaggaggagagtcgttggatgagcaacaaggagagaggataccaaggttgaggtatttagatcaacggttgagacagcaaagagctttgcatcaacagcttggaatggttcgacctgcttggagacctcaaagaggtcttcctgaaaactctgtctctgttcttcgcgcttggctctttgaacatttccttcatccgtaagtgtttcttctctcacaagtcacaagtcacaatctttcaatctcccagtacaaaacatttagagagactctatgtttttcttctgttttttttatttgtagatatccgaaagaatctgagaaaatcatgcttgcaaagcagacaggattgtcaaagaaccaggtataaaccaagcttttggtcttcacttaaaatttgcaccctttgtgttctgcttgaataattctggtttctctgctaaatgattaggttgctaattggttcataaacgcgagagttcgtctgtggaaaccgatgatcgaagaaatgtataaagaagagtttggtgatgaatctgagttactaatctccaaatcttcccaagaacccaacagcacaaaccaagaagactcctcatcgcagcagcagcagcagcaagagaacaacaacaacagcaacctcgcttattcatctgcagacacaacaaacattgtcttctcatcagaaaccaaaccagatcgtgttctaggcaatgataacgacccacagcaacaacagataaaccgctcatcggattacgacactctgatgaactatcacgggtttggtgttgatgattaccgttacattagcggaagcaaccagcaagaaagcagattctccaattcccatcacttacacgactttgttgtgtgatattatctggttcttcttggtacagaggagatgattcttgaagcgcaagaaatgtgcttttgcatttttatagtattaggcataatacacccattctctatggattatatagtagatgtgtaggttgcttttgtgtatagtagactcttaagccaaatattgatatgtgtgtataataatattcacggtggtataaaggatacttgcaagtgtgaaaaaatctgaacttgagacttttgtggtaaatgtttcacgattctttatagtatatatcactggactgtaaaaacgaaatgcagtccttgattttgaaaacaaaacggcacgtagtttctttgtactgtgaatcagttaaagtacaacagaccttggagtctctcagtcctccgatttcaatggcggtttttcagttaccaagtttgtcaccggagattcctttccgttttactcccacaccacttaaattttcaaatcgtaggagaatcaactttttccggccattatcagcaaccgacgattctcgatccggtgcaccagatccagaatcgccgaaccaaatgttcattctcgggatgggattcgtcggaggtttttttgcgcaacagctcaaagaatcagactggtctgatatctcagtttctctccttatctctatatctatctattttcatctttctccgatggtgttaacaattttggaggtttagggtggtttcagggacttgcaggagtgattctaagaagaaagaatgggaaaagagaggaattaatcttcatccattttctgcagactcacctgagtatttgttttaatcagatcttcaatgatggtaatctctaaaatctgagtcttaaactcttttgtttgcttgttaatcagatggagcttgctagattcagtgaaagattacactcatctactcatttccattcctcctttagctgacattggtgatccggtttgctttcttctccagcttttatcattagagcttaatgtgatttcttatttgataacactgtcttaactgtgatgacttccaaaagatgttgcggaatgtagaacttgtgagagacaagctttcgagtggaaatcttcgatggctttgttatctctcatcaacaagtattttcctttttaactttcctcattacatcaatgcttctgcttccacagtagacaggaacttacaatacttctctttgatgcttgcaggtgtgtatggagattgtggtggtgcgtgggtcaatgaaaagtaagtttctttcttccaagtttcatctcttttgttcatgatagataaggtcgttccttcatattgcagtcatctcccaaatcctaaaactcagtcagccaaagtgagattagctgcagaacaaggatggttaagcttgggtcgtgatcttggggtttcgactcaaatacttcgacttgggggtatttatggacctggtcgaaggttgtttacagcttctgattgtgtatgtagtgcttaaacaggctttaaaactgattctcaaaaggaacgtttcttgctgcagtgcaattgataccttgttaaagcaggagcgtttgtctgaaggtcaaaagagaagagcgtcccgtaaattcacgtcgagagttcatgttgaagatatatgccaagttcttaaagctgccactgaaaagccagcatcagggtttgtgtatccctcttcatctatgatcattcttttgtgatggatgattgaaccattgagacggatgaatcaaccattttggcagggagatctacaatattgttgatgatgatccggcagcaagagaagaggtgtttgaatatgccttggagttgatcgagaaacgttggccggggaatatcaccacaaaaccatttccatttctgtatgaatctcgggaggaaagttcattgagaggcgagaaacgagtctgcaacgaacgcatgaaggataaactaggagtgaaattgttatatccttcgtataagtcaggactgcaaagcatagtcgagaacatggacaaccgtttttgagcacaccacaggactaaattccgctgatctgaatctttcctgtggagaattagggactctttagtaaagatagatttttagtttatccttttttgtttcttctgcattctacaaaatgacaagtttgtttcattggtacacatattttccccatgtgacatttaaacatggaataaaagtaaaaagggatacaaaatgtttaagggagcttttctctaatccaaagccagtcctattttatgtcatgttgcctgattaaggccctgaaatgcggaaaaagaagtgttagcagttgagaaacttaactttgtttagatggaaagtgaacatattgagtctcgtatggatattttacctcaacgcttgaaaaagaatgacttaatcttttattactatgtctggaccaaaagctcttcttcgaggtagaatccctggctttactccacttggtgctgacggaaccgaagtgccatttcataaaagacttagacgtggagcctttggtattcgaactaggatccatcttcagaccttttccttctcgtttccctagattctggaacataagatcctcacattcactgcggacataactatctaccacacggttcttacaccttttgtaactcgttgccttcaattctgcctcggcttttagagctttcctcgataatttagtaacctgtgtctctgtgcatatgggacacgtaggatcatacttctctgtttcatttgtcattgtctctaagcatgccgcatggtaaacatggccgcacgctagaacagcaggaattggaaggtcaaacctggcaactggagacctttcagttaaaagctttgagcaacgcccacaagtctgctgatcaacagaaggggagcatgagaatctgctactactacacccacttagtcttcgtcgtccggaacctaagtgctcattatcaaaagaccatctctccctttgagactgagccacgagctcacaaaaggcgtttatggaccagccaccttcagaagaagcaaaatgggacccagtggcagtgtcattactacaggtcgaaagcacaaaggacgaccttccttcagatgttgagtaattattgggagatttcaatcccaaagtttgactatcagaaacctgcctaaacaactgctgcccaggtgaacctcgagcacgtctagacggagttgatctgggaggaagtgaatgtgtgtgagctgaaggaagatcagagaccgaggtggaacttgacggatttggtaaaactgatgaaacaatatctgatgagtcaactatattcttcacctgaagaattaaaagacgagagggttaagagactctgaagggacgaaaagagactctgattggagtaagtaatgatctcacctcaacacgaacaggacttgccaaggatacatctgcccagagaaaatagatgcatgagagacaggaaaaaaatccttcattacagtaagaaaataaagctgaaatgatctctaccaaaaaatgaaatgtctctcgatctaatcctaccaaataaatgttgttacccctttgactggattgagtagactggaaaagaacatccacgaaggaactaaaatcgactcaacagtatattcccaaacaatgaaactgaaagttctacactttccccacaaaaaaagtgtttgaacgaacatacctgaaggagatcgaatcgccaaacttgtacccgctaaaggagctgtaaccatcgaagctgtgcccatctctgagtctgcggatttctgagagccaagagtagctaaacccccagtttcagatgacggaggtcctctctctaagcctaacgacaacttatcgatgtcaatacctctactcccaacattatgattagatgaatctttaatctcatcagctacacgcctcctgttgtcccgtcgaaaactccacgatggtgaacacactgaattatcaatagctccactgggaacatttctgtcctttgcagccacacagcaaacagaccccataatccttaaaagagagctgtaatgaatatgtcttacacaatctccattggtggtgcttcctaatctaccactgaagaacttatcacagtagcaaaccacaattctgcatataaacaaacagaatgtgaacttcgaatcagagccattataatacatagaggtgaaggcagagacctcaaaatctaacgcagaaatcatcaatggaacggaattaaagtaaatacaatagatgattctaaaatccgggggttcaccagggactcaccagagcaactagggttccgcaggattgaaacgaggtatatgaagatgcggcggaattcgaatccaacggctgagagagatttcaattactcgacggagatggccgccgatctgagagagagagagacggaggttgggtgcgtcgcagggaaattgtgccacgtcacccttcctctcttctttttctgttctctgtttttcttgtgctactatttgtttttggtcaaattttacttttttggtcaatttgtttcttttttttttacataacaattttttttttttttttactgaacaaacataacaaaatgttttttttaacaaacataacaatatgtttcctaatgcaatttgattatattttttagtagtacttagtaagtcttggtatgtgtttatggacacatcgttttcgggaaacgaattaaattgtactccgaaaatgataaatgcatggagtaattgtataccaactaacttgtaataatttgaatcaacacatgctcttttgtttacgcagcccatgcatttatcgttttcgaaagtatttaattcattttgttataactacgatgagaagccgagagaaccacagaattataatgaatcggataagaaaaatcaacattctccccctataaatacaaaacaactagctaaagttcgaaggattcatacataaatcttcaacacaactctttaattatctagtttaatacaaatggcggcgatagaggacagtccaacgttttcctctgtggtaactccggcggcttttgagataggcagcctcccgacaaccgagataccggtggatccggtggaaaatgattcaacagcaccgccaaaaccggtgagaatcacctgtccaacagtcgccggaacttatcccgtcgttttattcttccatggcttttatcttcgcaactacttctactctgacgttcttaaccacatcgcttcgcatggttacattcttgtagccccacaggtacataatttaactatacaaaaaataattatgaatcatttaaaaggataacttacggtatgtaacatgtaacatgtaaaacaaaatgtacattaattgagattgattgttacgtgaaaagatataagttaattttatattcttgaatgacagttgtgcaaattattgccgccgggagggcaagtggaagtggacgatgctggaagtgtgataaactgggcatcggaaaacctcaaagctcacctaccaacttcggtaaatgctaatggaaaatacacctcactcgtgggccacagccgcggtgggaaaacggcgtttgcggttgcgctaggccatgccgcaacattagacccatccatcacgttttcagctctaataggaattgatccagtcgcaggaactaacaaatacattagaaccgatccgcatatcttaacgtataaaccggaatctttcgagctggacataccggttgcagtggtgggaaccggactcggaccgaagtggaacaacgtgatgccaccatgcgcaccaacggacttaaaccatgaggagttttacaaagagtgtaaggcgacgaaagcccatttcgtggctgcggattacggacatatggatatgttggacgatgatttgcccggttttgttgggtttatggccggttgtatgtgtaagaatgggcaaagaaaaaagtctgagatgaggagctttgtaggtggaattgtggttgcgtttctcaagtatagtttgtggggtgaaaaagcggagattcgattgattgtgaaggatccttccgtttctccggccaagcttgatccttcacctgagttggaagaagcttctggtatcttcgtctagatttgtgttatgtactattatcagaggggtcttgaatatttgaaaaacctatcaatgttttctagctccaagctagctattgttcatgtcctaagttgcatgtgtatttttattaaactcgatcaaaacatttgttatagttttaccccaaaactttacagcttcttcttatactaaaacctaaacacatttaaatagctatataattctctatataattcttatataatgaaatgtgaccaagcttttcaacttcgttgcaatgattcatgtaatttggtttaactccgtcacaaactctatatctttgtaacatacccttattcaaactttcttgttgtattctaaagttaatggtatttgtaacatatcgcaatttcgatcttattttcgtaaggagaaaggaaaaatttgctcctgcactacaacatttaatgagagctccaaactctacaaacaagtcaacaatgacaaattaatttgggcctgcactacgacaacgatacagcaaaatggagacaaaaccacatttaaggttttattgtaggcaaatggtcctaagattgtctgtatacgaaaggtgcgtcgtgagtctcgtgactcttgtgtatgtggtggttattttactctcgagttccacgtgtgtttgttataattgttagtatatacgaaagattgttagttataaccaccagctgacctgctgaagaaaggaattgagatgagccgaaaaggatcgagtcataaagcttggaccggtagatatttaaatgggcctaggcccatattggtcatttactttcaaagtagataaaacagtttcccacacatcccactaaagtcacatccaaacattacaaaaagaaaaaaagaaaaaaaccaccttatccataaccatccctgacacaggcgccgtacacgtggcgtccattaggcttaatttaatcggtgactgttacttgatgacttgtcagttttccacgagttaacggttcacgtcatcacggctagacactgaattctcatttttatcccttcaccacgaccattaatcaaatgcaagatattggtgaaagggtatattcgtcattgaaacaaacatgagtcgataaaattgacagagtcacagattctattttttcctctctctctgctctttgttgatctgtctgtgtgggattcttcctttagttcctctgttgatctatccaatcgaatcttacgaaaattttcggtaaagtttcactctttcttgtatttctatcataggtgattgtagagattcatcagattttatgtgattacgtggtcaatttagctactaggtgatataatataaactatagttttcacttgttttgatcaacatgttttgtttttttcccgacctttttagctattgtatttgtgtggtgatcagttatttctcttgcaagtaaagtagttttgtgattttgtgaaccgagttagggttaagagatggggtgatgttggatactaaaagttttaattttgacacttgaatgtttctgggttctgcatcaaaagagtgaagatgaggtcgcttcaagcaccggttgtttgccctagtgttcgtcccagacaattgggtgtctctgctttacttgtcaactgctctgtttcgaaaactaggagtctcagaaaacaattctggggtaaccagaccaaaaatgacaagtctcaggctgctacagtgaatcttcgtctgcatcttcggaggtataagagtatcaaatgtcttttcagctcgcactctgatggtaccggaagcacagcagagaatttcaacgagaacgatgaggattatgtcaagtctagtgtattggaagctggtaatcctggttaaatctgtatttataccattagttctctctattcttcttgtgttttgattctaatcatcgatgttctcttgttggttttgtatataagttgaggtaaaaagtggaccagatggtttcatggtgaagatgaaggatgggaggcaacttcgatgtgtccacaataatcctcaaggagggaatcttccaaattatgctccacattctgcaattgtgctgaaaatggaagatggaactggtcttcttctccccattatcgtctgtatgtgatatcaaaactcattcttttgtttatgtgtgttgagatttccaatttgccttgtgttttgaatctcctttctttgttttttgtttattgcagtggagatgcctagtgtgttacttatggcagcaatgacaaatgttcaaatagtagggcttctgttattctttgcgttatgcttctgtttgaatcagtcaagagttgtgaagagagggtttatggattttttttggttactgcttgtaggcaaggcccactatgtatcaagtggtgaaggacatggtagacaaaatgggttatgaggtacgcctttcggtttttctgttttctctatcctgttattttccctttagcaatacaaattcttatgtgagtaacgttaccaaacaccaactttttctgcaggttaggcttgttagagttaccacaagagttcacgaggcatatttcgcagagttatacctttcaaaggtttgtaacttctggcatagaaatgcatcttccattcattttttcaaaaagttgtcccgaaactcgttatccattactagtatctcacttccatctgttttaaacttttactaaatctgctatgaatggaattgcaggtgggggataagtcggattgtgtcagcttcgatcttcgtccttctgatgcaattaatatagctgttagatgcaaggtatagttatattaccatatgctcaattctttcttttctaggggcacagtcacacagaggcctctccatgagatcatcttaaccggatacaaactacgtgatcactatgaaaaatggttttaatcctcactctttaggtacctattcaagtcaacaagtatctagcttatagtgatggaatgagagtcatcgattccggaaagctatcaaagcaaacacctgcttctgatggtttattgtttactgaactagaccggtaacgcttgtgaatttagtcatctgaaaccctttgctggcgaatttgaaaattacaaaacttaaaaacattatgttttccttgtgtaggccaaatggtcagccttgttttgatacaaaagagttcgatctagtaaggaacatgatgcaagctgttgatgaagaacggtatgatgaagccggtaagcttagtctctctcaccctccctatttggtagtgatcttggtcctgatcaactactagaattttcttaggttcttgtgtcaagaagaaccaatgttgaatatcttgtttggttttgcttttgtagctgagtggagagacaagcttggcaagtttcaggcaaaacgcaaattaaggaaatacacatgacaggtataatttcttttaacggctcatccaatccaatggactatacacaaaaacaaaatgagtaagttttgctctgttttttcttaatgcagctcgcagacgggagtgtttttaatacataatttatgtaaataataaagaagccattgccatttgccagaagttgtgatcatgaagaaaaatatctctctcgtatgagatatacttttctctatcgacacttgtgcacgtagttgattctcaaggaacggacaaaataaaaatgttattttataattgtagcgtgatggtgatgtgatgtgtacatatacattaatcttctgtaataatatatggtaagcctacgctttctcaattacatttgtctatagttactgtcacttgtccttaccacattatataaacaaactacataattcattagaaagtcatagaagaaaataaaataaaaactcctctaattgtctctgaactagaaaaaccgaattaacgtgtgacgtaataactggaagcgagttcccgccaagagcgttcacatgataactaaccgccacgtgtcttgatggcaataataagtaaccaaaaaaaacgaagaggcagacgaaaaaaaaaaagtcgaatcttcaacatttatggctctgattttccggccgccgtgaaaattagtagccaacatttatttcacattcgcataacgaaacgaatcaataaatcgctcacagttacttcttcatatacccctttccttcaatttcagtttcagattttccaaattctaaagtttcgatttttttggagtatcaagttcgattgattcttctcaatgtcgggtcccctagatcgattcacaagcccatgtaagtcttcaattttggaaatttctctagggttctacagttacttccataatataggtttctacccgaagattacgttatgatgttttgactatttttttctgtttgtcttctctcaggtttctccaacaatggtgagaaaagagaaaagaagtcagatttcgaagtttcggaggatgagaagaaaactagaattggtggaattcttaagaagaaatcatccaaaagcaaattcagacattccctgaagaggagagggagcagaagcattgaccggactctttcgcttacctttgaagacatacatgatgctgaagaattaagatatgtctctgaattccgacaatcacttatctctgatcatttactgcctccaaaccttgatgattatcacatcatgttgaggtcaatgtttataacaatcttgtgtactaattccatgtcttatgttttggagatcattcatatgtttcatcacatgctcaagtattattcgatatgaagtagagagagaacattgtttgtttcatgatttttcttctttatgcagattcctcttcgctaggaaatttgatctaggaaaagcaaagttaatgtggactaacatgatccaatggagaagggattttggcacagacacaatcttggaggtatacagttagttactttcgtgtgttgtgcaaaatattatttgttacaacggccttagagagttgctgactgagttcttcactccaggactttgagtttcctgagttggatgaggttctcaggtactaccctcagggatatcatggtgttgataaggaaggaagacctgtttacatcgaaagattaggaaaagtcgacgcaagcaaactcatgcaagtcactacattggaaaggtacctgaggtatcatgttaaagagtttgagaagactatcactgtcaagtttcctgcttgctgcattgctgctaagagacacattgactccagtacaacaatcctagatgtccaaggcctggtatacatgttgatttttaaaaaaactagattgtggaaccgttctcttgtgcggtttcctttaggcttactgaatcttctaaatgtatttccagggcttgaaaaatttcactaaaactgctcgggatcttataatccagttgcaaaagattgatagtgataactaccctgaggtattgtcggctgccaatgatatttattagcaaaacctgtttctgagcattgtttgataatatgtgatatgacatgtgcagacacttcaccgtatgtttatcatcaatgccggttctggttttaagctactttggggcacggtgaaatcgtttcttgatccaaagactgtctccaaaatacatgtaacttagccgtggtttttatgcatccatttttacactttattgtatagaactaaactgtattaatgtgatctgaataggtccttgggaacaagtaccagaacaaattacttgagatgattgatgcaaggtatgagttttgagtccttaactgttttttttttcttatcatatctccagaatataattaaaactctgactatatttggaacttgttcagccagctgccagattttttcggtggtacttgcacttgtgcagatcagggaggttgtatgagatctgataaagggccctggaaagactctgagatactaaaggtggagtgcttgtgtcttcatactccacatcttattgttcgttatgtttctgttatactgatgttaaacctaactatacaggattcagctaatgatttctcagtgttcatgcagatgggccgcagtggtgggacgttctgtaggcatgctggtgctttcctaagcagtgattcccaaatatcttcatcggataagccaacttattcggtaaggttttttggtatttggaacatacgttttctttttctttattttttgtttggtgaatcagacactaatagatatcctctcttggctcagttgaaagttagtgacacctcaacagcaaagtcagggtctgaattggaagagatggcttcaccgaaaacaaatacgaacaatcatgtacccaagttaactcctgtttctgaatatgtaagtgttctcatgtagaaaagtgacataaacaacagagaagtttttagttcttatataggacctgatatatgctactatgtttattttaaatcaaggccaatggtaacataagtcctactgttttatctgagtatgaagaatgtgtaccaatggtggacaaagttgtggatgttgcttggcagctccaagagatgccaaatgcttccgaaggtaagacaagacctgcgaaaatcggacaattactcaattgaaatgcatctctgaaggttgcagacctaaaatagcatgtaataatataatggaatgtgtttgcaggtccgcaatatacatcaagtttgggaaaaataggatcggttcgtcatatctggagttggctaactgcgttcttcataagctttttcacactccttgcgtctctggctctgccacagactaaagaacactcacagttgcattcttcaagcgttagagctgagctgtgtgatgaacgaattgcaagggaatctcgtcctccttcgcctcctcgttcaactatcactgaaagagttatcatttcctctgttttaagcagactaggcgatcttgagaaacagatagaaaatcttcactcaaggaaatccgagatgcctcacgagaaagaggagttgctgaatgctgctgtatatcgtgtggatgcactagaagcagagctcatcaccacgaagaaggtttaaaaatctatgatatgattttaaaccctgaatgatattgataatgagtcattatgaaccttgtaataaccgaatatcggtgttgatgagcaggcattacatgaggctttaataaggcaagaagaacttttgggttacatagaccggcaaaaggaagctaagtgccgggttagtctcctttcgtagctagttttgctgtccttataagtcggtaagtatgtactaatgttgggaagatgatgcagagaaagaagttctgctggtgaagaactcaagcttgggaggtaattagcaaatattgcttgttcagggatctgattaaaaaccatgaacattgacacaagtaggtctgaaagcaaatatctctgttgaaacctaatgtatataaatataagaaaaaaacttgcaatgagatttcaatttcatctcttttttgttgaatttgtttgatactattggatagtgtgattaattggtgtttgggacattggattctgtattggaggttcaaaagtaaaaaaagaaaaaagaatgatcaaaaatatcaaatctgagtggtgacatgaattgtataatgtatagtttgatgtcagaaatagatatataaaagatggtcttgcatgttagaggaaaggggactcatcgaccatccacatgtttatacgaccaaacaaaggactcgtcacaagttccaagtacagtttgttctcccttttacctgtccaatgatacaatcttctctaaaaatgaggattcatgtactacaatgccacaaaatatcgctttcttttttactatatgagttgcaaactttgaattaggctcaactaactagtgaaataatgtgaatcgaatcttcaaatagtacaataggatttgacaaaacaatatttagcaattaggtcatcatgatgagtctctatcacttatttatttggtttaaaccactctatcaaatttaaaccggacttaaagaatatgatagcgactgtctttttcaaccacaataaaaatatgtagaagggttttaaagagaacacatttgtatccacaaaattttcaaatcaaaaatgttttattttatgcaagtaatttggttcgcgattaagaggttttgtactataatggttttaaagagaacacatttgtatccacaaaattttcaaatcaaaaatgttttattttatgcaagtaatttggttcgcgattaagaggttttgtactataatggttttaaagagaacacatttgtatccacaaaattttcaaatcaaaaatgttttattttatgcaagtaatttggttcgcgattaagaggttttgtactataatggttttaaagagaacacatttgtatctacaaaattttcaaatcaaaagatgttttgttttagaactcaaccaaattgtgaaattgacatgtggactaactcacatcaacatccaattaaaatcaaacaagtcaataaataatattcttaaaagttttaatagcattttaaatttcaaagcatacccatttggccatttcgtctctagcttcttccatgtattaatttttaatgacataattgttgaagagtaaagagattagagaaaaagagaatgagaaggactgaacttcagtgatttaaatagtgtttagtgaaaagatgattattttactaaacaggaacgtatattgcatatttgcatacaaaaagtgatatcacaattatataaaacactagaattcagtatcatggaaggtaacttacctagtattactaaattgggtatcaacttttgattttttttgctttagttgaatcattttttaatatattacaaattgaaatatctaagattagttgaaaatcgtggtacaatcatgaataaattagagctttgtgctacgtatgtgccgaattattatcataccagaaacatgtttttttgcctattctttgatagttgtttccctctgaagtctgaacagactgaactcatcaaacagggtagacaaacactagctggaccttgagtcttttctttctccatcatctatatttaaaggttaattttatgtcacattcaaatatttagaagtacttcaatatttttaacataaatcaatccagacatgatcatattcactaagtagtaagtgaatcatgtgactggagatgtattaggtatcatactttaataaaatttgggtatctacctttctctaaaacaacattgtgtctctagtaaagtacacataacaaaagcgtgaaattttaccaccgaaagtaaaatagatgatggagaaacattgcttgaatggattttactatgattttagataatggatattttattttaccttttagacttattaaactataatatatatgattcactgtaagtctgtaagttaaaacattgcttgaatggaatttagcagatataaggtatgaaagattttgtaagacgtgaaaacaaaaaatacataaatatatcaaaatgaagtctgtatacatatatacatagacaataatccaacatatataaggagaaacgaggctcatcgtcagaacgtgaagcagaatgttcacgtgatattactacttcatttggcaatctattcgcgtccgaaaattacttggcagcaacggccacgtggttcacgacaattccttggttatttttacatattattagtatactcctgaaaatgaaaatgcattgcctatctagagtcaaattaaggagtgcatggcttagtatcttcatttgtttgcaaaaaaaaaaaaaagttttaaaagttgatagattgaactataccaaaaccataagccgtatctattgcggaatagaaaacataaacgtgacaaaataatgtcttctcatattcttcggatatagttcgaatataatttgaaatcaaatgttccacgaaccatatgccgtggtccaaacgtgaaagttttcctttttaaaataataaacacggatctttattcggtctatattctttagattaagactttatatcatatgccttaatctcgtatatttctactattgagtcgggcctctgtcttgtgtttatcacgcggattctttcaaaagtcggtcaggaactcttatgtgttgacattattaaaccctacaattaattattataaaaaatcgattaatttataatatttaaaatttgatatacagtatagagatacatttacatacgtgaagatattcaaagtatttttttcataacatattattcatgtaatatttaaaatgataaatgtcaatggcataaaatctaactgtgtacatattaaatgatttttgttttatttatgttgggaccatattgctgctcagaaaattgaaacgtacaagagacctaatctgatattcttgcctaccttaaaaacttgagaagacaaacccaattagagagctagaacctaacatttacaatataaacgtttaaaatatcagcacgtagtcgattacgacaaatcctttgacacatcagttagattcaagtacttgtatattatggtttgtctattacgattagtcgaaaattcagaaatttgttttagatatttttttcttaattatgttactgaaaaatatgtgtttatatataagaagccttgtattaatatattacaacgatcttaaaacagaagctgaatgtcaactagtactttattagcgctgataaattgagtgttaactacctaaatagatgttgacagtcaattaaaacgaatccttcatcggttcgaatcaatcaagaagtttagttataattgtataaatgcctgcagttcgaaattccaaaattcgttttgaattttttcttaataagtttttcttactaaaaaaggccagagcttgaattatatataacaagccttttataagtgtcaaccgtcaaaaatgattctgaaatggatacattgtcgttgtaatcacaaaataatatccaagtctttaaattgtgtagacctaacgagagaaaaaaaaaagtttacatatccaagaaatgatacatagaacatttttgttaacattatgctttgttgaaagacacatatttttggtatatattcacatgaaaatatatattattaaaaaaagggctcatttaattcagtttttccttatcaacaatttccattgttttaccatcgaccgctagatgagacttaatcttcttataatatgtattttttgataatatattatcggttagtactgataagactaagaacaaattctaagtggacagatacccatttccatgagccttgccattgcttcttgttttccggactaaaatgttgtacaactattttctgctgtagaattaattttgcaacttttatgattgaaatctaggattgtatatctaaactacttcatggaatccgcggaaatcatatgaaatcagcagtggttaataagaatttatcttcgtactcgacttacatgatattaactattggacatatatataatggtacctaatttttaatttttgttttttctttttcacagaattcttgcctgataaatttcatcaaaccaaagactattcccggtttttgaaaatgagttactttatgacttttgcgcgcggattaaaactcaaagtcactagagtttactcaattttctaaaatccaggttgaactaattaactgcgtgtggataccgattaacttacttgttaatataaaaaaaaattcgtaaaagggaccatcgtatgtttatatgtgtgtgtggagagagagatgcacccaacgcacgtccataagatgcatgtagtttataccaattaaaaaccaaaaaataaaaagattcatgtggctgtcaaaactctaatcgtttacaacacctctttccttatatatatcgacccaacatcacttactatattcattaaccttctgcttcatcaaaaagaaagagacacaaagagcgagagagggagagagatggaggtaatgcgagttcttcacatgaacaaaggaaacggtgaaacgagttatgccaagaactccaccgctcaggttgatcattttgatataaatatgcattatattctcgtgtacacatacatacgagtgaattattgttataacttaaacataatttggttctagaactgtaataataatgacaagtgtatactgattatgtgatctcgcagagtaacataatatctctaggcagaagagtaatggacgaggccttgaagaagttaatgatgagcaattcagagatttcgagcattggaatcgccgacttaggctgctcctccggtccgaacagtctcttgtccatctccaacatagttgacacgatccacaacttgtgtcctgacctcgaccgtcctgtccctgagctcagagtctctctgaacgacctccctagcaatgacttcaactacatatgtgcttctttgccagagttttacgaccgggttaataataacaaggagggtttagggttcggtcgtggaggaggagaatcgtgttttgtgtcggccgtcccaggttcgttctacggacgtttgtttcctcgccggagccttcactttgtgcattcttcttctagtttacattggttatctcaggtgtgtattgtttctctatgcaaaaaatttcaccgtaccccttattagtgttaaacaattacgaactttaagaaaaaagtgccatctatcattctgaaaaatgaaatttcaaatctaatattatgagttatgaccggaatatcaaagttatgacaatttttaaaaaaactaaaatttatatattcagaaaattaagagaagaaaattctctattcttaattacttgttgtgattacacaaaagaaaaaaaaaaacagaaaaagttaatgaatatcgcaatattttttcaaaataaacgtagtaattcacgaaacagcacctaaaaatattacgcaagtgatataccttttagtgcgtgggaatctttctcatttgagaaaccaacataaaaacagaaacctagtggtccacataagcttgtcagtttatcaaaactatcacaaatagacatgctaagttgctaacaagttgaattatcatccatatatttttaaggttccatgtcgtgaggcggagaaggaagacaggacaataacagctgatttagaaaacatggggaaaatatacatatcaaagacaagtcctaagagtgcacataaagcttatgctcttcaattccaaactgatttctgggtttttttgagatcgcgatctgaggagttggtcccgggaggccgaatggttttatcgttccttggtagaagatcactggatcccacaaccgaagagagttgctatcaatgggaactcctagctcaagctcttatgtccatggccaaagaggtatagtggtgtacatatgtttacatttatttataactaacatgtaagtctctttcggttataaatggctcatattctaaaaggatctgaccatgtcacgttacttgaccaattaagtcctagctagtaatgtggcccatgtgttcttttccaaatttcttgcggtttctcaaattacttaagttagtcaacaaagattttatcatatacaaatagatttgatatataccatatagaaattatttgtagtgccaaatactagctaaattcttactatatatttacgcaatcaattaagttttggagaaaaaaacgaatacttatgaaaaaacatatttattaattagttcccggttttttctcttgataaagaagcaaggtatggcagtaaaacattttaccctcctcataattacaaaatagttaataatgttttggtaatttaaactagtttcttgatttctgaaaaaaaaaatcttgatttctctatatttcaacataactatttagaactcaatatattgtagcctagattttcctctaaaaccattcatgattatttcaaacgattttctagataatatatatgatcaaaactaatgttaaatcttaggtttgatccaacaagatcgatagattattggatcaatagattaaaaaaaaaaaaaaaaaaacctagaagaaatcctcagtaagtcataactaaaaggtgccgcgtttatttttctccatcttaagggtatcatcgaggaagagaagatcgatgctttcaacgctccttactatgctgcgagctccgaagagttgaaaatggtgatagagaaagaagggtcattttcgatcgataggcttgagataagtccgattgattgggaaggtgggagtatcagtgaggagagttatgaccttgtaataaggtccaaacccgaagccctagctagtggccgaagagtgtctaataccataagagctgtggtcgagccgatgctagaacctactttcggtgaaaatgtgatggacgagctttttgaaaggtatgcaaagatcgtgggagagtacttctatgtaagctcgccacgatacgctattgttattctttcgctcgttagagccggttgatcgtgttataacatatgccaatatacatgtctttgggcctacaatgacatgatttggtagttttctaatcaagcatatgtaatataatttgcttcgagaataaaataataaaataaagtctgatgttacggtagacccttttttttttttttttttcatttacggtagacctatagtattaaaacaaatagaatcagctggttcggaccttgaaatgagagagcttggatgcatgtagacgcattagtcgtgaattattcaaatagaactaccttttgggcaatcacaatttgttcttctttttgcttttcctttataagatgcaacattaaggcggaatgtgacgtgagaatgttaaaagtgatcatcactttaacttgccacttaggagttgtgccgcaacaagtggaaaacaagttaatcatggccactcgtgagtcgtgagaatgtagggcaataccgcaacagcttctcttcaccgttcacgtgtctcccaaattataatttttctatttttgtatttctgttgttccttttgtttcaactttcagcgcatggcgtcacctcccatgaccaagacatttcttaagaagcgagaaaattccataaccaaaacatttatttatagccgttcaaatattttccacatgctcatgatttatttttaatctgccaagaatcgtgattagttgcacaatacgtcaatactgttgcctctgtattctgtaactcactaacactagtctcgagatgatatttttgtatcactcaactaatataaatatcaagaaaataattacagtagtttgatataccgataatttttcatgtatcaagaaaatgtgtttttttttttgttaaattatatcaagaaaatgttatacaccaaagtttacatacgttaaccttgaaaaaaaaaacagaaaagtgattaaaaacaaataaaaacttagaagacgttatattagtctcttggtttaatataccttctttgtatagccagcctcgattgatttatctgtaagaaaatatatatacacacacgcatattcaacagattttagtctaaagaaacatcatgaggagcaaaaaaagatcaacggcccactcactcgttacagaaaatatctctctatatttatagattacaagctcgaacaaagattgcatactaaaatttagaactaaattaaaccaaatggaacatctttgcctctgtcttgtcctctgcgctgcgatgctaacacttggaaaatttctcaaaattatgttccaagatcgaaagaaatcaacagctggtgttcctccgggaagcgatggttttccggtgatcggagaaacacttcagtttatgctttctgtcaacagcggcaaaggcttctacgaattcgtccgtagtcgccgtatcaggtaaacaaaagaagcctctggcccatctagaaggtttccacttcacatgatcatatactttttatatattacaggtacggtagttgctttaggacaagtttgttcggagagacacacgtgttcctgtctacgaccgagtcagctcggcttgttctgaacaacgactcagggatgttcacgaaacggtacataaagtccataggtgagcttgtaggtgatcggagccttctatgtgctcctcaacaccatcacaagattctccgtagccgtttgatcaacttgttctccaaaagatcgacggctctgatggttagacactttgatgaactcgtcgtggacgctcttggtggatgggaacaccgtggtacggtggtcttgctcacagatttgctccaggtttgtttcacatacttcgttgtattgggcctatttaaagccttctctctttcggttcatagtttaaatggatcatggcccagttttctactcatatgctaaaatagaaattctgaaatgattaggaaggactatgataaattaactttagtcaactcaaaatttcatatatttttcttattgaaggcaaatcttaactgatgttgcagataacattcaaagcaatgtgtaagatgttagtaagtctagaaaaggaagaagaactgggttccatgcaaagagatgtgggctttgtttgtgaagccatgctcgcttttcctctcaatttaccttggactagattccacaaggggatcatggtacgtactacgtagtttcaattaccctattttagatatcatattatatactcatccagaatttaaattgattgtggttcgattcatgagaagttttgagtgatgcaggcaagaggaagagttatggagatgttagaaaagataattagagaacggagaaatgaaataaatagtcataataatcatcatgaagattttctgcagcagcttcttgcagtagataacgacactcctcagttgactgatgctgagattaaggacaatattctgaccatgatcattgcaggtctcatttaatacccatcatttttagaccagcttatatatagagaagaaaaacaaaaatatatattttttaataaagggttaagaaaaataaaataaaatatcatatcagattaattgtatctttttaatttatgatgaatccggttaataaaataaaaataaaaattcaggacaggacacgactgctagtgctctgacatggatggtcaagtacctcggagaaaatcagaaggttttggatattcttattgtaagttctataattagtttctcttgtggtatgcactttaacatatatttatcacttaaatttgttttaaaaaaaatattaatcattttaattgctgcttttcaatttcaataaagacgaatttaaagggttttagttttaaaacatgtcattgtcctggtcggtcaacaggaagaacaatctcagattacaaagaaggcatcaaataaaccatttcttgaactagaagatctaagtgaaatgccatatgcctcaaaggtaattatatataaacgttttttcaatggactaatttgtttaaaattatatgtttacatgtacatgtaaattttggaaatagatggtgaaagaatctctgagaatggcgtctgttgtgccttggttcccaagattagtccttcaagactgtgaaatggaaggtttgctttaagaatttatcatgaaaaatattagttcctatatatcttcttcttgtatttgttttaataaatgatctctgacttagatacattttgttttctgatttgaaaggatataagatcaaaaaagggtggaatataaatattgacgcaagatccattcatcttgatcctactgtatacagtgaacctcacaagttcaaccctttaaggtttgaggtaaataaaccacaatttaaagtaaatatattgaaatttacagttcctttattcaaatgcttttggttttacttaattaacttaaattaaataaaggaggaagcaaaagcaaacagttttctagcatttgggatgggaggaagaacatgtcttggacttgctttggccaaagccatgatgttagtgtttctccaccgttttataacaacttacaggttcgtacgactttttctttagtattgcaaaaaaattgaataatcctgtaacagtaagttttaataattgaaaaaaaaaattgaagatgggaagtagtagatgaagatccaagcattgaaaagtggacattgtttgcaagattgaagagtggatatccaattcgcgtgtcacgtagattgtaaattcatatgtttcaaattagattttatatctcaatatgtgttcctacttcctagatgcgatgaatcatatccaaatgtgtaatatttaatgaatgtattaattaatatttatgagtatagtttaaaaggaacaagtgaaaaagaaaaaattaagataccacaagaataaaagagtcaccgaagttaaaattaaaagcgttagaaagctacaataatactagtatagagatcttttcctggcaaatcagatatttctaatgatataaccagattcagaaaaattaatacaaaccctaattcgataaagctaagtacgaaccagaaactttagagccagagccaccctcgagcctactgcctatgtttacgactacgatgaccatggcgatgacgatgacgaccacttccatcgtcacgagatcctttccactgaacgataccgttttgaggctcatggacaccattttgcaactgagaaacgccgccggtttgccattgtggaacatcaccgttttgcaactgaagaacgccgccgttttgccattgtggaacatcgctgttttgcaactgagaaacgctgccgttttgccaccaatgaggaacgccgccgttttgcaactgaggaacgtcatcgttttgccactgaggaacggcgccgtgttcccaatagtgaacacgatcatcgacgccgctagctcggtgaatgtagccgttttccaactgatcatcgacgccgctagctcggattatatgcatcttcttctgctccgagacaaaagtctgtatcgtcctacgaaactcctcgccgctgcttaaaccatccatagactgcgacctccacgaccccgttttcgtcactctctccgtttccgtcttccgatactccaccatcctctccgtcatcttcttctccgatctgctcgtcctcctgtaactcttcgaactcatctccaccacttcttgatcgtaactataactactctcctcaaccgccttaaccgcttgaaacgcgggtacattctctctgtaagtcgagttattgtaatatccaacatcttcaaactttgacatattataggaatcgaacggcgtgacggtggagggtggagggacggcggctacatattgatcgtaaagatctggttcctttttttccgtggtttggattttgctaaagataacgtaaatcaggaagatgataatgcttacgacgacggaaaggaagaaaaggtttcttagaaccaaagtaaaccaatcgaaccaaatgaaaaacccgtgcagttggttgacgatcaccggtaaacaacagtaaccgaaggctacgacggcggacaatccaacggtgtatttacaattctggaacagattctcgtatgtccaactcgcctctgctttctctgcctccatttttttttatatattgaaattgttgagatttattatggtgtattttagtatttatagatatgtatgtgaaaatgttagaaagaaatctatagaatatgttgcgagaaaatgaaacgggcaagtgaatatatatgataaatgttcttgggatgttaatcggattaatgaaaggaaagatgggagaaagaaaatattctggttggagaaagagacacactgataccgagatggatacgatcaccagtgtggtcattttatagggactttataataaattaatatgattgcataatggtcatttagtaatgtttttgctttgctatctcaaagttttaatattgtggtcgctcgaccaataatgtcccaattttcctatgtttttagctaatgtgttaggcaaattatatggttctttttaactttatgaaagaatgttttgcgctataacatttctgattaggagtgttttagtatgtgcatataataataaaatatagtcatagattacagggtttataatcgaaattcatatatagaagcatgtaggttaaaaggttaattaccatggtggatgtttaacataaattctttatctaggtaccttggccactatatggatacttagtgtcaattaaaatgtcattgcaagatatatatattattacttcaatctatattattggcattgcttgcgttggtagatcttttggttttaataaaactagaacttttccattttatatacacatacatatatagatactattatatccgacatgttcaattgatatatactcttaggttgcagaatatttgtaagatctcatatcgatccagcaagtttccgatataaacacctcattaattagttttctagatttgggtgtagatattaattaactcgagctgttttctgaatctttcctaaagtaaaatgttcctttgcatctacatataactacaactatttaagtttctacaaagcaacaatgcctatctttaacaatatacaaattttacaagatatgtgtagtagtgcataggcgaagaacaagaagtatatgtaaatagatgttggtgagcatgtataaataaacaataaagcctaaattccacttgtaaacccctttaagcagacacgtgaaagtcacgcgccaagaacaaacttatccacacataaatgcttcagaattactgaattagtatcacaatcacgagggtcatggaaatcgcaaaatcaagaaaaatggtcgagacccgagaatcacgtgagatgagatgagtcatgtgctcaaaagcaatttcacagttgacacataataataaagatggagtgtaacattttcagtgaatagtgatcaatgttgaatccatttatttcagaaaatagattagcctaaaagaaattacagacaagactggtttatgtatgtgcagagccaaacactctctgattctgtggtcgctatcaaacaatctttgtcataattataccatttttttttccaaaaatatcaagcaaataattagatcgtacaaaattaaattaatttagctgttacattcatgctagacctaatttgcgatgcttagttagattcatgtcctgttttgaccaccatgcactttcgttcgaacagtttttgactatagactttcataattttgtgtcttcatttacgtttatatatcgttattagttgcgtttaactttttgtttaaggcaaacataaaatttgaactaataacactaacatgtccgaacaaattagacgtcaaaagtgtatcatcacaaagtctatagtcaaaacttgtatggataagaatttggataaatagtaggcttcatagtttctccttgttcacaccatacaaaatacaaggatagttctagagaacgataatcgttttacagtcaaagattaaacgggtttttaatacatttgtatataaagagctctcagctagtgaatattaaccatacaacaaaaagtcatggcttcttcttacacacttatgctcttcctttgcctctccatcttccttatagcttccactggtatgatcatcactccactctaagcttcttcgactgtaatctctttgtaatatgtatgaatctcattgatgaaagatgatgatatataaaatcttgtgattggagaatttgcagagatgatggcggtggaaggaagaatttgcgagaggagaagcaagacatggacagggttttgtggcaacactcgtggctgtgacagtcagtgtaagagatgggaacgtgcttcacacggggcttgtcacgctcagttcccgggtttcgcatgtttctgctacttcaattgctgaagcaagcatactcttaagagttgtgtgaatcttcttcaacggtcacttttatatcttgtagcaaatcctaatccctatatgtcaaaaccgttatctttagcttgggtttcagtaataaaaattcccctttggtttttgggaattttctttgataaaatatataataagagactggcaaggctatcttcttcagcataacatattgatagaggcaacaatatctctaggttaattaattaaattaattgctaaacttcacagcatttaccttacgtttataacacccgatacttgggttgaactcaaagctgaaagaacgaaattttgttttttttggtttgggcttacaggcccaatagtcgaaattcagcctcacaacattaatttcctttattaagggggtttccggtttcgggtatcccttccgctcttcctactgtcactcatgcaaaacagagagagaagatgtcggctatgggggcctatggcatcacatatttcgtcggctcgatcatcggccttctctttgttcaagggtttgagccagaaaaaggaacattgtttaaggaacagaaaggtggagtaagtaagattgatcctaaaccctgacaaacgcatttttatttttcacaaaaaaagattgaaaacaacacaatgtgtattgaagtaaatgctgtgagaatctctgtgaacaacataatgctaagagctgcttgaatcagaaccggcccttcaacgaaattgtttgaaattctacaatctgatggtgatatcatcagttgtggatgtcaggaacaggtaagcccttcaactgcaactgtttgtgcatccattgccagttttctggggttacttctccaccgagagcacggatgacagatccaccactgcatgatcccactttgcaacattcttccaaagacaatccctttattagtccgtacagaaacccgcttgcgaataggtcaccggctcctgtggcatcagttgctactgtctctcctatggctgatatatgtaccacctgatcacacgtaaggagatgaaaatactaattcgctatgaactttaaagagttaaattaaggctaagtgaaatgtaaagctacattataagctaccacgttttttaggaaagacaaacctctttatcatgttttgcaatgcaccctttcgaccctaaagttaccacagcccatctgcaatgtctgcctaggaactcaagagctgcctccggacccgcttcttgctcacccctgaaactcacaatccagagcttaagagtatttcatggactcaagagaaagggtaaaagaaaccctgagtagatcattgcaggggatgaagaaacatcaattacctaaggagctctgctgcttcgtcctcgttagcaaagcaaagatctatgttaccagactccagaagctgtcgaagctctgatttagaattcctgaccatctagtcacaaatgcttgatcatttgtaaagccacagatcatattttaaaaggaggaactgaaacaagagtttcgtttttccaatcaaagatatacctcaaaactagctaaatccaaggaaacagaaagaccttcttgcttggcaaatcgaatggctgcttgaattacttgtaaattaagaacagcatatctaagaaccaaccactgcagcagagaaaaagaccatcaacaaagttgtcagaacaaatctccattgattttacaatgcttcctaatggcaaagagagattaaaggagctaggcttccaaccttagagcctgtgaaatcttctttgcttaattcatctgcctgaaagagaaatagtttttaccatcctttctcactgacaaaccaattcaatataactatatatcccaaaaaaattagaaacacaaacctgaatcttcacagcactcgagagacatggtcgcattgttcgattaccagagtcatcaaccaagcaaacacactaaaagaaacaacaccaatcaaaaccaactcttcccaataaggaagaagcaaaatttaacagtttgacaaaacagacctgagcagtggaacctttcttcttcctgagccttgagatactcacaccactaaaacccatattgctaacaaacaattggccttgttcatcgtctccataagcaccaataatcccagtggctacaccgaacccaacactcaagcctcgaactgtattggtcacacttcctccagccatcttctttaatggagccacactgatatgtgcatcaagctcttttagcatgtgctctaactcatccttttgcacctagaatcacaaaagatccgccaagtacaataacaattcaaatccagattccgataccaaaggaagattcaaacttttgcttaaacccacatcaaaaaacgagataattcactgaaaacactcaaataacgctaaaaacagagaagaatggcttacggcaatggagccaccgcgatcaccgggaatttgatcgagtaaagaccaatcaacaggagcgacgttatcgataagagctgcgggttggagtccaagtacgagtggagcttcagggcatttgggcaaggcctcagctaccattctctgtttctcagtgtgtaatctatctgtgttgtgtaatctctataaggccttgcccgattgttctcatcaagcttcgtctcaggttttatatatacggcgggtggagacgaaagccaggaataagaagatgatgatggtttattggatatttacgaaactacccttacataaatcaaatcaaattttataggtcaataataactgatcaaataaattctttacgctatctgttttcttgttaatgatttaagttttattcattcgtgtccttgaggataacaaatagttaatagtagttttttttgataaaaaatgaatcttaattaatgaaaatgagaagtgcaaaatcaacgtattaagtaatttaacatcgcattttgtgcatcaaacattgcattttgtacagcatatgataaaataaaattaagaatttattttatttaaaattttataggtcagtaataactgatcagataaattccctacgcttttttgtttcctgttaattatttaagttttattcactcgtgtcattgagtgtaacaaatagttaacagtttttttaacaaaaagtgaatcaatgaaaaggagaggtgcaaaatcaacgcattaagtaatttagcatctcatttcgtgcatcaagcattacattttgtgccgcatatgataaaaaaagttaagaatttactttatttaacatttttctatgatcaaaagtactttatcgtgaaatgttatcatggtaaactatggttaagatattagcaatgattcaaaaacctcattatttgaaagagcctcattgctctttgaaatgttaaattagtgttagacttatcatatcttttaatttgtatgtagtacatatacaatcatggaaaccatttaaagtacacaacctagcggccatagtagattatcagctccgaattatatgctttgattatcgatccgttgtgtatcctttgtagatttacgactcgctattacgtgggtcatttagtaattgtagttaaaactttcaaatttttatctaaactcactgatatgttttaaagtttcccacactacatatttttttttgttacatcaattaaaatttttcttattataaactctaaaaacattgttgttgttacatgaaactatgatatagattagtgcaatttgtaaattccgtcagcttgcaaaatcgtactgtttctttggtcattgtttgtaaggatttttgatctgtttaccgtaagttttataaggcttgcgatgtctaagttggtgaacattttacacaatctaccgtttcaaatttccaacaccatgtctcgtggttcaaattgagagaaaaaatggcccattagttgagatctacaaagtgacaagggagaaatccaattattagtattattgtaacaaatggttgaatacttgaatcctaaaagaacgacagccagaaagctagaaaacaaaagataaatctcaagaaaagaaacggcctttgacaaaaggaaggagacgaatcataataatagatacacgatacaagatttgattttatcaaaaaaataaaaagacgaccaagcaagcgtaattcacggtaccaataccatcaaccccactaataatttgcagtaattataaaaagataaatatatgatatatccagtttggatctttattcttcatgcttgcctagcaacataggcgcacatggatttttgcatacgcacatgcatcagactaatattcactcatgtttcatgaacttgattcttacgttcaaaagaccgaagtgataacatacaaagtttgattagacaataatactccctaagaaaccatgaaaaaatgttgaacatagcttcttcaaaagctgtaaatccgtctaccctaatgtactctacctgccatattcaaaccagagaccgaaacataatccccttgagtatctcaccctgtagggcttcggccagaaaacatacccctgaaaaatcagttcacattagaaggacgcttggtttctttatcaggcagtatgttgttagggaggttaagctctggtggagtttctctcactattccgagcattgagtcatactcctcgtcctttagagcatgcttcttgcgtagaaccttctcgaactcaatcacatttaatggctttgcattctctgcagcgtgagcctgtgcgaggtttgagtagtttgttgctgactgagagataaaagcaatttcctcatcagtgagcttcctgaggaaccttgctgggtttcctccccatacctgagtcattatagaccaatgcgaacattttaactctgtcagtcaatatggcggatgaagtaaattttaaggccatgatgagagactaacaccctttggcattcatatgcagataaaccatagctagaagaacatttccactttcatctaactaacatttataatctgttagggcatctgaaaagtggataagatacgttctatccagatagaggagaagaattctcaagactagaaactgtatttcaatttcacaccaacctccaatactttcagccaatgaaagaaagacactaataatgtcaataatatagcctatgctgtctaagtagcaatagaagtatacccgcaccaatggttacttgtgggttttcaggtaatcagaaatgttaaacccaaaatcatacctctccagaaggaattctggtgttttgtcgtacaagtgcaccagcagcaaccatcccatgcttttcaacaacgaccccatcaagaagtgtcgcacccatcccaataaaggtctcatcctcaacagtacatccatgtaaaacagcactatgacctgttacacatttaatttaagactatatcccaaatgcttcttggagatgtatgcatattaaacattttcaaaataaacagtgagtaagagattcccactaaccaatggttacattgtctccaattatggttgggtgcaccttcccgcttaagtttgattttgccacatgcacaagtgagttgtcctgaatattagttcctgacccaacacttacggtgttcacatcgcctgcgcagaaaaaaagagagaaagcaagtttagattgtatgttatcccagtttcctggtaaagtactaacaggcttagccatacagtaccaatgtgttatgacatgaaagcattctgtaaaaaggacaaccctatttcatcaccattaaataaaaatccagactagccaactcatactcgcaataaggattcaactcaaactcaataatctgtatatgatatcgttcaactaattctggtgttatgacatgaaagcattctgtatatgattggggatatcatatacccaatcacccattagagcaactgccagtatcatcaagatacgatatgtagtaatgatctgtttaagatccttcaataaagctagaaagctccattttgagtagtagtcttgttcatcgcttaaccagaagagtaaaaaacagatattcgttcactattttctatcgtaagagttgacacagctaaggatacagaagtagatactatttcaaacaaaacttcagtcactaaaatagtcaaccaccaaacaccaaacattgaggcttagtagctagctcacctcgtaatacgcatccataccaaatggacgatcctcttccaatgtgaacgtccccaataactgaggcgcttggtgccacaaaagcttccttgtccacaatcggagccttatcaaatacattcatcagtgtccgatgccttgacactacacagagaaaaccacaattacatataagcaaatttcgtgaccaggaaacaaaaaaaaaactaagcagcaaaacacattccacatcaattaatcccttgtgccattcgaatccagaatcgctatacctacaaagacatcaattccagatctctaacctaaccagaataggtgagctgaattacccaatcgaaactcctcactctttacgaattcgaaatcggagtgaaaaatagagttacgcagaatcttacgttgttctcggaagtaatttttgccttgaaggcgacaaccgaggcgatcaagagcttgaccagtctcacggatccaaaaaccgaccgagtaaaatgctctgcctagggttcccattgatcgtcactttcttcgagctcacaggtaaacgaggactcaacactgaatgaagaagacgaaaatggtcgaagctgaagaagagacggaagaaaaaaaatcagcgaaaatggatttcaacaggaacattccgggacggcgaaacaataaattacagttacagtggtttaatatggtttaatcgaaccaaaacaatacgaaatatgaaccaaatctaattcgatatttcaggtagtagtttcattaaaccgattatattattcggtacgaatttattactatattttcactaaattgaacggtccaaaacctgccgaccaaaaatcaaatggccctatcagtaacaatgtcgtttcgtatcgtcgtcacttgcaacgcataacacgtgagaaaagataaacatcgggtaaaaatggcccactggtgggtggagaatggtaataattcagtttaaaagctaagccttctcactgattaactcaatcattcatccgtctctgcaaacaaaggaagaagaatcaagatggctctggaaatctgtgtgaaagctgctgttggtgctcctgatcatctcggcgactgtaaccatcttctctttctctctctgtttttgttttgcattaagcttttgattttgcaattcttaatttctgagctttgatcgttggtaaatttactaatttaagtgtttgtttgtcgttttaggtccgttcagccaacgggctcttctcacactcgaggagaagagtcttacctacaaaatccatctgattaacctctctgacaaaccccagtggtcagtttctctcacgcctaaacccttaagatcggtctagtttgaacttgtttagccataatctctgaaattttacttgtaactggtacgagctttgtgttaaccggaaattggattggcttcatgtgcgagcattgtgttaaccggaacttgaaattggtggctttggttttatatatgatgcaggttcttggacattagtcctcaagggaaagtaccagtgcttaagatcgacgacaagtgggtgactgattccgacgtcatcgttggtatactcgaggagaagtatcctgatccaccactcaagactcctgctgaatttgcctctgttggatccaacatttttggtacttttgggacattcttgaagagcaaagactccaatgacggatctgaacatgccttgcttgttgagctagaagctttggaaaaccatcttaagagtcacgatggcccttttatcgccggagaaagagtttccgcagtggatctaagcttagcaccaaagctttaccaccttcaagttgctcttggccatttcaaaagctggtctgtccctgagagctttccccatgtccataactacatgaagactctgttctcgctcgactcttttgagaaaactaagaccgaggaaaagtatgtgatctctggatgggctcccaaggttaacccttgaaactatgcaccgttatgagatcgttggtgtggtaatgttgttcaaggtctctctcttatatcagtcaaataatgtacttggacctttttatgtaatgtactgtatcaatcaaataagaagcctattttgaaataagatttgcctccatatcgaaactcggataaacactggctacacgtaacataagggacaagggttttttcagacaaattatttaagaaactcatcgacagtacttgtgtacttgacctcaggataaagctcagaagtcttaactccaaaagaaggatctatagtcaaggaggtaaagtcgctcttcgcaaggaccgtatggatcaaacccacaaaaaaatccattggaggctgggtctctgcaaatgcaagtgactcgtttaatactttggagtttggactgatgaatattggatatcagaaactgtttttatggtttaactgatcacctttgatggttttgaggagttcttcctcagaaacataagtcttgtcgagactcgagagtcttaccgatctttacatcccacaaatcaaccatatcgttctgcgatacaatgttcttgggcgggtgaatgtagggttgggtgagattttccaagaatgttcctgggagaaggcagttatagtcgcaccgtcagcagtcgtaaggtaatcggattttattgtggatgaccagcgattttcatgatttgcatcaaattgttttttctcttcttctgagggatacgtcgtttttcctgatccaccgtacccatatgagcggggacgtgtaagaggtttctaatctgaaggctatccagatgacaactttgttacaccggaggaggaatatgaaccatccttgccctcttcagaatcaccaactgacagctgtcatgctgaccatgaatcacccgattcaccaaaatatcaacaaccggctccgggagaaaggccggaatgtgaaatctacaaagatttatgttctgatccccagacggtagactgggcggctccacctttggtaatttactactacgttcttactcttgtttatgcttaataagccgaaattctacttgttgagaaaatcagagatggaagacaccaggaattgtttcttctgtacgcggaaatcacattgttctcccactgggcatctattaagctagtggagtgggcaaagccattggagctaatatatgtaattgtgcaaacctgggagccgaagctgacgatgaaggccaaggcagcgaatgcaaacttctacgttaccttttcaaaccgtcacggttttccctaccatgctgtcataaggagaacaacgactagaataccaaaccagatgtcgcttgaatt

SEQ ID NO: 1137 - DNA, 92710 bp, Arabidopsis thaliana
aagctttagatgagctttttaaacgaacctgaaacactagtgtagataaaagaatatgagacatgtatctcttactcttagtatcaccagaaatctccacaggaacaaattccgtctttaaaatgatgaaacctatttgtatctctaatgaaaatctctctacctgcgtaacttgatataaatttaatgactgcatggcaatcgccgcatatcctaaggttctttatgacctgaagaggtgtgccgtctggtgtgttaagaagaccgaaaactactgctagtttctcactgtgtccccataacatctgctcttgctcttgctcctccacatcatgcagagcaaaatctaaatttgggcggtgacctgatttcctcatctctttgctaatctcatccatcttctctgttatttgatctatctgcggatgcgacttgtcaccagccagaagcgtgtacactctgttcttcacttgaatccagctgcatcccgggttcttcttcagtcccagactctccatcttgtttctaatactgtctacttctgtccacatgcctttagcggcatatatattggacaagagaacgtaagtccctgggttttcgggttctaaatggaaaagcttttctgctgcgatttcagctaaatctacattgttttgaagcctgcaagaatttaacaaagctccccagacgcaggagtctggctcaaaaggcatctcttttatcagatcatatgcttcttgcaacttgcctgcgcgtccaagaaggtttaccatgcaagaatagtgttccaacctcggttttatcccatattcctctgacatcattttgaaatatttccacccttcatctgttaaacctacttggccacatgctgataataaactggtaaagctgatgaaatcgggtttcaacctggttctcataagagattcaaatatgctcatgacttccttggccttcccatgcatcgaaaatccattcattaaagagttccagcagactaagttttttgtaggcatcatattaaagacaatctgagacaagttgattcttccacatttggcatacatgtcaatcagagcactccctacatgaacattatccaaaaggtggacccttactgcaaatccatgagtggatctcccatgacccaaagctgctatatttccgcaagctggaagcattgaagggattgttacatggtttggcttcacccctgcaacctgcatttctctgaacaattccaaagcttcgatatctttcccgttctgagcacacccagctatgattgaagtccatgacacaacattaagctccatcgtttgctccttgaatagctcaaacatttcaagtgccttgtcaacaagaccatttcgcgatagccctgtaatgtaggcattgcaaacccctgcctccatcatctcaaattgattgaaaagacttatgattccataaacatgcccagatttcccatacatatcaatcattgcactaatgacacatttatccttaagcaaaccctgtttaatcacatatccatgaatcagcctccccatattcagcatctctgaatctccaactgaaggaagaacacttgaaactgtaacttgatcaggacaaaaccccaaatggtgaatcttctggaacatcaccactgcttccttgtgatacccactccgattaaacccactaagaataccattccaagacacaatattcgcctcaatacctgaactttccatctcagagaggatacgaaccacctcttctaagcaaccctttcgcgcataggcacaaagcaaagcactgcaagtgacaacatctttgtcagacattctatcgaacactttgcgtgcatcacccatcctaccacacctcatgtacatatgaaacatagacccctgaacaaacgcatccatatccaacccggaaacacacgacacacaatgtatctgtttacccactttaaaagccgataattcagcacaaaccttgaacaaattcggaagaacatgactatctggaatcaacccatgagagaacatccgagaaaacacaccaatcgattgcgtaaaaagcttagcctttgttaaagcgtatataagagaagagaaagagtaaatagtaggatccggaatcgattgcaagacgagatcagcatcgttgaaacaattatagttcgagtatgaagcaatgagtttagcggagatatagccatcgttttgagctccggatttgagtatacgagcatgagcttgtgttgtcttcgacaacgaagaagaccaatgatatgatgaagattctaagaatccaacgatcgattgaggaattttctctatcagtggaagaacttgttttgtcattgcttaactaaaaaataaaattttcccgcttaaccttaatcattcacttattaatcttcctacgtgaccagattattccacgtcaccacaatcagaaatcaacggctgaagatgaaggactgggtctcactcagcttctgagcaatcttagtcgttgattatgtcttcgagaaatcttggacgttgattctaccttctccgagttttataatctgttttcttaagaaaatttgattgatacagagagagcgatgatgattcgaacggcgttagtgttcgttgtcttcttcgtcggaacagtcgtacaagcgcagctgatacctccggcgaggcgtgatggatttttgtatccaccgggtcggaaaatcgaccgggatacgatacttatcgaggcgtatattgacccggtttgtccggattgtagagacgcttgggagccgctaaagctagcgattgatcactatggatctcgcgttgctcttgttcttcacctcattcctttaccgttagtgtttgatttctcttcccttcaatttcagttttcaatttctttagctagattgagaaattagttgttcgatgtttcaagtaattgtctaaatctatgcatgccatgaatatttgtagtgatttcaattgataagtagtttgagaaagtagcagattttgtttatgttgccatatctgttgtatgcaaattgttttattattgtgtgatgatgagcttagcttttggatcttgcagcttccatgacaatgcatttgtagcatctcgggctttacacatcgttgataccttaaacgccaatgccacgttcaatttgctggaagggatcttcaagcatcaggtttgattagtgtactaaaaaactaaactttgctgagattaaacagagaaaatgtatatccggcggttctatttcttgaaatgaatgtttatccatgcactccatttgatcagtacatatggtttggttgaaaatttgctgcaacagacattgttctacaactcgcaaacacaactcatgtcaagacctgcagttgtggaagaattaatcaagcttggaacagttacgttaggaaactcatatcattctcctttgaaatctggcttcagcaactcaaaatctgatcttgccactagagtttccttcaaggtgatcccttcagcttttccacttctcagtttcacttacttgaacattttcactagtataggtatttagattgcttattcaatttgttcctctgtattcgagttcatatcttcaactagataaccaaatggagtgatatggatctttcactgcattgtcactagtcattatctttgcgcagtaggagaatttcgggttctgtcacttgatttctagtagcttaccttaccttctatcattgctttgcttttgttctctttgcagtatagcgtctcaagaggagtctccgcgacaccaaccttctacgtgaatggattcgagctgcctggtgctggttctcccaaagattatgaaggatggagagacaccattgatcctctggttaaaccacaagaagtagacatacgagacaccttcctttcattcctcacgcaaccatcttactagtttgtactttctatgatgtgccaaactcccacctacttagttgaaaagtccagaagcataactctcatacatgttcatattgttacatcttcaactgtcttcatttgcagcttaatgtataataaaccaaaaattcttcaaatgcttctcatgttttgtataaacgataaaaattaaagtattaaaagttttatactgatgacaaaaaaaaaaagaaaaagagaaagagaaaagataccaatggttattgctggtctaatcctcgatttgatatttaaccggtttaaagtaaaaacttaaaaaccggaaatcgattagggcagttcactggtgcatgggtttgtggaagagaagttgtgcggctgttatatatatcagagaagcgccttcaacaaccgcctcttagggcgtataaaatcagaaacagaaacgagacaagaattaattctctcgtccaaatttcttctgggcagaaaccaacatttatccttatccgattcttctagggtttcggaagatctaaccagaaccttcgcaacaaggtaagcattcaagcaatttactgaggatttaagaaaaccctgtttcttctaaatcgtggattgaacgagaaaccttagtttccatcgctggttacatttttttgagaaggactcttctgattttgtgttgcttttcagatggataagtatcagagagttgagaagccgaaggcggatacgccgattgctgagaatgagattcgtatcaccagtatgggtagggcacggaactacatcacctatgcgatggctcttcttcaggtattgcgaaaagatgatctggtattcatggttctatgaattggtgtagtgatgagatttggtacagtgtagattatctatatgatataattgtaagttcaaaaaatgcggtttcataatccagttgcatttatgttatttggatgcatcttggtgatttatatcaatttcttacgtttcgtgtcggatttagtagaaaacttgtacatgaatttgctttctcaaaagtgcaagttattgattaactgttttctttaattactttctcgctgcttgctattcaaacttttttagtacttagtcatgtgattagttgattttttgacatagaaattttgcttttgcttcttcttgaaacttttgtttttgtaacggaagttgttttgttatcttataggaaaacaaatcgaatgaagttatcttcaaggctatgggaagagctatcaacaagagtgtgaccatagttgagctgattaaggtattttctggttttagtctgtttcctgatctcagagttgtagttcttttgtgtatctgaagattatattgttatccttgatgcagagaaggattcctggtcttcatcagatcacatctattggatcaacggacattacagatacctgggaacctacagaggaaggccttcaaacgtatgtggtcactagactttagtatcaagtttattgttttaagtgtaccggaacacatgtaaccatgttgtattcttaattttgttactttgacctgttatttattaaaactcatctttttctcctgaagaattgagaccacgaggcatgtgtcgatgataaccataacactttccaaggagcagttgaacacatcctcagttgggtgagtttctaggactggttgttttgctatttctcgtctattctcttattggggattttgttgttttgtgtctagagaggtacattgtctccaatgctaatatatcttattaaataatgctataggtaccagtgtccgattcctattgagatggtgaagccattggctgagattgactacgaagggcaaggtattttagagtctcactcttaatgacgtttttaagctccctgccctgctgtcttttttaagtttttaaattatctctttcttgtagacggatctcctagaggcagaggaggaagaagaggtagaggaggaagaggaaggggaaggggaagaggtggtagaggtaggattactttagaaattgtttatacagtgtcgtagtttcgttgtaagcttttgcatgtgatttgtggataagcgtttgagtggactgtgctaattccttttttcgacttatcaggaaatggacctgcgaatgttgagtatgatgatggaggaaggggaagaggtggcagaggtaggatatctttagccaaatcgtatttgagtatagatttttgcatatgatttgtggataagggtttgaatgtgttgtgctatttctttttttgtttgatttaccaggaaacggatatgtgaacaatgagtatgatgatggaggaaggggaagaggcggcagaggtagaattgctttagaatatttctttccaaatcttagttttaccttttaacatatttgcatgtgatcggcggacaagtgtttgattggcttgtgctatttcttctttcggatttgccaggaagtggatatgtgaacaatgagtataatgatggaggtatggagcaggaccggtcatatggcagaggacgcgggcgtgggagaggaggtggacgtggtggtcgaggaagaggaggttacaatggccccccaccaccttactatgaagctcaacaagatggaggagactatggatacaacaatgttgctcctccagcagaccatggatatgatggtcctccgcctcagggacgtggtacgttgatgattttgttacactaatgttttctcattaaataatgatgagttgtaaatgtttaaaaattgttggaacaggacgtggccgtggaaggggaggtcgtggaagaggaggaggccgtggtggattcaacagatcaaatggagcacctatccaggctgctgcatgagcgaccagggtcattgaatgaagttggatctttcttacattctcatgtttttgtctctgttcttcaaagcaacttgttgccgtagaataatctttcgttcatgtcgctttaggttatatatatcctcatttattttatcatggatcttggattttcaagtttttattccttcaagagttttctagttttgtctcttttttgagttttggatatttgtttgactccaattacattcgtcggcgtattgacactaacaagtaaacaaccccctttggcattgcctttttccattggttcgtatatcagttgattatatattctaacaacataaaaagataacaagaaaaaataatgaataataaaattgtaattccaagttccaacgtgttttgagacaaaaagaaattaacccaacttgcgctggttgtgttttgggctattcgaagaaagcgtacgaaaataagtgagagaggtccaaacaaaactagtaaccaaaaagttaatcgccgttgccggggatcgaacccgggtcacccgcgtgacaggcgggaatacttaccactatactacaacgacatttgttgctcaatcgtaatgtagaagatataaatactaatatggaaaaaagctgtcttgaacaaaaagaaatatactttttttgttgtgtccaaaaaaaggaaaatacttaggaaagaaaagagtctcagcagcatcagctcgtccttaaatctgatccatcatcgtcactttctcccggcgaattccgttttatcgatttagtaagctctctgtctttatctctccgtctttctcagtcaacaaattggttgaaacttcaatcggttccttgaaatctcaccggcttagttgcatacttctgcaaaaaccctaaccttgtttttgtctttgtgaagagtaacgagatttgtgcaaagatgactcaggacgtggagatgaaagataacaacaccccttctcaatcgattatctcttcttctacctctactatgcagagtaaatctcgatctgaatgctttaattctcgaactgttttcataattgctaagtttcttctgggttttgacgctttgtttctttgtttcccagatttgaaggagattgcagcactcatcgatactgggtcttacacgaaggaggttcgtcgtattgctcgtgctgtgcgtctcactatagggcttaggcagaaactcaccggctctgtgctctcttccttcctggattttgctttggttccaggatccgaagctcactctcgcctctcttcctttgttcctaaggtatttgtgggttttacttcttcactttgatgtttcagaattctcaacttggttgttccttttagcatctggctttaggttgtttagattcgtgttatggttgttatactttcttttgatgttgtgaatggcaagttatctaacatacaactggcttagagactgaaatattggaacttttaatggtttagggtgatgaacatgacatggaagttgatactgcctcatcggccacacaagctgctccttctaagcatctacctgcagagctcgagatctactgctacttcattgttcttctttttctgattgatcagaagaagtacaacgaggtaactactgctgtatctttgtgttttgtcataagttacttttctgttgtgattttaattttaatgagttgcttttaatcatctcttaggctaaagcttgttcttcagcaagcattgctcgtctcaagaacgtcaaccgaaggaccattgatgtgatagcatcaagactctacttttactattctttgagttatgagcaaaccggtgatcttgctgaaattcgcgggttagtagctcaaagactgttttagttttgtactttgtcttacacctcatattaatcagtagctcaatagttaataatctggtcattttttctacctgcagtactcttcttgcgttgcatcattctgcaacgctaagacacgatgagctgggtcaggtatgtctttgtttagctcattcagtcggcattcattattttgaaactgttacttgcttcttattcaaatttatcatgttgaatgcaggaaacccttctgaacctgttgctacgtaactatttgcattacaacctctatgatcaggcagagaagctaagatcaaaggcacctcgctttgaggctcattcaaaccaacaggtagctcttggctattccttcatactctaagttttctcggttctctagattctatatttgcatgaaaactccaatgccacttctgcaatctttccagagaattattttttctattcgctatagcattttccatctaggaggctcttgtgttttcttttcaatcactaattatttgccgaacttacttgaagtgtccattttgcctgtccttttcatacttctgacaccacctcttaccattaccatcgatctaccttgtgtttttctttgctacatatgaattttgttctttttttaacccttcaattgttactgtttcaaaagaataaacagcaagatgacttgtctaaaacattatactttgcagttttgtaggtaccttttctatctcgggaagattcgtactattcagctcgaatatacggacgcaaaagagagccttcttcaggcggccaggaaagcccctatagcagctttgggcttcaggatccaatgcaataaatgggcaattctggttcgtctactgctgggtgagataccagagcgttctatcttcactcaaaagggtatggagaaggccctcagaccctacttcgagctaacaaatgtgagtccactttcataatcttgctgctgtgacatgtattcattaatttatgagcggataactaaactggtattagtatgtggtcacttgtgatcttgctacttcacttctgattttaaaccggttcctacttttcacttactggcctatacacctcttctgttaaaatctctctgtggtcacttgaaacacaattttgttgctgctgttgttttctgctccttcgaattatattgaacatgaatttctggctgtttactgttgctttttagagatatatgatgcaactggatagttgatactgattttgatctgaggcttactattaaagctctgttttgattttacaggcggttaggattggggacttggagttgtttaggacagtccaggagaagttcttggacacatttgctcaagacagaacgcacaatctcatcgtgcgactccgccacaatgtcatcaggactggactgcggaacataagtatctcctactcaagaatctctttacccgatgttgccaaaaagctgaggctcaactctgaaaaccctgtggctgatgcggaaagcatcgtggcaaaggccatacgcgacggagctattgatgctacaatcgatcacaaaaacggatgcatggtctccaaagaaactggggacatctactcgacgaatgagccacaaactgcgttcaactcaagaattgctttctgcctcaacatgcataacgaagctgtcagagcattgaggtttcctcctaacactcacaaggagaaagaaagcgatgagaagaggagagagaggaagcaacaggaagaagagcttgctaagcatatggctgaggaagacgatgatgatttttagacaaaggtcatctatttcttataagagttgactctccatctgtctcactttttttatgttcacaagtttacttggtactcttctcatcgtctctaagtgtttctttattgaggatttttatcctcaggaacctttttattactctggtttcactttaggaaaagatatttatcttgttggtttcagaagatcaaattcaacttcgtttaattgtgtttgggagattttcgcattttaagaattgaacacttgtagttatagctagctgtattaggtgggtcattattagaaattgaccatgtgaaatgctatcatctccaggcgatgcataccattaaaatccacattcataatttacattaaatgatagataagcagtcataaatatctaaagaatgaaaacaggacatgtgtattgaccattatgtgtattgatacattagtctatctctgccaaactaggtctcattttcttgaataaaacaatctcatgttatgcttttaattataggtgtttctggttcgattcattaacttcttaataatgacaaaaatctgtagaataatacccgggctctttgatagctacaactgccaactatttaatccatacaatcaaaatgtaattttcataattgtagatttgtaatgggtcaatatattcttacactctaatcatatccaaacaagctcctcaattccttaatcttgttgtatccagtatccatattttgttttcttactgcggaagttacttggtagtgtagtctggatttcggattgcagactttgcagtccacgatttttcatatgttggtgacaacgaacaagtgttaagttgacggaagtgttcgtaacaaacgacgtcgtgacggtgatcttcatcaactttgattggaaatcaagttttgagggacaattaacccaaaaaaataatcataatgataatgaaagagatttggcgtgttgctaataatgtaggacaagtgagcatgtgagagtctgtgaccgatgaacctgctcagaccaacctgcacatgattgtatcacaaacaaaaaactctcatttgtctttctttcgtcttactttattcattttaagcaaaaattaaatatccaccgcgttgcacaagaaatcatttacccatatgattattctcttagttttgaatttttgatgaccatgctgatttaaaatttgcaatcttacaataactttaacttatgtataaaaaaaaatgctgcatcaaccaataaaacaaaactttaggattacaaatgtttggctatgagtaaatcaagatattatctgcttcaagtctctttttcttatataatttcagaggaaaatgtttatatatagttcaaagcaatattagtgtaaccaaaggtaaattttgtatgaactttttggaggaatagaaatccatctgcagcattattacaaacagagtttgcagatctactgtctttttttggacttatactgttactaacaaaaatacacatgtaagagatttgcccaaataaataaattaaagatacacacaggctagataaagataagaccacatgtaaggtttttgttgctatactacattagtttacactcgcttcccacctttatttaaacaactctcacctccttcactcgatcatcatcatcatcatctctttcttcttccaaaagtcataatcatgtcaaagtctctagctggattggcggttttggccgctctttttattgcggttgatgcgtttaggccttctggtttaactaatggtcacgctacattctatggaggaagtgacgcttctggaacaatgggtaatttcacactttagtttcattatgatctgactctaatggatttgttcaaataacgaaattatttttgttgtttttttccaggtggagcttgtggttacggagatctttactcggcggggtacgggacaatgacggcggcgttaagcacggctctgttcaacgacggagcttcttgcggagaatgctataggataacgtgtgatcacgcggcggactcacggtggtgcttgaaaggagcttctgtggttattacagccactaacttttgcccaccaaactttgctttgcctaacaacaacggtggttggtgcaatccgccgcttaaacatttcgacatggcacaacccgcttgggaaaagatcggaatttacagaggaggaatcgttcccgtcgttttccaaaggtcagaactttttaaaagaccaaaaaacagagtaagctgttattttgcaattgttcaaacttcttaacgaaaagctctgtgttttttgtgtgtttgggaaaaacagagtaagctgttacaagaaaggaggagttagattcagaataaacggaagagactacttcgagctagtgaatattcaaaatgtaggaggagcaggttctattaaatctgtatccatcaaaggatcaaagactggttggttagccatgtctcgtaactggggagctaattggcaatcgaatgcttatctagatggtcaagctctctctttctccattaccactactgatggtgctactagagtctttctcaatgttgttccttcttcttggtcttttggacagatttattcttccaacgttcagttttaagtttttttttttgttttgtatgaaatatcattggcagtggtcgcgctttgagtctgtttcttttctccctgagcgacccgccctctttgttttttttatcttatggtatgatgggtctgttaatacaaaagacccgatatgatttgagggtatatgattatatgaagtgtattgtatttgaatgtttcagactcgaaaaagattctgtagcaaaaggagttttaacacatttgtacttggttttgtttatatgaagtttgttttagttttttgaaaaggagttttgtcaagtacaattctaataagacattggtctttactttacaaaagtttgaagagccaaaaaaatgtatactgctttggaaaatccaactaaaatcttgtgttattgttaatgtattttaaatttatcaaaactatgttcttctttgtaatatgatcttaaaaaatttatttaacgttttgttattattattctgaaaggcaagtaggactttaaagagttatgtggaagttcatatcaatataaactatattgatattgatttataagcatactttacaatcaagtaatccatttgcatttccaaattaattaagagacactaactattgaaccaatgcaccctcatatatttggatgagatcaatttccttgtaagcattttggttttggttcataatgatgttaacagacatttgtttttcaatattcttaaaaccaaattcccaaactgatggatctaatttcaggcaaccatgaagagtatatagcgatcggatcaagagcaaataattacacaagatagcgaaaagaaatcataattatgatcaataaaaattacttccatggcctcagtttcacttgaaacataaagaaaacttttaaagatattcttacagatttattacaataagtagtttataaaccctacaaaagtatttgttattttgatgaaccaaaagaatgaaagatcaagattcaagaactttgtcctgtgatttgcgctaacactagccttcttgatcggttaatagtgtggaaacatagatagagatgttcttcaagctcttgcaattgatctgagaatttttcttcatgtccattaaactccctcaatgcttcctttaacacttcaatcttcctactctttgcgcacatcgcagctactgtttttctatgctctatctcatcgcataatctcccagcaagtctactcaacgtatccaaatcgtttatcaatatgaacattcctttagctgcaatgtcgatttgtgtcccgagcttctctagagttgtatctttattgctcttatgcattcttcctttcgctttcttcttcctcaaaagacagaacgaacatagaccgagcaacgcaggagctgcgaaaacgccgagtatgctgtgaagagctatgatcagcaatgtaatgacaatcgcgctatgagtaatcactaggctataacctcctagcttcttgcagaatttaaagaacctgatttttcttcttattcttctctttttcgatgtcagtttggtgagcaaatccgagtttgcatcgtgaactatacgaaactgtgcttcattgacgatacgacacaaagggtttttcagcgcggcaaatctcgaaagttcttgaaatatcaaagcacagagcatctcggggctacattccaaggttttagcaccgttacaaacccttttcccaatcttcataacccttttgattttgttgtgattaatcttgatttgttggaggcactgaagaagagtctcacacacgtcacaagcttcggagctcaagtcgaaaaacgtaactataagattgtctaaactcgagtcttgcatcagggcatcaagtgtttcttgtggagggtcaagcaagtaatcggtgaagtgtgaatggaagctaagatctgaagatgaagaaggagaaggagaagaagaagagagtttgctacatgatgttatgcctaattgatcttctgcttttgtccgagtctctaagtaggagtttgttctaaatgcttccttgtactcttcattaacacttagcttcgacgtcaagctacgacaacattccttgtcggactttcctgctccattgacaaaacaacaatttagcagatatttttacaatctttttctgtttttctaacaatgaagaaaaactatctctggttaattagagaacaaatgtataaatttcagaagttaaaacatttaaacgttctttgtagaaaaatattcaagattgaacaagttaagagaagaagagaaacaaatcattcaaattttttttttgatattttcttgagtaaaagtagagcacagaagaagaaaacgaaccttttcttgtagggaaagactttaatctagaaccaagaaaattcttcactttcaacatcttcgatggaactcaaagagagaggcgatttaggtgaataatagacaggcttcttgtttctttatatacataagtctttttgttgattggttagacaaagatagagagagagagaagaaacaaaagaagaaggaagagaagattgagaagcgacagctagagagatggtggacgttagcaccgctcgatagattttgcttagtgaatgatggcttttggcgcaagttagagggaacgacacgttgtgtgttgacacgtgttgtactcttggggtcgagatgacttgttagtttggagaagaagtttccttttacggttttaccttcgtttgttgtgttctctttactttttttttcaattgattaatcatgaaaattaaaattgattgatattaaaagaaacaatttcgttgtgggaaattagcatggagttcctcgtacgtttccccaaaacgagtaattgccacgtagacctttctcgtttcaatattatctggtttgggaatcttaaattgtttttttttttcacttttttttgtttatctttttgcaatatgaatgggtcaatgtatcaaaaagaaaaacacaagtcgccctcttctttaaactgcatgcatgtaattgaaatatatctaacgttttggtatgacaataactaatctcatgcccttgtttcactttgactacaacggtgctgaatgttaacgtttatttttaagttcgtgtattcaaactaatgactaactaatggagtttgaataaaatgactacctagtgaagttcaatatgtaccatattatacatatacttggttttaagtatatagaatttacttcacattgataccaaaaaaaaaggtatacaagtgtgtaattcttgttcattacacgtttgcctcactgtattactaaaacattatctcacatctttctatttctatgattgatgaaactcgaatgaaatttggaatatataattgaaagtttatatcaataacaaaatccgatgtcgtccagcggttaggatatctggctttcacccaggagacccgggttcgattcccggcatcggagcttttttattatttttgaattgaatttatttgggctttaagaagggcttagcatatttctatctggggctttgtttttaaaaggctagtttatgactagcccaaattcattgttcttaacatttaaacccaagtcattgatcaagtcatacgtaaactatcatctatagtttggtttctctatagaagaattttgcaagattagtctctttcggttttcttaagtgtttgtcttctttaagctcaaagacattttcattagaaaaataactgctcaaatcgaaaggtgagtatgcaaagttccttaaaaccatttttttttttttaaatggtttctacactcactaagatacaaagcacacccaaacaagaacggaacggaacttttttacttttgatagacttatttgggattatagagactatcggtgggcctttcttcactcggccgaacttcagtttctctgtgttttttttgtcttatattagacaatagaaatcaagatcatgcgatggcaatggcatatatgactcatattgataatacatactttcccaaagtagcacgagcacgaccacgagcacgaccaccagcacgagtgcactccactaaagtggtcggctacaatattccattcttaaaatcatattttttgttggttttgcgatatactatataaaaaatgatatgatatcgactatacatttgtttacctacaagcctacaagcatgctttggattactaggattcgataagagtggaatgtgaatgtcatttctggcttatcaactctgcaggcccgcaccaccctctccttttattggctactcaatccaaaatcctttgatctaattttgtcttcgaataaacattttaaggtaacctattgtttattattttttacttaaaagttaagagtcatattgctaaatgatactaacatcaggtccatcaccatgacattatatgaacacacatataacttcatactttggaaactttaatgaagaactttcagacttatttagtctcaatcaagaatcctctaattagtggacactccttccccatcaaataaatggctttatcttgatttgaattttgctaaaatatgggatgaagtaatcattttgttcattgtctttggaacctcggaaagaagaagaaaaaaacatgtggagtacttgtgatgtaatgactcaaacagaagatagtggtccgatcactaccctattctatctccactttttgcccaattcagaaacccaccaatacttcaaagtgggataagcaattcaaccattaacgactcataattcttttgatctatctatagcttccagtgtctctcaacctgtataaatacccttttcttgagttgaggtatgtgaataagtctttccagtgattaggaaactacaaagccatgaaaggcattacattcttcacaccctttttatcatttctatatctcttatgcatcttgtttatgacagaaactgaagctgggtcgagaaatggtgatggggtctacattgtctacatgggatcagcttcctctgctgcaaacgctaatagagctcaaatactcataaacaccatgtttaaaaggttatacactgtttacatgaagtgcaaaatatacatttgttagtgttttgtggatttttgagacctttttatggtttggttttgtaggagagcaaacgatcttctccacacatataagcatggcttctcaggttttgcagctcgtttgacagcagaagaggccaaggtcatagccaagaaaccgggagtggtttcagtttttcctgacccacacttccagcttcatacaactcattcatgggactttctcaagtaccaaacatcagtaaaggtcgattccggtccaccttcatcagcctcagatggatcatatgatagcattgtcggaattcttgacacaggtaaggcctttcactcattggtctcatcatatcctttactttttcctaacttaaaaaaccaaagaaatatgagtttgatattgtgaaaacaaacaaacaaacagggatatggccagagtcagagagtttcaatgacaaagacatgggtccaattccgtctcggtggaaaggtacatgcatggaagcaaaggacttcaagtcttccaactgtaacaggttacaattttcacaacttttcaaaaaccaaactggatattactaacttcttttgaagactaaacagttctgtttttatgcagaaagatcattggagcaagatactacaaaaatcctgatgatgattcagaatactataccacaagggatgtcatcggtcacggttctcatgtgtcctccaccatagctggatctgccgtggagaatgcttcctactatggtgtagcttccgggactgcaaagggaggttcacaaaacgctagaatcgctatgtacaaagtatgcaatccagggggatgcactggctcctctatcttagctgctttcgatgatgcaatcgcagatggagttgatgttctatctctgtctcttggagctccagcatacgctcgcatcgacttgaacactgatcctattgccattggagcgtttcacgcggtggagcaaggaatcttggtgatctgctctgcgggtaatgatggacctgatggcggtacagttactaatactgcaccttggataatgaccgttgctgccaacactattgatagagactttgagtctgatgttgtactaggcggcaataaagtcatcaaggtaaatgatattttcatacacataatacaccaaaataactttcaggcttgctaataagaaccttcactgatgttcagggtgaaggtatacacttttcaaacgttagtaaatctcctgtgtatcctctgattcatggcaagtctgctaagagcgctgatgcatcagaaggatcagccaggtaaaaaaaacatcggtggagtcaaatacaattccttagaatgaattaagacaggggataaggaggctaacctctttctctgttttcattaaacactggctttttcagggcctgtgactctgattctctagatcaagagaaggtaaaagggaagattgtgttatgcgagaacgttggtggatcatattatgcatcatccgctagggacgaggtgaagagcaaaggaggtactggttgcgtctttgtagatgacagaactagagcagttgctagtgcttatggtagctttcctactaccgtaattgactcaaaggaagcagctgagatcttctcctacctcaactcaaccaagtacttaataagctatctcaaaaatttctattaactattgtagtcagtaaagacctaatgatcttttgccttgggttgcagagatcctgttgcaacaattcttcccactgcaacagttgaaaagttcacacctgcccctgctgttgcatatttttcttccagaggaccttcaagcctcacaagaagcattctcaaagtaatccataaccttgtgaccttctttagttattacctgattggaagcatctacttacttctatttttaacagcctgacattaccgcaccaggagtctcgatactcgctgcatggactggaaacgactcaagcatttcactggaaggcaagccggcttctcagtataacgtcatatcaggaacttccatggcagctcctcatgtttcagctgttgcatctctgatcaaatcacagcatcccacatggggtccatccgcgatcagatcagcaattatgacaacaggttaggactccttcattgcatattttgtgattatggcaagcaaaattggatgttctttaacttccatgtcacattctcagcgactcaaacaaacaacgacaaaggtcttataacaacagaaactggtgcaacagccacaccttatgactctggagcaggagaactaagctcaacagcatcaatgcaaccaggactagtttacgagactactgaaactgactacctgaactttctctgttactatggatataacgtaaccacaataaaggctatgtcaaaagcttttccagagaattttacttgccctgcagattccaacttagacttgatctccaccatcaattacccgtcaattggaatctctggattcaaaggaaatggtagcaagacagttacaagaacagtgaccaatgttggtgaggacggtgaggcggtttacacagtcagcgtggaaacaccaccagggtttaacattcaagtgacgccagaaaaactccaatttacaaaagatggtgagaagttgacataccaggtgatagtgtctgctactgcttcacttaagcaagatgtatttggggctcttacttggtctaatgccaagtacaaggtcagaagcccaattgtaattagtagcgagagtagccgcacaaactgagataaaatggtataaagttcagcatgaatatggaataataaaaattaatgaaccgatgaaagagctcaagtagatcaaactattaagtaggcaacagtccaaaacattcggttttgtgaaatttaaaactaataatggaagttgtctgcaataactactgcatataaagcagaacatcaccaatttttttgatcaaatttaactctaccaatctggagtacaaagttacagttaccaaccttgttaataaccatgcagaaaaagtctccttgaagtcaggcaatcttgctttcacacaaagggcatgcatgactgtgtcaaacgaactatcttcactcctccattataatagcagggcttaaaagctaaccctaacaattcttatgtatgttagtgatagagactattacgatatactcatagaacttttataaggcaaaagttagaggcaaacgggaagtaatcttgttttgtttcaagaagttcagcgatgatgagatgcctcactatcaccatcatgttctttatgtttttttttctgtctgtgatccaaaagtgtaagtctgaaacaagtaaatctggagattatatcatatacatgggagcagcatcctctgatggctcaacagacaatgaccatgttgaacttctgagctcattgttacaacggtgatatctaactccagaactctttagattttctaaccattgattcatgttatgaaaatattaagacagtatcttacttgcatcaggagcggcaaaacccccatgcacagatacaaacatggattctctggattcgcagcccatttatcagaagatgaagctcatctcatagccaagcaaccgggagtactatctgtcttccctgaccagatgttacagctccacaccacacgttcatgggatttcttggtgcaagaaagttatcaaagagatacttacttcaccgaaatgaactatgaacaagaatccgaaatgcatgaaggagacaccattatcggcttccttgattcaggtgagcagtatgaagtgatgaaatatttatatgcgctttttatctacttccagtaaaacaaatactcaatgcagcatatcctgatggagaaaacaggaatatggcccgaggcgcagagctttaacgacaggcacatgggtccagtcccagagaaatggaagggcacttgcatgagagggaagaagacacaacctgattctttccgttgcaataggtaagctgagactgaggaaagtagaacacatgtagagatccgatatatgtttgaatttaccacctcaaacttggataaacaggaaactgataggagcaaggtattacaattcgtcattcttcttagaccccgattatgagacaccacgagactttttggggcacgggacacatgtggcatcaatagcagcagggcaaataatagcaaatgcgtcctactatggcctggcaagtggaatcatgagaggaggttcaccaagttcaagaatagctatgtacagagcgtgctcactcctgggatgtcgtggctcgagcatactagctgcatttgatgatgcaatcgcagatggggttgatgttatatccatatcaatgggcttatggccagacaatttacttgaagatccgctttccatcgggtcatttcatgccgtggaaagagggatcactgttgtttgctctgtaggaaattctggcccatcgagtcaaagtgtgtttaatgctgctccatggatgatcactgttgctgccagcactattgaccgtggctttgagtccaacattcttctgggaggagatgaaaacagattaatcgaggtaagaaggaaaagccaatcaacggacaaatctccattcacataacatcttaaagaatttcttttgcagggttttggaataaatattgccaatatcgataaaacacaggcttacccacttatacacgcacgatcagccaagaagattgatgctaatgaggaagctgctaggtaatagttgcctcgtaaaattatagagtaactttgctatacctatactaacaagacaacacaactgcaaaccttcaggaactgcgcacctgatacactagaccaaaccattgttaagggaaagattgttgtgtgtgacagtgatcttgataaccaggtgatccagtggaaaagcgacgaggttaagagacttggaggtatcggtatggtacttgttgatgacgagtcaatggatctgtcttttattgatccctcctttctagtgacaataataaaaccagaggacggcatacaaatcatgtcctacataaattcaacaaggtttaagatgtctcatttcacaagacattgctttcaaacagaactaataataatatttttacccaaaaaaaaaaaaaaaacagaactaatatatcataatccatattgtagagaaccaattgcaacaatcatgcctacaagatcacgaacaggacacatgttagctccatccataccatccttctcatcaagaggtccttacttgcttaccagaagcatcctcaaggtataagccctaatattcatcataaacatgatctcaacagtattcacagaaacttcaaaaacaaaatattgataaacctgttacagcctgatattgcagcaccaggggtcaacatactagcatcgtggttagtcggtgacagaaatgcagcaccagaaggcaagccaccgccactcttcaacattgaatcagggacttcaatgtcatgtccccatgtctccgggattgctgctcgtctcaaatccagatacccttcatggagtcctgcagcaatcagatctgccatcatgacaacaggtgagaaatcaaaatcaagtagataccagttacggatgattgatcagctagagttaacccaagtcaactgtatctgcagccgtgcaaatgaccaacacaggttcccatataactacagaaacaggagaaaaggccacaccttatgactttggtgctgggcaggttactatatttggaccttcatcaccaggactgatttatgaaaccaatcacatggactacctaaacttcctcggctactatggatttacatctgatcagatcaaaaagatatcaaaccgcataccacaaggttttgcttgtcctgaacaaagcaacaggggagacatatctaacatcaactacccatcaatctcgatttctaacttcaatggaaaagaaagcagaagggtaagcagaacagtgacaaatgtagcatcacgcctcattggagatgaagatacagtctacactgtgagtatcgatgcaccagaaggattactagtcagagttataccaagaaggctacacttcaggaagataggagataaactcagctaccaagtgatcttttcatctactacaacaatactcaaggacgatgcgtttggatctataacatggtctaacggaatgtacaatgtgagaagtccattcgttgtaaccagcaaagacgacaacgatagcgaacgttaacgataatctaaagagaacacattcatgtataaagagcaaaaagattaagcaagaccaacactttctctcaaatatttctcataaaaaccaatagatgttgttagtagaacaaagcattaggttttcatcgacaaggacaactccaatcgaagagaaaaagaaagaaaaaaaaaacaatccgaaatcttgaaagctaaacacatctaaatagaaagactagagattcctaaacacccttcagatccgatccaatcactcgaacgcccacttgttctcattgcgaacctccgcctcttcctcaggtgtgtaatcgttcttgatgttgaagtgtgcacgcatctgctctggagttttgcctctcatctgatcagccacggccttgcacgtaaggtcaagaagtccaccgatgttcaaatagttcgcagcctgtacaaaccaaagaaccaaaacgattagtcaaatcaaaacgacattcaacacactaaaaccctaacagaatcctgcaaaatcaaacctaaatccccaaattaaaaaccctaattctaacaacatcaaacctaaacaatgaaagcgactttactaaccaagatgagatcgaagagagtaggctgatcgactttgacgaattcgctgtcccaattcttaagctcgtcgttctcagcggaaccatagaaatccttgtctccaccagcttcagcagcggcttcaacgtgcttcttgcaatactcaataaccttggcgaggatggctccggtgacattgggaagtggaattccgttatcggcacagtcgtcctcaatcatgtgcttaatcgtctgggacttaacagcgacggcttcctcgatctcgaaggattcaccgtcggagctcttaaggatgatcatcttcttcgtttctgccatcgtaaaaagtgacgacttaggaaaagtttttgaaggagaatcggcgctgcgattgattgttgtgatggtgtcaaggtttgggaagttggagccttatttatagccaatttcttaattggtattcaagtcggtttattgcttttaagtttttttttttttgccggcttattgcttttaagttaatctactccttttactaataggagaacagtaaaaagtaaaacaaatattggaaatttaagtttttaaaaaatggaaaatttatgttgttttaaataaagtaaatatttttacttttccacaaacttcaccttagctgtattccgttaataatatttactttttcagatttacatctgatttcagaaaatacagtttatctacgtgtgcaaaaatcattgactagggtttttatgttttaatcaaagaaaacctccacgtttgtatgtaaaaatctatgtgaaattatgaattattatttgggtattttgtagtgaatatcaaggaaaatgtaaaaagtaggtaacaaacaccacaatttttgggaaaaatattgcgttacactaaacaaaccaaaattaataacatatttatttgtgttgtatttctctcatttgttgatctttgtatttgtgttggatggaaatcttttatcttcttctagtatttttttcttcttttccaaacacataacttttctggtttggtaaactaagaagcaccaaaattattgcaaatgaaattatcactgattctgattaattgatgagaacacataaatcaagcttaacaatagagacctacaagcggctcatcgtcgatcgaggaactaatcatattcaaaccaaggttcatggttctcatgtctaaatataaaaaagaaagagaaaattagtgactaggcgaggttgctttggatggtactgaggatctaaggtagaacagttttataggctttttcagaaggatgggcaaagtcccagaacacgtgactaccagatcttaaacacggaatcggagtcatcaccgagcaacaacatggttttgccgtcgtaaaccctgaaatgtattacaatgtagaaattagcacccttgttttttctaccatatatattcaaaatttgcgtgtgttactcaatgttttaccgtattggctaggattattgatgacctcaagaagtgagttatacatatcgatgtagacgaatttgccattgggaagcctttggttgtactgattgaccaagttagctactttgtcattataaactctagcaccatagtttacattcggaagacatatcaaatttccggtaatttgtctcgcccctggcaaacaccctaacggtaacgttccaagaattgcaaattttctagctcctagatcatatagactctgttattcatacaaaataatcattataggtagaacaatattatgaagaaaaaaagttataaataaatgtgtgttgtatacatttatgaaggtagttttccaaccgatgagcatatcagtgtatgcttggacagtgtatctcgtttgtctcttcggagttgaaaaatatgtgatggcaagatcgttattaccagcagacactagaatcacagcattggctataatctctttgactttagctgcatctccaacttgttggtttaacttttctaagtatctttgaaagtcactcacctgatcttgtacccatataaccccctatatagtttgcacatatagtaaatgagtaagaacatatattactttatcttattgaaagtaagaagtacataacaagtagatttacctgtatagatgcagtgaatttgtctaaccctgaaccaccggatgcaaaacaaacgccggtagcgagttcactatttttaagaaatgggctccggaaagcaggtaaaagatcttttacccctaaaccgctggctacatacatatataccatgtacattttcattatagaatgattctcgaactatttgattactcattaggttaaagaatgtgaaagagaaaattggtcttatatatatatgttgtatagagaacaattagtaccaactaaatctgatagaactcttccattcccgaatcttcctgtaggaatacgatgaggaaaatcgcgtccatatggcaaaaaattgcctcttgatactgtcatgagcaaattgttgttaccagtatcgagaatcgaatctccaaatgcaagaactgctgaaaatgttccagtttgagcttgaacacatgaaatccatatagacaataatactactagaactttgatgtttgcattttccatctcaaataaattttaggttttattttgttagtatttttttttgtttcgaattttagtttcaatttagtttttctttttttttaaagaatttgtttactttatcgtcatactttatacaaaggtgaagaagggttgagagagttcatcgagtcccttgaataatggtatgaaacttgtttgtttttgtggttaaagaacaacactcttccctgtatcactggactgataatatatatttagccaatccagcaaatcaagtcttaccactcagtcttattcaattatttgactgatttacccccacaacaatgtgcagattaaatcatataatttggttatatttcatgttatctagttgattactttacttcagagagctataatattattacatcatcatgacctaaaaagaaaaagataatcattacataaacagaatagctgtcgatcaaatgaactgattgatatggatttgatctttgaaagcatgtgaagagtgataaaagtttctcttaaaatcaattggtaatcaatatagtgacttacaataattttgtacaatttataacaactgcacaagctttaagaaaaataaaagcatacaatgtgagtcatttgatcacactactcaatttaaattgtggatgtatttctcaaaaagtattttggttaagattttatagaatctttgggtaggatggagactatcccaaaacatgtaagcagatacattggagcacacaaatgttgtgaatcgattgcaaagtggaccagcttccacaaatccagttccacaacaacctctctttatttcttcaaaccctgcattaattctcaactcaagttatatatacatgagcttgtatagtttagtacttataagaattaaatattcacgttctaatattaccataatctgctgaattttctaagatgtgactgaaagcagagtatatgtcaatgtaaatgagattggaatttggtaggttttttgccaattggtccaaaatgttggagagtttgacgttgaaaagctgagaagcatagtttatatcttgagcacactctctacgaagacctccttttagagttcttagtattggtacgcagccaagtggtggtgttcctagaactgctatttgtcttgctccatattcgtataattgctgttcaagtgtatccatatagataggttattgttattaatttatttacgttagtccagtaaagaaaatctttgtaaggaaattgtaatttatgtatgtatggataccatatattaaacataatcatgaacaaatttagtttagtttaaaacctttgtaaaacaataattccttttggtagtaatttcacattttatcccaaaaagaaaaaaacattaatcatgaccaaattcaatattgttggttgtcaagtttatgtacatctagttatctacattattattctattgagtaccttagatctcttttgttaaaaattaaattcgttacatcaatagctataatgttttttactaagattttttttgttttgaacaaaagtaagattatttttaagaagcaaaactaaagtcctaacttctaacaagttaattttactacctttgacaaatgtcactttttaatgttaaatacattacatgcaaatttttggtattatgatagttttggagtgtcttcttaccttacaataaatcataatatatagttttgaaatcattgaacgtattgcatgaacttttaactttatttggagtgaagctatatgaactctctaaaagaaaaagatggatgagttacgtaccataacaaaacttgccgcggaatttgccatctttgaagtaaagtagtggatatcatctttgagcaattgagcaccatgaccataatatgtaatagccaaatcgttgctgcctgcgaccacaacggataagcccttggctaacagttgatccgtcttctcttcccctactaacctctttactctcgctatgtgtcgttggaaatatgtcaattgctccaacattgactttactctctgtttatattttacccaaatgattaggataaatggttagatataaatctatatgtgattaattttcatcttacggatattttgggagtcaaatggtaatagccactaccacctgaagcaaatgatacacccgtgagaagatcttctagttgtacattggggtcaaaatatgctggtacaattggttttactcccaaatattcagctgtaaaacaaacataaaatttaacatataatcataatatatactataacctagtatattatcaatctatcaccaattatgttcaaagtcacataatacatgttatgatataaacaaatcttccaagtccggcacaaaagaagaggaaagaaagaaagagagggagagaaagagtacgaacatatataatcggaaacgacctttccgttgctgaatctaccagttgcaactccgagtggaaaatccttaccataaggactaaaattacatttcatttctgttgttagattattattatttcctgtatctatgatcgaatccccaaagaaaaacactgccggtgtggttttgttatgtggtgatggagatgggccaggtgatgggccggacccagattctggcggtggccatggccgtagacgtcggtgatggatcacttgggaataggtagtggtcacgaagaagctacgaaatgatgataaaagaaagaaaacaaatccaattaatatcgatttcatggttcttctacacctatcatcaatctctggaaaaaaagcttctctaacaaaaatataaagatgaaataaatgttaagatactattttgcatatgtttgtataccactaatgatgtcattatgtatgtgtgtacatttttaatctctgtttggaattggacatgcaatttttgtgccgtattaaattaaagttgcgtacgtatgtctcaaggcttcttttatcacacgtttcaagaatttccttccattaaatttacctacgtttctaaattagtatcctcagaaagcgaggtatttaaattatttcgcaatgataagacttaagagtaacaaatatgatcagatcagtacatttttgcttatattatcttactagtgatgggtatttagtatgatttatcatattttatgatgacaaaatattggatatttgaattcatgtaaaaaagtagatgaagtttctcttaaaatcgacttatagatatagtaaatacaaggtttcggacatgcgaggtatgtgaaggtgtgtgaagtgtctctttctgatcacacattttcgaacctcctaatatttaggttcttctgcaggtaccaccaatcagactcaactctttcgggcacttctggttttacgtactactcacgagcatttgaagtccatcaatcaatgtctgcgatttcttgatatatccccatagttttcctatattataccatacattattttagaaattaaatgataagaacccattggatgtacccctactcaaaacacatttggttcggattttcttgttatcaaatatggtagccgatgtaaaaaaaattgttcggatgtggtttcaacttctcaaatatctaaatacccattttcatatgaacttatttgtattttcaaatttatttatttttatcggataacgggcctcgaactctatgattttaatagcttatatgcaaagagtttgtctaccagagtaaagtggtagatcaagtcgcactcatctatcataataaaacgagattatagtctaaaactcaccgctttagttttcttaacacatcaaatataaatcctagaaaagtaactgaatttctcatacaaatatcaagaattaagaaattacgtacagatcaaatttatttagccattatacaccacaaacatgatcataaactaatacaaacatgactcgatggggattcgtttgacacaaaagaaaaatcttacattactatctcaaatgttgtttgcttaactacatttttagtcacagaaacgggcccacatcttctacatcattagtacatagcaaaagtctttattttcgcatgagataaataatgtaatactattatttagataaaacatgaaggtattcttttataagtactttgtttatagttttataagctctttgagtaggatgcacaccgtcccaaaacaagtaagacgatgtattgggacagattttcgatgtagacttcttgcagagggcacctgcgcttaataatcctgttttgcaacacggtttctttgtctcctcaaatcctgcatgcaaatattttaaaattcaaatgcatgaacagatattataaataacaaagtgttatatgaattgtcacaataaataatttaccataagccgcaggagtttctagcatctgactgatgatagtgtagatgtccatataaacgaatgtagaatttggtagggtttttgacaattgacccaaaataaggaggagcttagaattgaaaagctgagaagcatagtttagctcttcattgcatattttctttttctttagtctttgtgatggtacacatccaagtggtggtgttccgatcactcctatacgtcttgctccatatccatacaattgctgcccaatttatacatttacattaacattaatttaaggaaattcaatcatgtttgtgaatttggaaaagcaaaaacaaaaaaaggaggttttaaaagctatatataataatacgtaccaaaacgaaactggcggcagaatcagcaatgatagtggtataagagtcgatgtcatttttgagtcgttgagcaccacttccaaaatatgtaatgatcagatcattgcttcccccgacgacaattgccactcctttggatattagctgattggtcttctctaaacctgccaacttatattggctcttctcttgtcttactaacctatttactttctctatatagtcttggaaatatgtcagttggtccagcattgggattgcattctgagttatataaatcaaatgatgattctgattgcaaatataaattactccatataagaataatgatgataaaagtgattcgaacttaccgctgcttcggatgtagtaggattgtagccagcaccacccgatgcaaaagatactcccgtaagaagatcgtttggttgtattttcgggtctaaatatgccggtacaatttcttttactcccatgtatttggctattggaattaggataccaaacaaaaatataattagaagaatttgtaattggttttcctttttttcagtatgttgaaaatttgtaattaattgtcaatgtcaatctattgggccaaggtcgagctcaaaagaaaagaatggagagagggagagagagtacgtacctaaataatcggaagcaaccattccattgctgaatctaccagttgcaactctgaatttaaagtccataccatagggacgataattactttttatctttgtttctagattattgttatttcctgtgtcaaagactgaatcgccaaagaaaaacacggccggtatagttttgttctctggcttaggtggtgatggggcaggttttggggaaggggcaggcgttggtgctggagcaggttttggaggtggaccatgtggtgggacaggctttggagttggggctggtggcttaggtggtgatggacatgggactggctttggtgctggtggtggcgctggctttggttctggcggtggtgctggcttcggttgaggtttaggaggtgttggtgggcatgctggtggtggcactggctttggttgaggcttaggtggtggtgatgggcatggagatgggctaggtgctggtgggggcttgggttgaggctttggtggtggtgacgggcatggagatgggcctggtggtgcgacaggttttgatgatgggccaggtggtgcgacaggctttggtgatgggtcaggtgttggtggattcattggccacggctgtggatacggccgtggccacaatggccaaggccagagccgtctatgcattacctgagcattggtcgttgtcaagaagaagatacaaaaggataagagacagaaaatactgcgaaatattctcgaatatgaacaagaatcgaccaaggatgatcgcttcatggttttactacaagtagtaaaaaaacagttttaattcaagtgtttgccactgtcatgtcaatatctgctttggtacgtatatatattcattacgtagattaggacatgcaattaatgtggcctggttcaagttacctgtgtctcaaggcttcttccatcacacgttttaagacttcccttatattcggtctccagtttcaagtaggaacttaagtactctttctagcatctttcgtgacttctcaatccatagaaactcatgaggaataaactctattaaatcttccctatctttgacttaaccagaaaagtttatcaaagtaactacagttggatttggagttagggtttatgtctatgtaatagcttcccacaaaattttgttacgcgatttcaaagctgatgcctgtgcgactgtgtctgagggtgagaagtttctagcggattggccttctttttaaactttcgttaatggccatgatttaaattatatttagttaatattttgttggaatgagatggattcgatcaagtgaaacaagaagaaggtgtgtcaattcggctaaattcacataatataatagcattttacactctgtttttattatttttggttttagtcgtccacttttgtctgtccgattattgtcaaagcacaataatatcaaatctttagaaaaacaactcaatttatcgctccatgtcaatttatatgtataatacaataaacatgtttttgaagacactaatccaaatgagatacagcttttatttagccaaatttcatctcaaatgtgtcatcttaaattttacatttaattgtcatagaaagggcccatgtcattctctacaaacttttggcttaagattttataagctctttccgttggatggtaagagtcccaaaacataaaagaagacacattcttgcaaagaagtgatgtatatttgttgcaaagcggacctaattcgagtagccccgtcccgcaacatcctctatcaatctcatcaaatcctgcaaaaaaccaaaaaagaatttaaaaaaaatctcaaacttattctcacaaaaacaccattgtagagtgagtagttgagcgttaccatattttttggggttttgaatcatatcattgaaagaagagtagatgtcaatatacaccaatgtggtatttttcatggttttagccaattcgttcaaacttgtggagagtttggaattaaaaagctgagctgcaaagttgagttcatcagcacattttcttttaagtcctcctcttgtggttctctgtatcggtatacacccgatcggagaaacaccaataaatcctattttttttgctcctgattcatatagttgctgccaaaattaaactcatattcagtaggtttgatatactagttcatattataaacaactaaatcggaggattggtttcacgtaccatagcaaaacttgcagcagagctagccataaaagaggtatatgtatctatgtcatacaagaattcctctaagtgttcaccatagtaggtattggccagatcgtcgctgcccgctaccacaatggctaggcctttggatattatgtgctcggctttctcttttcccacaaagcctttcactttctctatgtattcttgaaagtatgtcaattgttttgacatcggtatcgcactctacttataacattgataacagatataaaaccaaatcaaatcaaatggaaacattaaaaatgaaggagataatttccaaattcaaagcaatgatgttattactactacgattggtgtcaaaggatcatagccagaaccacccgaagcaaaggatacaccagtgagcaaatcttcctgggtcagtcccggtctcaaatatgccggtacaactggttttactcctatataatccgctgtgaaattcgggaaaagaaaaacaacctttcataagaatatttccattgaaaatatagtacatactatatagaagcatcaagcatgaatattttgtatcttcattctcatgatatgataaaggagaggaaagtcaccgataaagtccgaagggattttgccgttgcaaaatctgccggtgggaactttatctggaaaattcatgccatatggaagaaaattagctttgatcaaggtcaaaatataatcgttatttcctgtgtctaagatcgaatccccaaaggcgaagatcgccggaaacgtagtgttatgtgtcctcttagttgtcgctggtgcggggtttggccctggactcggacatggcttaggctctggtgccggggaaggccctggatttggaactcgctgtaagcggtttgctgaagcatgcatcgtcaagaggaagaaacaaaagagtgagagaaacaaaacacatcgagatattttcgaactagacaaagaaccagaaactctatcttgcaacatatttgctatatgatcttatctgtctgataagtaaaagagaatttttgctgtgaagctacaaaatataaagagtgggagactaaagtgtttttcactcagaaagaaagaaaaaaagtggacataagcatgtggtttagatggttataagaagaagatgcttgtctcttacgactccttctcattcacacactttgaacttttcttaaattcagttatccattactaatcgcactctcattttcgtattaccctctaaaactataagaccacagtttctacactattctctcaaaagaaaaaaaatacgagatgattttccaaaaacaactcgaataaacacagcctcgaccctcgagaaagaacaagtgtggacaagaatattaaagcgttttatgatacttaacctaattgaatcaattgaatatgaaaggaaagcttaaaaatttggtacaccattgtagcacagtattttacaccattgtagcattcattgattcgaatcagaggatttgcaattaccatggaagaagaccaggtcaacttgaaaccgctctgtttcggttccaggcgcagtataacataacgtttcaagtgtttggacctaatggtagtaaaatacataatgaacaacgaaccgattggactacatgtgagtggtcagagaaattgaagcaggagtaatgacattggaggactgatacagtaaattaaccaatcagacatcagtaggacaacagactacatgaaaagtataagatgttcatcactcaaaagactttcatatacacacaaaggggaaacaccatccacatgagacaggacaagaacttattttgatgtgatcaaacccaattcaataaccaaatgaaccaaatctcatacttataattgatatatatgtcaagcaaaaaagcgggtaggaagatcaatgtgcgctaacgaggaaagggttttggcaaactccgcactcaatggtctctgatcctgagactggaacctggacctgcaatttaaatggcaatgctctcataaacgcatactatcaagagacactacaaacaagccaacttcaaattccaatctgcctcgagttatctatcaacttgctttaactatttattcagatgattaagcgacaatctccatgatccaatcttaatagaaaatcacatcgaccatatgtaactgtttaatactagaggtctcacgtaagacataaacatttctctagctattctatttcgtcaatgtagtttgcaagatgatcatacacactgacacaagtgattatgaggacctccctgttttccttattctagaaaaaattgggtcccaaaatcatacaacgaaagacatgctatcaaaggatctaacctgtaagtgcacagtgcatgttggacaagctacttctttcatccgcctcccagatccttccctcaaacctgttagaatcatagctatcattgtcagcaaccataaaataccagaaacaatatatcataaacataagtatattagatatgaaaaattaccagacgaagacttgcggtttctctccatttcctcctgtatcaaacatatccgccatcagaaaacaattatatactttgcccaagatattaactcaacttgtaaatcattaaacttaataaagaaccaaggacgattagctcacctgtaactttctagcaaggtcttcatggctctgcaggctcacattcctgccagtggtttccttggcattactcaacctttgtgacacttctgcctgcacatccagaaacagattgaacttagaggcatacgcataaaagacaagataccagttcaaattaacttaaagctacattctcaggaatcaacggaacatgatttctcaacttaaggaaaaataaacagacagataagcataccatgcaccggtcacaaacacggacttgaggagcattatcctcagcagtgagagcaatcctgccttgagtacacttgtcacagaagacgtcaccacaattcctgcagtggtgctagaaaataaaaaatccataaggtttgatagtcccaacatggccaaaaatttaattcagattgttagatcggggaaaataatacccttcgtataaatgcaccgaaatctgaaccacatgatgtgcacttagaaacagcttcatcaggtacctaaagccaaaaataacatggaatgagaacaacataccacagctaagcaagaaaataagaatcaagtgatgtaactaatcaccaaaactaccctagcccttttactttgactacaagagaaatgtgtttttcttccaaaaaaaaaaaaacctacccaatgatctttctcctcattaacaggctttataatgttcatccaatcacccaatccttttttcttctcagcagtttgttcaatcagttttccagaggtgggaggcctgctacttcccccgatctccttggcctaaaacccaccaacataagaacattggattagtcaaaagaaatcatgatggaattgacatatagacttttaatgaaacaaaatttgtaaattttatgaacctgaaacattgcagccgtcacagtgtccagaagggtgttggtggtgtaactatttgattgcaatctgatacgtttagcttcaatgtctaccggagtcttagaccagaaagccagaatagacgaatctagtttctgatagaaagacatttacaacaatagataagacctccagtcacaaaaatggaacaaattcagtcataagaagaaggtagataatctcttacttcgcatcttgtgatgttctcaagaggatatattctcaaagttcggctagtacttggatcaagcatacgaagaccatccaaaccaatctgctagcacaaaaccaattcactaaaactagtttaggtaacacaaagttcaaattgaattggggacattacctgacaaagaacatctgttgtggtttgtccataagtctcagccaacaatttgacacgaaatttctgcacaccaccagtggaatcttcctgcacatcagccttaggaacagctctcacgatcttagcagaattcgagctaacagaagaatctctccctgaagaagaaaagctaatggatcgtccataatcatcgaacaatgttgaattcgatgatttcggcgcagttccacgagaaccgtatggctcaactttgcctccttgataagcataaacgccatcgccataggaatcttcaaaagcaggatattctccgctatcagatcgttttccgtatagatcagatcctaaatccgatctgctccggttataaccgtcataaccagattgatcaaatttcactgacggtttctcatacgaaggaggtatggatgatcctccgctactataaggaggtgcagagtacaaggatgatgaataaggcgcgggattaggattcggcgcaggcgcagatgaaggaggaggcgcagatgaatagccagaggtttgatgctgatcatacggtgagtaatacatatgttgcgaggtaggttgctgatacggagcagtagaatcaaatgatccataagaggatagaggttgtggatgaatcgtgggtggaggtggtggttggttgaaggttgaataagaattagggtttagtgatgtcgccggcggagaaggaggaggttgtgatggtgaagtgaaggaaggagctgaaggagggacatgctcagagttttgcccgtaaggagtgtaattctgtgaatagttagagtaatcggcggaaccgtaaccgccggtgaacggtggcgctgatgcgtacgtgtttcgagtaagatcggtcggaccagctacggttgccggcgccggcggagaaggattgggattaggattaggattcggagtaggattttgaaattgagagtattggtggtgatagtacgaattgtaatctccctgttgcatcgctgaatcggtgatcgtcggcgatgatttgatcagattatatcggaaattggaaacgatgacgaagatgaagatgaaagatagatcgagagagtcaagggaatatttggtgagggaaggattgtctgtgccgcgaacttttttgtatatttaataataatacacgtggcggtataatgaaccgttgattagaagtaagagatggttttttaacgcgtgatgcccacagataattgtagctgtttttctatgcaagcgtaaggaaccaagtcggacaagagacccattaatcacaaagtcaattaaaattaattattctcctcgtattaacattgggttttgggcttttgtagtttttgttaagcccaataataaagtttggagtaagaaagacgcaaaggataaaaagggtatttcagatgacgtagcaaactcggaccgagcttcacggagatgataacgactaattgacggaatagcccttacaaattagggttttcacattattctttccaaaaacgtaagtatagcccgagtcggcggatctgagtgtttcacgcgtctttaaatagaaccttacccttcaccattattttctcaaccgcaattggtttttttcttctttctctctctctcatcgattaacaaaatcgaatcgaaaaaaaaaattagggttcttctctcttccgtctctcgttatcgatttcgttttgatttcgcgccacaaagaagaagtttcattaggcgcgaatctgaaacctaggttcgatttagttctgtccgaattactgtccgttgtcttgtccgttagtcgattcgatctgagaaagaaagaaagagaagaagaaaaaacgatgtcacgatatttcacatccccaccgcctgtgtatgcgaggaactgggcgaacggtcaaaacttggtcgaatggactaaggttcgtcgagcactcaattcttgtgattgattcgctacggtgtcctcttgtctgaacatgggtttctgtgttcggtcagagttaaatttccttataatatcctctttgtagccagatctctaggttgcatataagttattgattggttaaattgtaggaaaatatcttcagcatagatctatgaattgaatctacactatacatgttttagcataatgaatttcgttcttaacgatgtcgtgtagacatgtatgttagtttggtttggtctccaattataaagtcaaccataaagacgcgttgtagatatatgttttgagtaattaacattatgtgtgtttgtggttgaatgatgttacccacgtatatgggtatctggttgtttgcctgataaatccttcctctagtctaaatcctttattctgattggattataaagatcgaaagaccaatagttgattctaaaaagctgcatcggaaagagaagaaggagaaaaagaaagaaaagaaattaaagaaagagaagaaatcccttgaacagaagtattccacaaccaagacagtctcatatgaatccgaacagcttgagaaatcttgtttaacagaagaatttgagcaacctcaggttggatatttgtctgatggtagccagaacagtaagaagagaagaagggaaacttctcctgctgttgttgagagtcaaatcaaaggtttgtgctttgtttcttcccggattagatgaatatctttattgtgtttgaatacatatactgaaacagagacgtttaatcatttgcagctacacctgtagctggtaaaccactacggattcgtattgttttcaagaaaccgaaagaagctgaagctgtacctcaagaggatcctgtttgttccacttcagggactcagagacctagcgaattaccaagttctgtctctcttccaagtatctgtgatcatgatgtggctgtaccctcaacttctcttgagagtggcaaggtagcaattatttccgaatcaaagaagagaaagaaacataagcctagcaaagaatcccggtacaattcattgtttgatgaattagttcctccctgtatttccttggaggaagatgatagcagcagcgatgactggctttttggaacaagtcggaaagaaaatgtttcttctgccaagtcttcttataagactgatgaagacacgatcatgagcttgcagacgtcaagagattgttcctctttgcctagagctatgttattgtctgaagttggaattttttcattaccatatactgtcccgttttaggtcccatattgttttgttctttctcagcttagccttaggccttagctttgtacagttatcattgtaacaatcacagtgatctatgatacttgaacgatctctgtatttttgacactaatcaaaaatcatggtttccacttactaaactatcgtctacatgatttttgtcaactggaagtttttggttgaattgatcaatgcgattgcaaaagctggctacttttaaataagcaatttcttgcaagaagttgactggtttagccgttccccagtttaacttcttgcttaggcagctggagaaagatctctttaagcatgatgcttggtaagatcacatgaatatacatcttgtgggaaagaagcagaaaacaagagctcttaaaaacaaaataaacgttgcaaatattaattagattcatttgttaatacaaaatgatcctcaagaacaaaagagaagagagacagagattagtctacatagcaagagtacaacacacggtctcttagtctgtggactcgaaagattcaccagcaaagagtaaaagacacaacaacaacaaagctcgttttagcaactatacaaaaaagctactagaaatgtctcccttcacgtcgaaattatcatattaaaatgggccgaatcaaatagttgaaatcatcttctgcttctttctttagttggttttacctagtcttagaggtttttcttatcacaagaacgcgcaacggttcttattctttttcttcttcttctgctttggtggctgaagcaccacttttatagctgcatcaaacactgccttcacgttctgcagaaacaccaaaaggaaagaaataaagctcaccctcttgataagatcaaatattgcaaacagtgaggaacaggacaagcgatttgttatgtatacctgctgtgtctttgaactacattcaatgtagacagcagatccaatcagtttcttcagttcctctccctgcatcattcaaaacaacatcagacaattctattaagaactggcaatcattgcaagactattcgtttaaaaggatatgtacctggtttgtagtaattggcacagcaccaggatgatctataaagaattgcttgtcatctcgaagatctgcagcaaataccagtgacttaacaatcaaattttgcaagaaaacttaacaacttcgttggtgtcacaaggcttgtaggaacgtaaccacagatctttcagtcaaaaaaatagcatgatcagttcaatagggaaagtgtgtgattaccgagttttgtcccaacaaggataatgggaacaccaggagcataatgcctgagctcaggaatccactgagagaggaggaacgaaatcaaataagatcactcatcaacacaaactgtataggatttatcagcaaaagagagacaaaccttcttggctatattctcatagctagccttgctaataagagagaaagcaagaatgaaaacatcagcaccacggtaactcaaaggtcgtaacctgttgtagtcctcttgacctgttaacaaaccccacaaacacaaactaagtcaaaaacaaccgaaacaaaaggaaaatcccaaacggtgaaacgaaagaattaccagcagtatcccacaatccaagattgacagtgttgccatcaacaaccacattagcactgaagttgtcgaaaacagttggcacataatcctgaaacaccaatcacaagtcacagatttacaccttataatcaaaatcatcctttataaaaagcaaaaacaaaacacagtagcttcaagatcaatactttggcctagattctcaaagtcttaaaacaaaaaaagttgtaacgaaattgatcaatttctagtatacagctccatgacctaaaatctacacctgaatccaatttgcaaaaaccttgcagatcactaatctactcttgcaacgagctcaacaaaaaaataagaaaccgaagagatattgaaataggagaggaaagatttacagtaggaaaagtattgctagtgtaagaaatgagcatgcaagtttttccgacggcaccatctccgacggtcacacactttataaaccttgacgccatctctgccgcaagatcggaaacaaacaaaaaagcccttaaaatcaatcctcttttgtggttgcttcttcctcaaaacctcgacatttctagctcgccaatcaaattcgagctctaaaagcttgtgaatctgagaatcacccaaattcgaaaaagaatcgaagagagaaggaaaagaagaagaagaaggttgatttggcggttgatagatgactttgagaggagcctataggaggaggggactagtagaaaaacaacaactctgagacagctaagagaacagcaccaaacacctccttatcatatacactcactccccttttatttatattatactttttattttcacctctatttttcttttttcaaaattttgaaagtctcttttcttttatgtcacggattttgaattttgaaatggagaagatctgtcagttttttttaaacaacaagaaaaatacaattgtcatgaatgtttttgtattatctctttggtttctcaacagtttttaaatgtttttaataatatatttcgtttaacacttttttattgtgatacatattttcattgttgttttgagttaaaattgtctcttaaatttggactaaatcattgacatgaagcctagagaaatcttagtaaggtaatattttgaactatcatatattgtctgaacaatgcaagtttcaaaatcctagtgtgttgtgtctttggacttgcactgccactttgattcttactggcatgagacttatccagttttgagcagttttccataacattctttttgttcacaactttattaaaacatagctaacgaagttttgattatcaatattagcagtaaacgaagtcgcttatctgtctaatcctcttggtacctaccaaaacaagataagaattccatagaagtttatcatttcaccaaaacaacaactaaaagttgttatcttacttagtttaaccatgtatcgattattttacaaatagtaattggtaaaatattataccgtctcaaaactatagattttcttcaaataaaaactttctttagctagcgaatttgaatccgcatatccagttataagactcccattcacaacatcttctacaactgccagttctctcgtatgtaatgtatcaagggaggtaaattcaaatgatctaagatagactttatagtatagcaaaaaaaaaaaaaaaatggcatacgagagagacttaagcaaaatacgaagaggcatgaatgaaatctttaatcattggatttggcaactctcactcatcaagaacgtgccggcacgattcataaatgtcttatttatgatgtttttacttattttctcttttcgattcccctcggattacgaaacataggcgactagagtccaatgggacgtgcccaactctaactaaatcaatccactaacgatccaccacgtcactgattgtcccatcacctaatcataatcacaccagacggtagcttcttataattatttgtcaaacttgatgaattagtagctaattgccatcatgtgttattttcaactttttcattccataagactatatatatatatatatattgctgaccaaaaaagaaattgcttatattgattatatgcttactgagtttaataatgaaaattagaaatgtaataaagttatccacaaatatttatcaaatgaccgtgataaatcgtacaaaattatgtgttaatttaaccactcataatttttttaataaacatttatcatgtggatttggatttaaataatcacattcaatgatagtagcacaaaccactaaattgtacacgaaaagtatgaattaaccaaatcatgatatcaaagaagttaagcttagtagcttaccaactattcagtattcaccaaccagtgaccaatctctctttattaactaacttcacttcttttctgttcaaaaatcttttttcctttttgatagaataattcaattactgaccagaattctctaagaaatagatgaaaaagacaatccataatcactattgccataatccaataagctgcaaaataattcagaaacgacaaaaaaaactatcagaaaatgtcacaagaaataaaccaaaaggtccaaacaataaaatccatatgaactataaggcttatacgtggcccattatactgtgtaacccattattcttcgaatcgagccatagcaaccaacatgcaacaaatatagaagttttacgtacataggaaggaaggcaaacaaaaagtgttgtttcgtgaaccctaagagaagaaaacacgaacctttgaagtcaagaagaatttctccactgaagctcaatctgaatacgaccattcttggaatcaatcagatgatacttatcgttgattctccgattactcacaacatccccaagatttatcaccacgtaaccaagagtttcctgatcaaatcatatatcaaaatgttagtttttgctttctcagagatacgattttgatgcaatctttaaagagagatctgattttgtttctaccttgggatgaattagtcttgaagaagaacttatgacttcaacgtgtagcttatcgtttatgggaggctcatctaatgggaactgaaaatcttcatcccatctcggttctctgtttttcttcacacgctacaaaatcaaaccaaaatgtgtaaaatttgatgtcctctcatatgtttccattttgagttttaagagaagttttatatatacctttgtcttacgctcttctcctctgaatagcaaacgaacagaaggattagtgtgatatttgccttctagatcttcagcttcgtgaactatcaccacaagcaagccaccagtagaaggtgtgccttctggtgctttctctactgcatttggatcatcaatgttctctggaatatcatcatccttaaaaggtttatattcgacttcaaccacgagctgtccacgcgatttctcgctaactggctcttttggttccatggattttaagagctcgagtgtcatgagttttggctcctctggtgtaaggtctttgagttgaatcacattcattcctatcttatcatgtttaccaacctgaaatatatcaagtgtacataaggcaaattatctccagcaattattgaaacaagccaattcacaaactggttttacctgttcccagtcataaacaatgagctgtagctcttggctctctggttctttaacaaccaaatcgaattcttcgttccattcaggattcagattactgtgtttaacaactgtcttcttaccaggaaccttgtctccagagagtgttaatttcacataaggatctgatccacccagaagatccttcttcttaagctttattgcctttatgaccttcacactaagcaatccaacaggtttcttcatagctctgcagattgcgcaaaattgaattataacaaaaatttcaaatagtaacacaagtgtgacatttgacaagaaaaaaaaagaacttacttagaaggatccattatttgaacattcaaagtctttggccataggtacatgtttgcaacctgatctttaatgatttcctacaatagtaataaacaataacacaagaaacagagtttcaggtccgaacaagaatgtttccttacatgggaagttaaaggaacaacttccaaaacgtctttacctggacaaatcggtataagccaggaatcgccattacatctgcacctagtaacttcagtccaaaatcgacttgtggctgcagaagatatcacattgtagactctcttgagttttaaggtattatacaaaataaggttgctccggtttgaattataccttatccataagagagacaaatatgttggcaaaacaggggaatgatggaaccaaaggcttcagagtaatccttggagtagcgtaaacttgcaaatcaatcacctgatgataccaccttgcaagtaatcagacaaaaattacttattttcttgcgatgcagcgatcaaaaacttacctgaacagtagcttttaacccaaatgctttggctacaacaatgatattagggttccctgcccatttcactgacaactccatgataatttctttgtcatcagttgcatatactttcattcctgcgaatgatagtgataatatcaaaacaaacattcatgaactaattaaggaactaaaatgtgtatctatgagtattaaacacaagtagaaaccttggaaacttggtggtaatgaacccaaagtgagcatttcaaattcaactgaatcgattttgtagtttggaatttgctcagcgataatgggtttggctattgacttggccatcttacagatagcctgaaaaaaacattacaaggaacattgtttaacaagttacagtattgaagaagataaaagacaacaataaaacaaacatgaaagctaagaagaagacttactttgtccatataaggccacatatggccaataagcttgttaagccagtcaatcttcaaatagaaaaagagactttgttacaaattagaccataatatgtattaactaagaagatttagagaatgtgaagaaacatacacgatcaaaatcaggatttttcacccacataggtatttcagggaacattgttgctatagtctctgaatctaactccaccaatggcttgatctcaggatcctaagaacaaataatgtcaacaaataaagcaataaacattggctaaccaaagaagaacattagaagtatagaaaaccttagcttcatttaaaaacaaattgagaaatcaatcttttcgtatacatgttttaagaatccaatcgatcaattcacaacaaaaatgataaataaataaaaaaaacatgcctcaacatcagtagactggaaatagatgaacaagtagtaaccaatgacgattccgatcgttgttccaaatccaaaaccaatcacacccaatattgtgctgattattcccatgtctcatcaactcaaatcttctgacaagacactcttcggattctttcaactacgaaaacaaaacctttaatctcaaaagagaaattgcatttacttagaagggattaaatatcagttaatgttttgatatcccaagggatttacgttagagaaagaggaatacccagcatcatcgtcatagtctcattactattttccttcacttgatcaaaaaacggtttcgaataggaaaatttcaagagcgttatgtacggactcactatgaaacgtccatttgtttggttgagattttgtagtttcaatagtatcgacaaataaggactttattgcaagggatcagtgattgtctatttcaataaaaacctttgcttcaacttctacattgcttactcattaatcttctctttgatgtttataatgtaagttatgtaacaatttcttaggcccatttaggtatatacctctattacaagtctacagtgtatagtgcatataaattttaaaatccaataagtttatgttgttccacaggtgactgcccaataagtcttgacttttcttgccaacagcagaagaattattccactatgataaacattctcattttaattttttcccgacaaattaattaaagggtaaaatgtaacttaactaaattaaaatgagaaaggccgaggaaaataaattcttggatgaatgtgtaagccttaagatatatgccccgaagtaaacagcccattgatgtggaggccttcccaatacactctatccatctggatatcacaaaaactgctattttggtacctgattgtagtagtctcgaccaacaattagattctatgatatatatgagattcataaagaaaaagttataaagaaaatgctagttagatgtatcatatgattcatgtacctacttgcgtagtattatttatagtgaaaaaatgtttaaagttcgataatcgatttgttataagttataattaaattgctacaatttcttaatatggaagcaagccaaggatcataaaaagcagttctaaagacaaaagtatacaaaatgttatatgtgcattctttaaagaagaagaaaaggtgatgtacgtggatttagatatggtcggtgcataaagtaataaaaatcatgatggagcacgtcatttgctaaaggcaacaccaaaagtagcaatgcactgactcctggtaactccacataaaccctagctagcagctacgtataatgtggggaaattttaaacaaaatttggtcaagaatgggatccaaggaaaaaacatattattatcgaatgataaactgaaatccaatggattaagtaaatttcatacatattagaataatatcaggtgtagacacagacactagacagtacaaaaacatgtaaaaaacgttgtaaggaaatacttcagatgcatatcaataatcaaagtaagaaatcatttcacagggttttaaaagtactatagatcatgagtcttaatcttcggttatgaataaaaatgtgatatatattaccgcctatgttggacttatgtgcaatttgcgttaaactttgattttatttggttggaaaatgaaagtcaacaaataaaaccaaattggttctaccaaacacgctgcaatgtattaaatatgtacatatatacgagacgaaatgatgaaaagaaaagagtgaccacacctaaccatatgattaatgccaaaacaagtttatgaaaaaagctgcgatcatcatcatccaagttatctatctataataaccatatacgtacagagactatcgaacaaatatatatatatatatatatatatatgatattcgccgactataagacccatacataattataacctatagactaccaagtttaagaaatacacataaatatgatgatattcgtcctatattacttttgggtgtttcaaagcacatcgacataaaatacactatataagttcataaacgtagtcttggcatccaaccgatccgcaatattaatatacacaatcagataaaatatgtcatgttgtttcgatattaccagatttaagtgttaaaatgatttatattgtatgcatgtcatatgatcaaatattttgaattttatttttttcttataaccacaagaataggccgaagctcaaaccaaatcctggaaatagcatttaaataaatgaatcatactgattactctacttttgatagtaaattctgtgtaatgttaaccatatatccatcagctatgattttctctgcaatataaaaatccccctatttagattctgtagttctaattggctcaatccttcaaatggttacattaagaaaatgacaaggttttgattcgcagtacgtagttttattaatcagtttattcgatttctaggctcatttgatcgaatggtacaacattatatatacggtatacctatcattttacatttcaattaaatatcagataacgattcttaaaaattgatatttacgcaatagacaatatcgtagtgatatcctcgatgctctctattataatgtccaccatagaaaatactattcgatatctaatatcttctccctttcgtattattttgaaggaaagcacatgcaaccatgcatgaaagaccgaccaatcctattcttggaaaacctcacgacaacgatgaatggctggtgtgatgacacctgtcaagatctacaatgacggaattgactgggacccacactttccctccacgtgaggtcatcaacgaagaaagccaccgatgataccgacgtgtatggtcaagatctgcctaaagcagatccctaatcacacggctcagattctctcagcggctattgtaatacttatttcacgatccaacggttcagtttcaatcggcggtgaccgtcctacagtgtttcccgggacttgtgctctatcgcgcaattggtatgcaatcttcaagctagcataacattaaaaactgcgatattttagtctaaaataaataaatactttacaaaatactacattttaaaaatacgcattattatttgaaataattggtagcttcgattataaaaagaaacatccgtgctcagtgcctggcaacatctgtcctctcgaggttagggttctttagaaagtttttattctatcaaaacgatcctttggatcttgttatgagagttaattaatttgaagattaatatgttttaaaaacttctaatttttatctttgtcataaaccttttaaattttattcaaacttatagggttttcgatcgtattatttgatagatcgtcgccactaaaacgtatataaacatctctgttttttccttgatttatccttccaaatcttatttaatcgtttttaaaaacctaaaatttccaaattataatcaatggaaacaatagcagttcaaaatgcaccgggtaaacaagtttcgggtttgagaccattcaagaaccctaaaagaaggagttctcgtggttctctttcaagatccggaggaagtttggctcttcctcttaatccaacgtcgtcttggggatcttctccggcatatccgccgccgcatagttactctcagcctcctcttctccctctaccacgtgtcaacagctcaactgttcctctgcaacgcgtcaacagctctcgaccacgtgtcaacaacaactcttctctcaatcgcgttgctcagacaaaagctatttctgaaacacacatgaagaaagcagagttcatcgaatctgcgagactgactcgaaccggttcagtgccgatccaggcgaaccagttgcgtgattttcctgaaggattcgatggctaccccggtccagcgatcatgttattatctccgccaccgagtagtttgcccatgcctaggttttcgatcaaaccgaagcttcgttgcaacgtagaagctgctgggaaaagtgacgtagctaccaataacatccggcgagttttacagctccggtgaaaggtggtgctacgttaacgtacgaataaaaagaagcttatgggctttttaatactttattgggctttgggtctgtcttgttttttaaattgatagaactcttctctactttgtgtgatttgctaagccataacttttcaaaaaggcttcctaggcacaaaatagcctggctgtaatagaatttcaattttatgttccttaataagaaaaaaagtttctaatgatagatcgaatatggagcttgtaagaaacaatacaaaatgttataaatactaagtttgtaacaatcagtgtgagaaacaaaactggtcttctctgtgaatcgagcaacattctgaagatgataatgatctcagccttctgtgaatctgtgtccacaattggggcaagtgtaatatgttgtttgtccttcgtctgctgatctagtctgtaaatcagaaaactctgatgaacacattctttgaaacgaaacaagaaggaaaaacgaagaagttgaaagcttggacttacctgtctggttgtgtatacaagctccggatgctggcatttctcgcacgcctttttgatctggaaagaacattcaaaaccacaacgcaagaattaagacagagtgttgtaacatgattttttgagtctgattttcttaaaaacctttggtagctcagcgtcttcctgtgttttttcactctgatattcctagttctcttctgatatcctgcaaaacgccaaagatcatgagttgtatactaactctgcattgtggataccttccacaaacaccaaagaacattacaaaagcagtctccattttaagttttgaaactgattacatagcatgcacgggtctctgtgtgtgttcactgcctattaagtgataataatggaccaaaataaatcaagagctgagatctttgcaactccgtgaaacagaaaccaaatttgattgatttacacacatatggatgcagcgaaagataagaatccacaatgctgagtaaaggaaaacacatacctcagtagtaactgtgtaagctaaattcttgtcaatgatttctgaaaacaatgaagtttaaaacaacaataagattaaccaaatcaagaaccaaaaactgttcgattcgattcaaaaaatccaacagaatttcatggatacctttgccatttcgcgttgtttcgcatagtggacattctgcatacttggttgatttcaagaccagcattgtcccacacaaattacagaacaagatatcactttcacgagatttctccattagagaaccttaaacaacaacaaaaacgccaaagaagcaacataattgtttcatttgcttacacaagacaacattaatgggaacaaaactccaaacatcaaaggattctacaggagaacagctaggaaccatatttaagcacgaactctaaaatttatgtgatagtaagaaaatttctgaaacagagacactagtttccaagagccaacataaacacaaacacaagttaatagaatgaccagcacagtatagatagttaacaacaacccacattacatagaatcagaaaacacaaaaagaagaaaaatatagcaaaatatctcaaacagaacctgtggcgagaccttacttaaacactgactttatgagcagagagaagaaatttacaagtagtgagaaaaagagacgttaaagggtatagggtccaacggtttgtgcttaaagtctccggcggccgcgacgattaagagcggaggcggagacaagaggacgaagaaagaaatatttattgggcttaaatcaaaagcccaatataatgggcttcaaatgtgtaccgaaagtatttatttaaattattttcgtaccaaccaaaattggtgatgatatttttgattttacattttcagttgaaaattgaaaattgaaacgctcctttttccgccatagagagaaagagacaatggaggagaaacagaaaagtctcagtcctccgccgtgtccttccactgtaacagtgcgacggaatcctccgaggagagctagagcaacgccgtttactactacaactaagccacctctctcctctttagcctgcgcgaaaccccacgacgttcctacttttccgatcgacgagattctctctatccaaatcccacaatccgaaccaaaaccagcgattgcagagagtttgaagattttcctgagaatcaaaccattgagaactttcaccaaggttacgaccaccacgaagagcagacctagaaatgtgtggccacagaatccttcgaagaagaacaacgcgaaagagaatagaaatccggagattacgaagaaggttaggaagaaggacgaagaagcttgtattactctcaacgattcttattcagttacgttaactccgcctcaatcgttgcaagagctgaaacgaagtaagactgaggtatacgaagggttttctcatgttttcccggcggattgttctcaggttcgatgaaatttctcatcgattttactacctttttggttgaatttgagattagatcagagttgatgagtttgattttgctgtttgtagaacgatgtgtatgataaaatggttcaacctttgttggaggatttcatgaaagggaaaagtggaatgttggcggcgttgggacctagcggctcggggaagactcatacggtctttggaagtttgaaggatcctggaattgtgccaattacactccgtcaaattttcaaaaagaacgatgagagttgttctggatctttgaggtactgttatagtgttatgtagtatcatgatacaccatggatgtgtcaataggaggaaatccaaactgtatgaaacaatgaatttgtttggactacacacagctttatatcttgttctatatataacatctcgttacttctattcaggtcatttaacttgtcgatatttgaaatatgttctgaacgagggaaaggggagaaagcatatgatttgctaggtggtgaaagctctgaattgtctgttcagcaatcaaccatcaggggtttgaaagaggtttgagatttttttttgtgtgtggtgtttcttgggtgaccacaacactcagtttgtgattgtaactcttcgttatttttctcaatcatttgtgttaagtaggttccaatccagaatctggaagaagcagagtctttaattggacaggcaatgctgaaacgtgcaacggctacaacaaactccaacagccaatcaaggtacttggcagcaaaagcttttaatctttctcagcacaccaacttgattttaacttttgctaacacacccttgtgccctttgtttatttgataactcaactgaattagaagccctttcacatggaagttagagcctttttcaataatgtttaactagatgtcttcatgttctatactaattttggaattactaacagtcgctcacaatgcatcatcaacatacgagcatcatgcaatggcttttccaacgaaacaaaattgcagtctagtgatgctatgctgacaatagtggacctggcgggagcagaaagagagaaaagaacaggaaatcaggttttaatctatgttgttgtcactttgtatatggactctttgatatgcaaaaccacaaatatatgtcatgtctgaaagtatttgtcttataaatacagattcagtgtactagttaggagaattgattcctagcttaattacagattataggtgactcatgactgtaaaatattgtccagtacttgttcttagcatcaaaataggatatgatataactgtggagatgtcttcatctgtaaactaaaacttggtccctgtttgcccgttcaaattgttttgcagggagaaaggttggttgagagtaatttcatcaataatacatccatggttttcggtcaatgtttacgggtaaggccattgattttggactccctggaactgacccttattttatcctctttttgatgcctaccattccactaaccatgaacactcggtatttgttggcagtcactgttggagtaccagaagaaccgaaagaagggattgcagaaacatcatcaaaattctttggtagcgtctacctcaaaaatccttcacattatctcatgaatttcttttacttatttatgagttattgaatctttcctcattctatatgctaatatgattttggctttatgtagttaacaaggtacttgcgagattacctagaggggaaaaagaggatggctttggtatgcataacttgtgggatttcttcttgagttctttaacaagagttagttttcaaatattgaaattttttcttctcctcttctgcctattttacagattttaactgtcaaagcaggggaagaggattatcttgatacctcctatcttttgagacaagcatcaccgtatatgaaaatcaagtaatagttgctattatgacctcaaataggaagtctacttttctcgcaagtgctaatgccttcacatttgttgttttatttagatttgataacactgaggaaccttgcaacaagagacagctcaagacatttccaagagctgaaaaaaacaagaagattaaacttagtgctcccaagacttcccaagtaagtttggcttcctctacgcaagttattgtattttctgcaaaactgaatagtaattttctattatgtatataccatttactataaaaaaaaaacgttatgtttgccatctctagattgaagaaaattttcaaggcgagagatgccaaatttctcaggaaggtaggattttgctctgacaatttttccacacttttgactccacggaattttcattggtcgctttctttctgtgatctctcatcttccctgagagacaagaagatgagagatcacagaaaatacctgtttacaaacaagaaagcatatgtctaatacgttttctcatcagtgaatttgcagggaaagaaggctgatccaacagacagatcatctccgaggctggaacatgttgcccaggataaaaatgagcgagagcacatcattatgcggaatttctctaaagtcttatggaatgttttgaagcagtgcaacgagaaactaaaagtaatatcctgactttgcctttcatttgcctctgtttacattgaacagtttgtgattgagcttattttcttgaagctatgatgtgtcacagttgaaatatatctattttttcttctggtttttatcatcttaggttgctgaaggtgaaattttcactctcaaggatagccttcgaagagaacagctaaaatctcttggattggagacagagttgatcagtctcaagtcctcttgtctggcacagccatgtatacctgaggtagaagtcattgtaaatgcaaaagaacactttgaggttgacgcggctttgactaatgaagtaagtttggatatgttttcttcttaatacttcacttctcatacctgccaaagatattcatttctaatcacaaattttcagaggaatgtcgatgacgattcttgcaatcttataaaggccagaagagaagctggagcagaagaatccagcgagactcctgtgcctaaagtggtagtaagtttggaaatgttttcttcttaatacttcacttctcatacctgccaaagatattcatttttaatctcaaattttcagaggaatgtcgatgatgattcttgcaaccttatcaaggcaagaagagaagctggagcagaagaatccagcgagtctcctgtgcttagtgtgctagtaagcttggatatgctttcttcttaatacgtcacttgtcatacgtgccaaagatatttgctttaatcacaaattttcagaggaatgtcgatgatgattcttgcaaccttatcgaggcaagaagagaagctggctcagaagaatccagcaagtctcctgtccctaatgtggtagtaagtttttatatgttttcttcgtaatacttcacttctcatatctgccaaagatatttattgctaaccacatattttcagagaaatgtcgatgttgattcttgcaaccttatcaatcccagaagagaagccagcacagaagaatccagcgagtctcctgtgctaagcaaaaatgtagtacctggctgctatgttgtttactaattatgtcttgggagtatctgcttgttctaaggctgtgcatgtcctaataattgtttgatattaataaccttccatttgtgttttaaggtgaaagatgctgaacttgttccatgtcacttgtcttctgagaatgatgcagagccaagagtaaggcgagttgaagttgatacattctttgtttaattcagaaacttgttcacgaaagcatgtgctttgttgtgtgtttgcacttttcagcaatctgttaattctgaagaaaatgtggggattccttctacgattactcatgttgaagctgaagttaccgactttcaaagagatcaggtatatgatatattctcattcatcgggtcaatccgtgagatacaacaactcacagaacggaatgaactcaaaactgattttcctctaggccatccagaatcaagatgatccaacaccttcaccagaacaagttgaagttagtcaagattgcatcaacagcgggctgtctaacgttcaaacaaaatccgcaatatcccgcagatttccagattcagagaagcaagaaaggttaagagtgatttcatcttcacatacagctctagctctctctctctctctctctctctctctctctctctctctctctctctctctctctctctctcactaaattctttttggttctgttccagaaacagaagactgttgccagcgtcatccaggtcgctaactgaggaaatgaatgacttggagataaaagatatccagactgagaaacaacaggtttggccattctcaatctcttgctcctccacaaaccttgactactcacctcatggcacaaaaatcaaatttcacaatgctccaaaaactgctattacttaattttattctcatttctaggttaaaaccaccaacactcgtgttcaaaagaaagcagtatcaatccaaggtcaggaaactgaagtccctccccgtgaagcagaacctgcatcaactaagaaacagaagaatggacagaaaccaaaaaggttgttcttttgccaatctttatttcttctttctctgtcttttcttttcgggtttacttaaattgaaaacctttgctcttgtatcaggagactccaacctgcttcttctgtgttattaacaagagaaataaacaccttggagatagaggatgatatcgccgagccaaaggtatgaccgaactagacacaaagaagcaaacttcgacaatgttggtaaaaagtttatagatcgaaatcatgtgattaagttgtcaacttcacttgcaggtgaacagaggtggaaagaagacgacagtgtcacaaccgagaagccaagggagtgtcactctcctccgcctcctcacaaacaaccttcatctctaacatccatgaaacaaacttgcattaacatattattgtaccttcttttgtctgtcttgagaaaaatcaaatcctggctgtatatattagcaaagaaaaacttaaatattttcaagtcaagcttttctttaagccgcaatatgaaaaattctgtaattatatttacatttgtggaatcgtttcaagccacattcacttgtcaaagatggtcaaatcctcccaagtcgtaagtcctaacacatacatgttcatagttatacaagttatgtttgcaacgagggggagactacagagacgtagctccacgactcacattgactgtatggttttggttgcttgctacctatgcatgtctctcccacttgtattatgtataaacgggatcttaagttcatgtaagaaaaactaaacaaaagtgcaaatatcatatgaaaaatggataaattatcctcacaagtttattgctgtaagagagacagacaacatagctaaagtttttaaaatggataaattatccgcaaaaggagactcatgttcatttgctataacagcagtaacctgaagagataaaagagtctttgatccttggttcaacgggttttcttcttcgtctttgtctcgacgttgttgttggcaatggcagcagctgcacaaatctttttccagcaacggaaagaaatgagtgaaggtatcaagacccaccaacagttagccccgatgtagtaggagtaatagtagaaagagtttgtggcaaagttgtctccttccaagatagcagtaatgaaataaaccaaacatccgtagagctggcaaaccgaaatcgcaagctgaagcacgtagctatacgacttctccttagcaatggcataactgaatttccatcaacaacaacaaacttcaattactttttagtaaacacaaaaaccaaaatggaaaagaatgaaacttacatagctaggagagaagctgggccaacgataacagcagtgatcccttcaacagatacaactgcagaatctctacctacgtatctcgaatcacctttgctatattctttccctgtgaaagaaacaaactttagcttcttacgaattggtctaattgaacaacaatgacaacactaagaagaagataaaagaacttacaaacttcagcaagataagcagaagtgttgtccttgaaaaactcaggggagaaaacgaaatagccctcgagaataacatgagtgagaccagtgaatgtccaccaacacataagcaacttatcaagtttagctttcttcctccctgaaaccaaccaatcagcaaaattctcagaattgggtcaactttgcagagtaaatagatcaatttttgttacttccatcagttcaatttcaacttaaaacgtttcgagagagatgagggagggggagtgggaaataccgaagagaagccagacgagggagacaacaaggagggaagaaccgaggtagatagagacgatggaggacattgacattgagattggtacgtatccgggtaggttcagatctctcggaacgtacggatgcgccaactcctccatgtttttctcctttctctgtgtgtttttctggtcaacgacccaatgtgagtttgtggaactactagatctgagtgatgatgatgtgcttactactaatctcctcgatcccggcgattcattcaatcaagtgtcttttgtttggtaataaaataattggtgacactaaatcatccgattcttctatatgatgaatttatgagatctttaatcaggaacgtcaggatggccgagtggtctaaggcgccagactcaagttctggtcctcgtaagagggcgtgggttcaaaccccacttctgacattatctttttttttggaaaatttgtccacaccaaggtcaggaatatattcatgttgcttttctatatattagttaaatttagattattggtccatctgttctccactaataaattattctgactctcaagttaataattcgtttgttattttgtttacttatttattttaattatattgttaacatttaattctaattacttaccttaacattaataataattaaatttgttatatttaaagcgtaaatgaaaatgttttttttaattttgtcatcagatattatcaaaatggttattaaaaacaccaaaaaaaaatatttatcgaattagttaaatcaaattaatacactcgaggtaaattgttataaacgtgcgggtattggcctagtttgtattaagacttgtcatgatagcctggcgttcaacctcgtggtggcatataatatcaaaatactttggtctacatttgcaaaaggatagaaagcacgagaggcacatgtgaaaatcaataaggttaatccgggtatccatatcctttctatagccgaactagatccgagtataatttttgccccatctgttctttttttttttctttctaatccattatagaaatgtttccgtttgtttagaagggttataaaaagcttaaaaatgagaattagatttaatagtagctagtgccataataactatggtgacataaagtttgaaaaatatttgaggaaaaacttatgaattttttttggttacatcatttagttaaaggactagttgagcaaaaactaagaaatatttagttttatcatatatttacataatattctaatttctaatgtttttttcttattattatgttcttctataaagaatgaataatctcatattataaatcaagttttgtaaactctgattagtaagcatgattaattataaaaaatgtataatatgaagcatttggtgggtgggtgatattcataaaatcgacaccttttaggcgctggaggagttcgatgataattttatgaatgtagatgaagccgccctacacgatctcataaatagaactatgcctaaagatacggattataaacattgtagttgaatttaaagagtattaataccctacgttgaggaatagcccatgttatgtcgtaaaagaggtgattgtttttgtctttatttgtcatgacgctcaaagtcatttcctttagatgtggtagctggatatcttcattgccagcaatcgcctcactaaacacttgtgtgataatatcgatacccttgtttcagatcgaactctgattatgtacgttttaaatgacttaaattccaaatttgataacaacatcaacatgattaagcatcgccaaccatttccaagctttgatgacgctacaacaatgttgtaataattattaagttatttaaaattaaaatatttctatttttaaataaataaatatatataaatatatatatatatatatatatatatattaaaaaaaattagttaaaaaccaccattgtatattgccaaaattttagttttttaacatcaaaatttttaaaattaattataaaattattcctaaaaactatgtttagacttaagactaatctaaaatactaccaatattaatgctttaatatagcctactttcttgattttccttaagaatggtttaatcattcaacgtttggtcatgtggagtaaaaagttgacattatgtggaaaaactttagaaatatttttactatagtgagaaaaggccttctaaaggcccatacgttcttgtttctgcgcatacgtggcagacactaagacaaataatctctggtcagaagaaccaccacatacgacaaaaagcaagcgagagaagaacgactgtgattgctcgtgatacgccgtgatacgtagatggtgaaccactgctttcgtccagagcaccttcgtagaccatctgcgacgacgtcgtactgccggaacttggacttgtcgtcgtcattgtctctgtgctgtgttcctcagctgattttaggctgcaaataaaggaataagtgaatgaagttagttcccacgtgtctctcttttataggagcctgacaaacaatgtctatcataaaactcttgaaagaaaaacaaaacttgtatagcaaaattaatgattatcaatggaattgagtatctagtaacttcgattatacaacaagcaaaaaaatcctacttatgaaagagtaaatatttcctaatcaccttttaacgaaatgggtgaaagtaaatagaagaagggtattaaaggaattttacctggtgttgggagaaggacagaaagtgatgacgtagttgggagatttcgcgcacgtaaatgtactagacttatcgtcatacgcgtagctataggcgcgtggacacgcgctcttgaagatccgcgagtacgtagacggcttacacgtgtcaggcgatccaaacgcgccgctgcagcaatactccggctgccgaaacgcctcgcacgcacttttacacgccatcgccaccgcctccttcccgtcgacgctattcacccttagctccgacgggcaagatccgtttaaatcgacgacgcagccggtgctgctgcaattctgaccggagccgccttgaggaaccaccagcatctggacattgtagccgtcgacgagactgacatcgtagaaatcgagtcctccggagccatcgagagtgaattcagctaaagtcgcaggaggagcagctccagcgccggagcattcgatttttccggagccgcaatctccggtggcacacgagaattttccatcggaatcggttgagcagagtgttcttccccagaaacgacccccccatgatgacggtgcgttgattgtacgcgtctcgcctttcaggaggacgaagccggtggttggtaatggagaaactccggcgttagatagaattcccggccacactgtgtaatcgcatttgtttgaaaatgtgaagctccttgacataactcctaagattgaaaaaaatgaagaaatttaaaaataattagagtctttaaatatgtgagatcaggcagattcttaccggagaagaacaaattcgataacaagaagaagaaggtcaatgccatgattatgttgaagagaaatctgaacgctctgtttcttcttcttcagggagcgaaacagagaggtataacagagaagtgatttaaagagttaattctgttgacgatctttttattagctacaatcaagtgttgctgtatattggtatgtctgatgacgtggttgaattttagtggatataggatttagccgttgatcaaatggttactgacaaatgagcctctgacaaaaagaaaagagagaataaacattagcctgctagatttctcctttttttggtcggcttcaagaaaaaatctcaaccatactattgtcttcatagaaattgtaaaaatctcaaccatactattgtcttcatagaaattgaaaatatcttcaatcgagattctttttctttttctcatgatattttatggcttggagttggaggtaacattataaccttcatgaattagtagtccaacccaaaatcaactaacgactcaagtattcaagtgtcctaagaaaccattactttgtttaaatagatgcataaaagaataagattggatattgttaaaggattggttagctaccataaaatacagattgctgtcaactgaaggcaattcattaaccatttgtttttttccttatcaattagttaaagaaaatgacattttttttagatggataaatatcaatgtgtcatttaacttaaagcaaaataatgggaagaagtaaatgataatgattaaagaactctttttttagtataacatatctaaaaaacttatcttcaaaatacagaaattcagaagcgaaaattacagttttgttcagctatactttgctacagaaatgtcaaaggctttttgatcagtagacttcaacgttccattgctctgccttcttcaactgcttcttgtaatcaaaccagtcaatacctaaaaccaccacaaagtcattagagtgttattgcttatgcaatgaatgtttcaagaattggagtgttattaattagctcttcttaccgtcatttgcagccaatgagaccataatgtcatcaattcctttctccattcccttgagtccacacatgtaaacaaaagtgttgtctttcttcaacaactcccataactcagctgcgtattgcgccatccgagtctggatatacattttctctcctttatcgttcgcttgttctctgcttatcgcgtaatccaccctgaagttctcgggggcctttgctttcatcttatcaaactcctgattttcaaaacaaaaaaaaaagaggattgattttacttaatgatttggaaggatttgaagaatgaaaccagaagaagagttagcgtgtgtgtgcctcttggtagagcaaagagctagtggttggtacacccaagaacaaccaagctaagccattgaactgcattccaacgattgcaaagatgttagattttaatacattttggtcaaaatcaaaaagataatcatttactttaccttgtagtcatcatgtttctcaaagaacatcttccataagaaagacctgaaaggagcaattcctgtccctgtggcaagctgtggtgttcatgaagaagaaggatgtttactagtgtttaatgatgtttcaagaaacagaacctatagaggtttagtcataagcaagtcaagatatttgaggtttaagggagagaccataataacggtggcgtttggatcctttggcataagcatttctttgcctacaggaccagtcagcttaacatcacttccgggtgccaaatcacctgaaaaataaagtaaaagaaaacacaatagttgaataagtgaataagttataaacttacacaagacttattcattagtacttacacaagaaatttgagcaaactcctttaacagtctctccttggtcattagtataaacaagtcttttaacacacaaagaaacctgaaacaactccttcattcacttaaccagacaaaacaaagcctcgtaaaatttgtaaaggaaatggtttattacggtttcagaattgccgagatctccaagagcgctgcttgcaatggagtaaagtctgaccttgtgaggctttccattcttgtcaattccatctgcaatcacaccaacagattgtccttctctgtacgggatttctcctatcgaagacacataaatgctacttcaattaccatcaagaaaagaatcattataaagtaagaaacatgttgtgagaatcaagtaatggaatcactaccttgatggctgaaaaccatgtgccaggtctctccaggagcatcatcagctgtgattttggtgttgagaaggcattttccagtgtaaggctcttttggtctgtacctgttaacaatcacaccttcctcgttcttctttgacactttctctactttctttgcaggagtaggagtatctgtttctgttgtgatttgtgcttttatggaaaacactcttttacctgtcactacattgttgcttttgtagtaaaaagcacccttttaaacacacccaacaacaaaaccagagagacctaatcaagatcccatcaacagtacattgatcttccaaaagtttttggtcatatttgagaaaacccagaagcacatttatccaaattccaaaactttacttaacatgttacttacaagacccagaagattattagcaaaaccataaaagcagagcatctctagactctcgactacacaactttttttgtgggatcttgactttatcattatccagttgagaaaagcttataaagtaccttagtaaacctgatcctttcaggagcaatggcacaacttgtagcgggaaaagaagaagagtttgaagatgtgagagaaacagcagcattcatggtagtcgccattgcagagcaaatgagatcaaactgagagaaaatatcagaggaatataaaaaggaatcacaaggagaaagataagagaaggattacaagacatttgtgtttgggtggatgaggttttaagaagagagtatctcgttcatcaaagttgtggttatcgttatttgacttgaggaagctatatatctcttttgttttttttcctctaaatatcttgtgtgtataaaatacgaaaatcaactcaaaacataagttttaacacatgttttttttatattaaaaccccataattatattgttttttcattgctttgcacttttttattttccagaactattttaccctcaattaagtttcaaatctcattagacacaatccaattgtatttaaaattttaattataaagcacaccaaaaatatgatgtggtcaagctttatacaagggccctttcctttaaatatactttacaatgttttatttttggacaagatattatcacccataactttcctacctgatcaaaattatatcatattttaccatttcacttttcaatcaatgcctatatatccacatttgcaaaatgatgaatgtatatacaaaattgaagttgtggattgttttgttttagggaatctagtttacatatggagatgatgtcacttccaagagagttggtactatccaacgctctctcttgtttccaagatgtttcgtctatcggttgcatcacctgaactatacgcgagacggtcccttttagactgtcccgaatgctatatctatgttttcatgttgaacctcccagctaaactcagctggtatgttctcgaccggaaaacatcaggtcctagtacagctaagagctaacaatctcttggtggctgttcccttgctccacttacatagttatatgtctctacgttcaagcttagccgtcgttggttcaacaatctttgtcatgagtgcttgtctgtattgctcatggactgcccatctaacatgtgtgccacgcagatgactgtgtctagtagcatagaaaaaacttgtgtgtaccccttgattgtgtcgaataaaacagaaagctcaaagtttacatgaattactaaattgtttctctttaaaatccttaaactatgtaccatatatgcatatgggattaagataattactacgcaataatcgaagtctaattcagggagactaatccaagtaattcacaatcttgattaagagatcattggtagttagaagtttcagtgcataacagtttctcaattggtcaatgtatttactttattgtttcggtcatctccacaaggtcgtcaaaccatatacagatatactataaagtagtataacacaaccaattccataaatctcttttctcaatatgaaaaacgaactagattaactacaaatcaacaagagtttggattaaaacaaaaacaaaggagatttgggaaagaagaaagtttatcatcagagaggagtgatcggtacatcaatcggccacaaaaggcctcagacgaccgtcgtgagaattttagatcaaatctcatcacttgaatttaacttcttcacatcaaaaaatcgattactttagcaaagtaaaacaatatcaaagatgaaagctacaaaaacacgaagaaaaaagagacgaatatagccggcgattatgggtactgaagactagtttgcctttttatataggatgatggagcaaatctagggtttagtttgacaattaaagcatacgacaccgtttatttttaaatgggctcgtctatttatctacatgtctggcccatgtatgactttactagatctagttctgaaattgaaagttataaatttttgtatagattactttcttcttccttatttttaacacacaatttattatatgaaaacaatttaactacattaatgaaaaaaatacaattttttcaataatacaattttgcataacgtgctcccatatctctactctacaactgggaaaaaatatattataaagcttgtttttgtatagacatattcatgtgtatacaacatgtcaacaacatacattggcaatatatgcacatgcatgctccaagttgctaattaaacactgaatctgaaatctgaaattatgccaatctaaaaacctttcggcggtaaattttgagtgaataagacaatgtaaaatgactaagataaaaaagtgttaggtggggtgaaaaaaaacagagaataaaaacctcgcaagcgagggaagtgatgaataacagagacaattggttatattagctgtcactcccatctttcatattccttcaccatctctctctctctcgatcttgtgaaccactacacacactaacacaatgagagagatccttcacattcaaggtggtcaatgcggtaaccagattggttccaagttctgggaagtcatctgcgacgagcacggcatcgattccaccggacgttacagtggagacactgcagatctccagcttgaacgtatcaatgtctattacaatgaagcttcaggtggaagatacgttcctcgtgctgttcttatggatcttgagcctggtactatggatagtatcagatccggaccgtttggtcagatcttccgtcctgataactttgtctttggtcagtctggtgctggtaataattgggctaaaggtcattacactgaaggtgctgaacttattgatgctgttcttgatgttgttcgtaaagaagctgagaactgcgattgccttcaaggtactatatatatctttttctgaattttccattatacgcaaattttctatagtgtttgatgtcgtgcatcataattcgtatatttactggatttagtttgattcaataatcatttcattcgtaatttgtctgacgtcaccgtatcgataatcgtttatcaccatagatctcttcttgtaatatagtatgatatctatctacataattagtaaaattaggtcacggtttagtaagtgtactatagtatgttttttttattctttttttttttactttgatgatcttgtttatctattattggtgtgcatcagtgcatgtgggttcttattcagtaatacgatcaatcaaatcgtcttatttaatgtaattgcaagacagcaacgaaataattgaaatgcaagtgctgttttctgtggagtgggatgttagcacttattattggtagggccaagctgttttgtatagtattgagatatttttttgtcaagtttttttcttcatattaaagcttcagagataagatattatatcattgtgatgtcgtgatcaaaacattttcaaggcaccgtgattacgggataaaagatggagtggtcctactacatcatatagatttcttggaattttgtagtaaaaagttaataaaaatctcttttgcctttagagtttatagataatgcttgtggagcccaaacaacaatctcacgtgattcgtttttttagttacttttggtcaggtctcacgtgattcgttttatacattgattatttaacttcaattataactatgagtctatgactactagtgtgcattgttattattggggagaaatattttttaacgcatattgtagattcattgattattgttttaaagcattgtagattcacataaacattatagttgatttagttagcaaggactagtaacaagatgtttgcttgactatatatgaacactttttcgtctcatcgatggaaccaatactatgtgaatcatggggctgcattattttacagggtttcaggtgtgccattcgttgggaggaggcacaggttcaggaatgggaacactattgatatcgaagatccgagaggagtatccagacagaatgatgctcactttctctgttttcccatctcctaaagtctctgacacagtcgttgagccttacaatgcaactctctctgtccatcagcttgtagagaacgctgatgaatgcatggtcctcgacaatgaagctctctacgatatctgcttccgtaccctcaaactcagcactcctagctgtaagtacacccaattcttatcctccattaacccaaaatgtatttaaaactaattctgatacattgcatgatgatgtagttggagacttgaaccatttgatctccgcaacaatgagcggtgtgacttgctccttaaggttccccggacaactaaactctgacctcaggaaactcgcggtgaacctaatcccattccctcgtctccatttcttcatggtgggttttgcgcccctcacttcccgtggctcgcaacaatacatctcactcaccgttcctgagctgactcaacaaatgtgggactccaaaaacatgatgtgtgcagctgatccacgtcacggacgttacctcacagcctctgctattttcagaggacagatgagcacaaaagaagtcgacgagcaaatcctaaacatacagaacaagaactcgtcttacttcgttgagtggatcccaaacaacgtgaaatccagcgtttgtgatatcccaccaaaggggctcaaaatggcggcgacgtttgtgggtaactcgacgtcgattcaagaaatgttcaggagagtgagtgagcagttcacggctatgtttaggcgtaaagcgtttctgcattggtacacaggagaaggaatggacgaaatggagtttacggaagctgagagcaatatgaatgatttggtcgctgaataccaacagtaccaagatgctactgctgatgaggaaggtgagtatgatgttgaagaagaagaggagggagattatgagacttgatccaccaaatcaaacattttacttaaaagacaaggaaacgactcttggaaatctctctatttaaatttgattgaaaaacattgaaaaaatgggaaatttgtttaaatgtgttttttgtttgagtaatttgttcaaagaaagtttgaagtttccatttattttgggtgtcttgtattttccatttgagataatacgtccttgcttctcaagctactgtgtagtatataaattttacacttctctcaattgtcccacatcgagtaaattagtataaaggaagctaaacttttgcctctataaataaagatacttcatttcccaccgacttttacatttgggcttcttaaaaaataggcttgacaataaatggcctttaacgcaaggtcttgttgttttgctagtagcaacgagcgggttacttgtaactgcaattgtctgaaagatcagccagtgccaaggtacttgtaattacaagtacaaaaaattgatttctttgagttcatgttcatgtcggattttttctagtgtggtcggatgtgcaacaaaaaaattggctgaattttggagttttaagatccaaagatatgtgattttcgttaaggttttattaagaatgaagcattcgaaggatccgtttgaagcagcaatggaggagcaagaggaatcacctgttgaaaccgagcagactcttgaaggagatgagagagctgtgaagaaatgtaaaacgtccgttgttgctgaagcgaagaacaaagatgaagttgagttcaccaaaaacataactggtgctgatcctgtgactagagccaacaagatgcagaagattttatcacaatttacagaggaacaaatgagcagatatgaatctttcagaagatctggttttaagaaatcagacatggagaagttggtacagagaatcacagggggtccgaagatggacgacactatgaacatcgttgtgcgtggtatcgcaaagatgtttgttggcgaccttgtggaaacagctcgagttgttatgagggaaaggaaggaatcaggacctattagaccttgccatatcagagagtcatatcgaagactaaagctccaaggaaaagtgcctcaaagatcagttcaacggctttttcgctagtcagaatgacgaggttacaaagtagtgacatggacgaagagtaactatcatgctctaaaccaaacgtgattaagtctttgcttaataactaaagaagtacacgataagatcagaaacaattggccatctctctcattactcttaaagaattcacctttcaagcattctacaaattgactccctaagaaacgattacaaataacacaatgagatttcagtcttttaattcaacctacttggctctagcctttttagagactctgctagccaaaaaatcatcatctgagtcgtcatcatcagagttcttcttcctcttcttcgtggttggtttcgaatcatttcccttctttttgtttgacaaagcttcagatggcgacttttgtacttccttcttcttcacggtcactgatttggagttgcttcttggagtagaagcagcagattttactggagaacttaattttccacccttttgcagtttcttctcaagaactttctttgctttttcggctggaagcaatccagactccatcaacctgtgatcaaaaccacaaaagggttttcaaataaacaaagcaatctaaaagcaaatattacacataaccatcacagatcatataatcaatgctttgagtgactggtttgaaaggactcccctttcttacatacaatgtgagtccaattatgatgttcaaaatttatgcgaactagcttaaaccgtgtcgcaaaacacaagagaccatcgaaaatcaaacgcaagtatgcatcaagtcccaaaagaataatttaaggtgtaggactcagtttgcagattgagtgatcaaacacaaataatcagatacataccaaacacaaaacattaagtgtaagtgttttaaagttgcagaacaatgtaaggcagagaaaggaatagaagagcttaccaaatctgagccatgtcgctagtgggaatttgtttgtaaagtgactcgtagaaaatcctaagtggatctctctgcagaattgcaaaatcaacaaaagaaattcttcagacgaattcaacaacaaatctaaaaagcagagaaacagagcagcaaaaaaatacctcatcaggctgctctctcttctgaccaggcaaatcatatacttttctttctctctttttctttacttcttcttctttctctggtttcttattctcctataaacaaagagagagactcataatcaaaacaatgcctcatcaaatattttaccatcctcaatatttatactcaaacagagagagaaagaaataaaaatcgaacctttgagacaccaacagaagaattcctcttagaaacaggcttcttctcatcgtctttatcaatctcttccttcttcttcactggcttagctcgagacccagatacagatgacttgataggtttgttatcatcatcatcgtcatcgttctcttctttcttcaatttcttcgaaccagcattgttaccgttcgtgggtttcttcttcgcaaaggaactcaagctcttattgtcttcctcagcctcctctttcatcttcatagctttcacatcctccgaaggtggcatcttcttctaccaaatcaaaaaaagtcgaaacctttgatgaaatttttgtgagagatttgagaagagaaaccgctgtgttcctccgtcaattgtgccctaatccaaaaataagaggaggcttggagacggcgtcgtttaaacccaaaagcaaaatcattccactgaaccggaccgaaatttagcggtttaaagaagaaaccggttaaatacgaaacgtttctgcaataagccatacttgttgtatacagaatcgaagttggatttgaattggtgcgaagcagaaagctcactttcacactcagtgattcgacatacaacaccaataccaagaagcaaatgatcttattcaaaatatcaaatccatacaagagggaattctcagctataaacaaaataaaaccggaaaaaaaatcttcttcaaagccgcttgaaatctttgttgcattggcagatgttccgccattgctgttttcttctttggttaagcttcaagacacaataatacagaggaaataaacacagctgctagatgcaatatgagcttcctaaagaaactaatgtaagagttatactagatgctaatgggtgtggtcactggtcagttgcatgatatacatcaggggcttgatcctaaatacaaataggttacatgcagatttcaataacctaaattctctaataatttatatggctccattagatggagacttcaacttgggaagcctaaaagtcgaagtgaagagctttgggacttctgaaaccgagaccggtgtcatgttcttcgctcttttcctctttgagcttttgcttacctgatcaaaagattcaaaagttaatcaacatgtttctgctgtaagatgatcgaaattaattaaacaatgtatataatccttctgttctctcggctcctaagaatttaaaaacacacagacctcaagcatattcaaatctataccttttcatttgttgttgatgcagcagacttgtctttcttagtagatatatgagatcccaccgtatttccattgctacgcttttcaagtttggtgcatcgagttaaaaccggtgtgaacccacgagacttctttgcagactctagatcccttgtgagttttgagatttcctcatctttcttagtagaattggtctccatttcagccatcttagcctttaaccttgagatagtctcatccttctcttgattagatgactgaagctgctcttgataagatataagactggaaattttcgtattcgcttgaacgatctcatcatctttcctctttaacttatcagtgaattcactctcgatacatttgaactgattccacgcaaacccgttttctcgtaaaagatcagatacctcacatttcttttcagaagcaagcttctcatactcaagtttcagttttctgatttttgcttccaatgacttaatagccgtaccttctgaattgccacttacactctccacctgcacattttatataaaaccaacaagcattgtatgagatcctaaaacaagaaaacacagaagagcttacaaaaattgaaactttcacttacatttgtattcagagtgaggaaatcaaaccaagccttgaagtcttttaactcatccagcgaatgctctgcagtttccaaattggtttcatgaagcttcacatgttgtagaaaacgaaaggaacaaactttattataatctgttaccaaataagccactcacctagtttcaaattgcaaagagaacgatctttctcctttaagccacacaagagattgcttttataggtctccagtaactgaaacatcttagtcgtttcaatttctttcatcatctgaaaacaattgaaaatttcagaggaattaagagcattacacttcaaaattgtttaggagagagcgaaaccctaaaaaacctaactttatctgaaacaaggaatcaaaaagggggtttttaccagagagagttgatcctcgtaatttcgaacatcagagagccaattttcgttattagtcttgatctcactttcaagaatcttcttgtctttgagaagcgactcaagctggtcctgtttcgtctgtaaaatcttgaccaaactcttgaaaatcgtttcccagttttcccgttccgacgaatctccagaaaccgatttcacaaccatctcaaaaaacccaaattcgaattaccaattgaagaagcacacttcacagaagaattttaagaagaagaagaaaaaaattgtagagagagagagagagattttctagagagatataagaccgttagaagaattagaagttgcaagaccagaaaaaaaaaagagagattcggtgcatataaagttttaaagccacacgcgctcttcattgggccgttaatgggctcgttcttcaccacacgatcgatcacacgtgccaaattagttaaactggttttgtaaattctttcgttcaaaccaaaccggtttagtgtaataaatacgatagatgcatcagacaagaagagacgaagccaaagttaacaagaaactatcagtctctcacctaacagcttccacgtgtcttcctcgcgaaagtaatggcattgccattgtatggttgcgttaagaattctacagatcattcattccccaattcaatacgaagacgaagttgtgtgataatcattcattaatcacacatttgatctgagcgagggagagagagaaagagatcttgtccgaacgatgaaggcggagaagaatccgattcagtccgtaatggcgtggattcgccggcaaccgccaaaagtaaaggcttttcttggcgtggtaacggcaatgacggtgcttgttctcctcagggtgattgttcatgaacacgacaatcttttcgtcgcttctgaggctgtacatgccgttggtatcgctgttcttatctataagctcacaaaggagaagacttgtgctggtattaggttttaagaatggcttgattagatttgattctcaaagtatgtgatgggctaatttgtttcattgattttgacattttgaaaattgatgatttaaaacagggatatctctcaagacacaggagctaacggctttgtttctggctgtgagattgtattgtagctttgtaatggagtttgatcttcatacatttcttgattcagctactttggtgaccactctttgggtcgtttatatgatccgtttcaagcttagacctacttatatggaagataaagacaattttgctatctatttcgtcgtaagtttaccaaactctttgttgatagattatgttaaatgtgtttttgagtgttgaacttgtgtaatagaataatgtatgagttcacaatttcaacttggttagtttatatcataaaaagaactttggaacttgtatattgattgttgttgagaatcttcatggcgatgtaatgtttgttttgagagctttactctgatttgcttcaggtaatcccatgtgctgttctgtctttcttcattcatccatcaacacgtcaccacatcataaacaggatttcttgggcattctgtgtttatcttgaagctgtttcagttcttcctcaattaagagtcatgcagaacactaaggtactcgatactactgcgctttaaagccttgagctttttgctaccacagtgctgagtctgaatctttcttgaatgttatgtcttttttcgcagattgtggaaccattcactgcacattacgtatttgctttgggaattgctaggttcttgagttgtgcacactggatccttcaggttctggagtttttatccttgttaggctacacatatctccatattgtaatgtttctaaaaatgatttaaacgcttgtaggtgttggatacgcgagggcggttactgactgcattagggtctggactgtggcctgtaatggtcctcatctctgaaatagtccaaaccttcattcttgcagatttctgctattactatgttcagaggtaaaaaacgtttggtccacgcccattatataatcgcgatattgttgaaatgttttgaatgtctaaagatttagaatttgttctgtttttgggaacagtttaatgggtggacagctcgttcttcgactcccgtctggtgtggtgtaaaaagctctgcgaaaatggagtgcttgagcttgtggagaggtttaatgattagggattttgagacactcgtatgatttaaaagtttttgatagcaaagaagcattaatgttaattcagattttagttgtgatgacgttttgactccacgatcatatgatttgatacacaacgcttacagttacaactcttggtctcttggaatgatagtggaaagaactaaacacaacctgcttcctttaaaattggttggaaacggatcaacaaatataagtctcgatgttctctaacattcatggaagacaacaattgtgaggtccattttggttatttgaactcgagatttactttcagggaaacatgcagagactgtgaatacagattaataagagtttgagcttaagagaagaaaattttgagttatctagaagaagaaaagacatgagatcattatttttctttgaagtttgactaaacgtaaaaacggtcgtgatcatgagcaatccggtcttcactttcttgttgagacttattgaaaaagtctatacaatctgagatagcttcactgtagtgagattgtgaggagtagtatgaattactgcacgatatcttcggcgtctctagcctatcacaaccattgccgaagtcagcggttttgtgaggacgtacggttgcggaggaggaagaaggaagcgcgaagatgatcttcatgaaaattttgcggaatttggagaagagcttcattgatgaagataaacctatgaaggtattgtgattatgatgatggtccaagtaacgatgatgattaaatggttcgtttatatgaatggtgaaggagtgcgagtgtgtgttaggatgagctctctgaaatggtttttgcatagtttggtgtatattataaagtctcttatagcctgtcttgcatgtgttttgtttgattgtgatgctcgtatttatagacttatttatacacattgtaaggggttgttaggagcttttcataatctatattttctttacataaatatttgatattgggttttaaaatattaaaatattgatatttgaaggattaatataaacgttaatgaaaaaagcaagttgagacttgagagaataagtgaaggttgcatgtgaacaaatcatttgtatgggcttcctttgtcttcggcaaagtgaccttttttgtgtatacgaaacttggatatagatgaatatatgtaaggattaatcatgtaacatcttcaggatacattaaataaatttattatgattactttggtagaccaaccaagaaagtactggacaaaaatcatatagatttaaaacaaaaatttgtaaagattcaagagaagggaaaacttttactattttaatttgtagaaaatttagaagtagcttatgttatcgcatggataatgctgaatttaattttaagagaccgaccttcgttgacagtgacgaaacatgatgccgagaattaataaacggttaatcattggctgattatatatgtaattaaggcaaaactaaaagccgaagtactagtaagtataattattatatatggtgttgaaactaagttgtggtcctgcagcttcagatacattgtgcacttgggtttgacctagctagttaattagtgacgaagattaaggaccattccgtagcaaaaaaaaaacttataaaaaaacttataaaaaaaatgaatattgccaagagaacaaaacaagagtttgatttaaaatttgagtatgtttctacaaacaagagcagatgcttttgatgaaatgagtagaggatgaggggtttctaattataagttatacttgttggtacaataacttaagacagttatgattatgtcttctactttaagattaaacaacacctgataatcataactaagttcaattactttatcatttctctgagtttattaagactaattctgtttaattatgtcgaatattaaaataagaccagttcaattggtttcaagtttttggtgtatagaatagtacattcatgattcatatattaataactggttttgtgatttgtgatgaaattagctagagaccctctgagtctgttgatctgctcatatataaatgacaacccaaaatatatttaatggtctataaatttataacaaatttgaggttgctgtctatttaagtccggatggtgacactaaactacatatcctatcattttatctcatcaagcatgaggcctatagataaggggaacatgaattatttagttgaatactggacttgattgttggatagtattatgttgcagtaatttacgtgagaaacgattatattgtacgatttcaaaatgatgattcatgtagtttatagtctgtgagaatataactggggacgtatatgcaaatatttgttgaggatggataagaacaattattatggatcacacaccataaatatttattttctttgaattattttaaactgatcattttatataatattgcacattcttttctgaaaattttaaccatgtttatatttcagacgatactttagcgtcaatttgtcataagattttacttttaacattatttgtaagcgatctcacctacttgactaacattcatattgctaatgatatttgctatatacatcgattcgaaggagaaaccctaattgtttctagaccaaaaataaaatactatcactttttgaggggggttttcggattacagaaggtaaaaatatatatacttcatataatctcataacaatgacgatggtggtggtctaatatatttcttgcttgttatttagacacagttaacatgaaacgatgatcaagcatagtaattaccaccaccatttttcactacacatgatttcttaggtgaaaagagaaagaaagaagaaactattaattgttggtggagtcggatgagatgccgagtactccagcccacacttgcttcctcacctttgatctcctcggctgattcccaaaggagccgccgcttccactgccacttccaccacctcctccgttacaaccgctaccgccggcaattccaccgacagtcgttgttgaagattggccgctagggtcgctcatattttcttgtgctcgtggttgctaagagtgaagagcgctcatacaaagaaaggagaaactaaaaggggataattatagtcgatctcgagagagacacgagaaggaatcttttgtctacatccactctcattttcaacagttttctaataaaaaaagtaataaaatctgtgcattggcatggtaaattgtaacgaccaatgaaatatgtaaaaactattcaagttggtatccctttaacttataattgtggtactacaataagttttggtataatcttattgtcgaggtgggatctaacggtggatatgatcagaaacgccatgtgttacttactcactagtcactagtcactacgaatatatgaatatcttttgcaacaacattatttatttattatgcagccgccacacaatcaacctacaccactcactgactcacaccaccattattgaggccttcactcgtcagcaagacgcatgcattttgacgtcattagtagctaactatctttatccattttcttacaaaaatgtattaatatgtcaaataccgacataagtttcttaaaaagataataagtatataaatatcaaaatggcgaaaacataaacaaaaaaaatgtcaaaattcaaacgtgatcggacaaaatatctatagagaaaacggatgtcgaatttcaacgatacttgtgaaacatcaagttgaagtccatatattatatataaatagctgaaactaatagcgggattaacgtataacaaattttgacaaacatatagtaattttatgtggcaagtttctgttaaaaatacgactgaaaatggattaaaaacgctaagtttcaaatattaaggacgcagtttaatttcagaaaattggatcacaagacattttcatcccaattacgtaaaaaaatttccttatttacaatttttgtcatgttagacatttaaaaaaaaaaattagtttttatttagttaacttaactacagaaaatgtattcctcataatgtaattctttttgcaatcagcggtaggcgtgtttgtgagtttaatcgtttatgatgggttatttactaatttttaatgggctagcaatcaacaatcaaaagaataagcccaaatatatgaactggcccaacaaacgtattaacaagagttatatatcacttgatcggatgtacaaacaactaatccgctgtagcacttcaggctatcttcaaatcatgaaatattccgggttcaaagcccggcagcggaatacttttttcttttttgggaagttatgtttctctacattttgagtcttttgacttcgcaaatcattggagaaaggcagaattttgatccttgtgtatataaaaactttttttgtggttttactcagctaaggacagatcaacatccaatattagtctgaagtctgaaatttacatcggactaaaaacaacaaataaccaaataaaaaccattattgctgttttaaagagaaaccaatcaaaaggggttagagatttaaaattatgtgttccccttttcttttttaatcattctcttagcgcggtgctcccgcagaacgagcttttctcagactcccacgagtgatccttagtgtttcctccattatagtctctttcgacgatgacgctcgctgaatctcagacgctggttctggtaaagctgcgacagtctgtgacgcttcttctgcctctgttggtgatggctgtgctggatcagcgtttcgtttcgcggcggttgtgggcgatggtggcggtggtggtggtggtggtggtggtcctggtggagttagagtagtgagtttggtttgtgacacgcttgcttttgcttccttggtctctgtttgtagttgttgttgcttacgtggggatgaaagaggctttggtgatataggttctttggttacaagctgtggtttcttcgattgcagacgcacttgaggattagaagaagctgcttggctcgtcgccttaagatccggttgtttctgttcttcctcttctggtgctgctgcctgcttcttttcctaatgaaaattagaatcaagacaaatccatcaaacaatatcactattgtgcaaggagaaacttgttaaatgatcctctagtgagcatgtaagaagttgaaaagcgaaagatccatgattagcatttcatggtatttgttaggtgcataatattaccttaggcttaggttttggtgttgactggagagctacaaaatgcaggatctctacgattcttgtttgtccatagctcactgcttttctgcagtatatcactgccagatccccagctttggtccttagctcaatcaagctgcggtcgatttcattttcatgctttgcaacatatggctgaaagaatgaatcgtacacgtatgtagttccctgtggaaagaaaggaaagtgcagtgagatagaacgaactccaatggatcacatatatacagatactaactaactctcttttagctgctactagagtttacttactctggtcttggggaaccaaagatatatgaaaaatgccagttttgcctcacagtatagtggaacccttcatgacaacaggacacaaacaaagtaagtctacataatatatctcaattcatttgaaaggtacattcctgtatcaataataccaaccatgaagcaagagcatcgccaactctttcgaaaattgtcaaagcagccaccaaaatcctgcaacaagtttcaagaagaaagctaaactttacaagagaaaactcaaggcataaactcaagataagaacagatgaaaaagccaaacatcacaaaccagtattggcaccagaatcgaagctgttgcatctcaggcttattcttttcaaccgctttgtaacattcataagcaggatacgcatatccaaataccattctgccaacaaatgaaacacaaacaaaatccgtaaattctttgatcaaactaatactttagaacctcaaaatgaagagattagagtcttacactagtcctcttgttagaaacgatccaatcattttgcacacctgataaagagcaacaacaagactgtcttaaaacaatatcatcaaaccacagattattatgatgtacaactttatagactaagaaaaccttcaaagaaatgtgaagaacagaacaacaaagatgcgagtaaacaaattcaactaacaagaatcaatactgaagaaatcaatcaatgaacgaaaccctactatgtggttcctccacttaatgctcataaagctggatcatctaatgctctcaaccaactacacatactactgaagaaatcaactatcctttgcttctacaggtaaaatgagattagtgtcggcgacgagaagatgactagagcaaattcaaatgtggtgacataagaaacaataacaaaggattcaagtgaacaagatttaacttcgatttatatgaataattctcagagtcctcgaccttcgaattcgaatttgaaatcgaagttacgaatctagagaagatgcacaaatttgaaatcggactatgaaagtgaaacaaccgagtaaaaaactgaagtcacaataatgcatttgacacagaaattcaaacaagtgagattgacacagagctcagatcaatcgctaattgaagacgaaactgtggaatcgatttctagactactttaacgaaatgaaaaatacctttctgagtagaagaagctttcggaaagtgaatgagaatgtaatcgaatcggaatacttcaaattgacttggagagaaacgatatcgaaccgacggtggagtgaataggttgatcggcgtaatgtggccggagaccgttacgcagacggcggcgagagcgagagagcggggaaagagacaaacgtaaatgagtgaaataaaaaaaaagctaagcaaaaagtaaaatactaatataaaattgaaattttgatgtggcttttacttggagaaaaccagcggttgtttcacaagtcactgttttggctttttggtttcgttacgagtccttttcaaatatttactttctttcaaggggttaaataatcctgtgtgttatgaactagcgtagactacgatttttagaggttgatcttcttgtgatttgaaatggacggttaggatctctgatatttgggattcaaagaatgagtctagtgtactcactttgtagcttatcgttactgctcttgaatccaacttatgatccaagcttttcttgtgaaatatgtggtggaattttttgtacttatactaatttgatcatcttcctattcattggtattgattttcttaatttgattggtaattacaatattttcccctaaaatataattaataagaatggctatatttgttcataaatttataacaaaaatggtagcttttcttttcatgaattcaagcttttcttctgaatatgtggtggaattttctgtacttttgctaatttgatcatctttctattcattgattttcttaatttgattggtaattacagcattttccccctaaaatatagttaataatcttcacattaaaaccaaaataatatatatatatatagttaataagaatggctaaatttgttcaaaaatttataaaaatggtagcttttctttagatgaaatctctgtaactttttcaattattttacccatttgatccttttttccattggattctttttcaagtgatacatcattttatacaataataaataagtaagactatatttaaccaaaaatcacggctatatttgtctataagattatgacaaataatttggaaaactggatgtacaaataacattgttaacttcttatgaaaattttgcaaaaggctaaagaattactgtcttatgaaaataagactttggtttcatgttctataaagttaactacttatgctgttatgcatcatgatgataaaacatgttagttatatgagtagaaagaaacataatatgggcatatacttatgtcctttctcaaattatgaagcagtgaattgctttcacgcccatagcaaattccacaaccatagggacacacttatttctgatttcgatcggttaaacaaagttgcatcaaaactactcggttaaacccattcataccaatattttcataacattttcatcgttagataataatacaaagccaaaccgggaaaagattggtcgacaaaaagaggatgaggggtattgctttgaattattaaagcaaagtaaaagtaacacagaactgaaacaccaacgtctatattggtgatcggtagatattcacaacaacttcacaatgacccactcaatgtaaaaatatggggccaaattttaaatggcgttgaagaattcattttcagatgtcgattatattcaaagaaaaaaaacaattctactaaaactcaatctctctttttttgttgttttcttttggtttcacagatttgcattcattcatattttgggagaaggtgccgaagagaaggcgttggaacttggaacttagtggaatgatgcgggaagatggaatgtattagctaaggcttcaccgtatgatgggcaattcgctgatcctcgatggtctactgtggaatccttagacttcagtcttccataacacaagtaagttgattttttcggagactggtacagtatgtgttattataagttattgaacacaaacacatattgaagagaccaaagttattataggagtaaaccataaaattttataggttgtattctaatattctttaagaaccagtaagaaataaatgatgatactttgctaaaagataataagcttctatcatcaaacatgtagtaagtagggggaatattataacagcttggtaccaaaaaataaaagattatgtacagcaaaacatatgttcaaaacaaacaaaacgacttaataggaatttggttacaaattaagacttaaatccatttgtcacaagctccttggttttatcattgtagtctccagacgagaaataaagcaatcatatgatatagttacttatctttctttaaaacttcaaggataagcttaaggagtttgtaaccaatgagtttaagtccaatatgttatcacttcatgtaagtcttttggtttgctttaaatagtatgtttagttgtatacaattttatgtgagaagccacagtagagaaggcactggaacttattagaggtgacgtgggaggatggaaatggaatattgtagatgataaggttatgccgccgccatgcacaacaataagatgttgctccccagtcaccatgtacgtaaatttgctcttgatgatttggttcaatcttatttgtaaaaaaattaaacctctcactaattttcgttgagaagtatataagatgactacggagtagattataacaaacttacaaatttgatttttccacataagattatatacagcgaaacatgtattcaaatgaccgaaaaatcttacaggaagtggtaatagattaaactaaacttaaacctatttgtcacaattttccttaaaacttcaaaaataagtttaaagagtttgtaaccaatgggttaaagtccaatctgttatctcttccatgtaagattttttgtttgctttgaatagtatgtttagttaattagttgtatattatcttatgggagaaggcactgaaactcagtatgtgtgacaaaatattatggttgttaatattatgccgccgccaggcacaataataagatgttgctcttgattcttggttctttcgttttttgtgacaaattaaaacctcttactaaactctttggtgtttaacttgtgatacaatgcaacttctatttttttaaaaaatattacttcagtttttctttcgttcttgtctacatgttaaaactaagcacaataatcatcatctgtgttcattattatccaagagtatgagccgcgtacgattcgcataaacaaagtaagctcattaatcatcatctaatcaatttcatcgatttatctggaaaccaatctcactctagaacaaacaataaactctatttggatcaacaaattgtactataatgctatgttaagtattacgaatttgtaattcaaaattaattagcaaaaagtgaacttggaatcttggcacaatttggtgtccaaatttttgtcacgtggcagataattaaaaaaaaactgccttaatgggccgaaattaagtgatctgacccattaaatccgtaactagcccgtgagtttatatgacatcacttatcactcttatcatattgaatttttctttagtcacaatcaaatacaaaatttattttcaaagactatcacaatcctagtatctagtttataatctgaatattggtatatttataggaagtaaatatctgtttcccataacaattaaataaaagacgtggttgttggagttgactaatgaatgattcgtaatgaattttacaggtaagtattacccaaaaaaggattaaacatcaccacaactaccaatagggaccttgtactctccacattgcttccttcccaggcaaggttacttccgtaattacgaaaacaccataaaagaaacagatctcgtcccgcgttggtttgattgatcagtgtcggtgtcctaatcacaatttccttatttagacaaaatctgttacttccctctcttgaatcgtcgtcattctcgaatctctagatctagccaaaacttttgccatctctaaaatgtatctccattgacattttgagatctatctagctctgtttttctttttagaacaaaatggtggcgaaaccaaggtcaagatgttgttgttgtagtgtgttcatcggcgttatcatcttaatcgctataatcatcgctgtcattttcacaatcagacatagatcaaaccactccgatgatgatggctccaatgttaaaaactacgctaatgctctcaagatcgctatgcaattcttcgatatccagaaatgtaaacgattcttcaatgagattatttgtttatgcttttgtcacaaattaatttcatgttttttgatgtagctggtaagcttgaaaacaacgagatatcatggagaggagattcaggtcttaaagatggaagcgaagcaagtatcgatctttcgaaaggtttgtacgatgctggagatcacatgaagtttggtttcccaatggctttcactgctacagttctctcatggtccattcttgaatacggtgatcaaatggcttctctgaacttactggatcatgctaaagactctctcaaatggactactgattttctcatcaatgctcatccttctccaaatgtcctctatattcaggtacacggtagtgatcaaacacacaaatctttcataagttctcaagttatattactgactttaacattgtaggtgggagatccagtgacggatcataaatgttgggatagaccagaaacaatgactagaaagagaactcttactaagattgatacaaagactccagggactgaggttgctgcagagacagcagcagctatggctgcagcatctttagtctttaaagaaagtgataccaagtattcaagcacgcttttgaaacatgcgaagcagttgttcgattttgcggataataacagaggatcttacagtgttaatatacctgaggttcagtcttattataactcaactggttatggagatgagcttctttgggcagcttcatggttgtaccatgcaacagaggatcaaacatatcttgactttgtgtcggaaaatggtgaagagtttggtaattttggaagtccatcatggtttagttgggacaacaagctt

SEQ ID NO: 1138 - DNA, 53889 bp, Arabidopsis thaliana
gagctggatgatcttgacgagcagacttctctcgacgagctgacttgtatcgatgagctggctcttccgggcgaactggctgatctgggcgagctgacttgtgctatcctttctccaggtcccgaaaaacgtcccttctcccgagactttctattccttatttatacccgtccgtatagtagggtacgcaaggtgaattcccaagagtgccccccttttctacgcagctgaactcacatcctgaccaggccgggcttcggcctgctgggccggctcgagttctaaagtgatggtcgggctgggtcgttattccttgaaatgggccggttgatcactgaggcccaattgatgtatcaacaggttgtttccgataaactacacagtttccatgtcgcatatgcatacgattttgaatctcttggacaataatatcgtggatttagagattagattaaaactcaaagatacttttactctagtacattttctttataaaagaggagggactgtataattataatatagtagctctctctaaaacataacaagaaagaaaagctaatctctttgtgtaaattctagtcgatccatgaagcatccaccatcttcgccatgaacgaatatctatcagccgcttcatcaatctgttgcagctcacaaacattacactccaagcatttatattgtacaaaaacatttaacagagaagtcttatgtttagatagttaccatcttttgcgttggacgtcctgctccatgcccggcttttacttctattcgagcaattatagggttcgtctgtggactattctctaaactcaaacctaattcatattgcattgtctgcgaaagcgaaatcgggtttcaatggaagatgaagaagaagaagaggaagatacaaaatgcaaacaagaggttgagagaccaaccgcaagcaacttgtaagaatgaagtgggacgactctatcgtcatgatcagcagttaacaacatggttgatgggtactgaaaaaacagatctgtcttctgttcccatggcctcttcacattatgcagaggcgaataccttatttttacagattaaaaccatcagataaatctaccaaaagagagaagctttatggtgatcctaaataaaagacttactttatcagccaatggaactcctcttccttgtcagaacaaccaaattcagaagtccaagcatgtcctatggtaaacttgtgaaaccggagcatgtccatgaccccaacatgagccagagcacacccaaagagatccggtctctgcagtaaaaggtgtaaattttttattatgtaactatgtgattgctattttcatgagctaaatatttactactctgtttacctgattaatgcaagcccctactagaataccaccgttactaccaccttcgatacaaagtttcctcggttgtgtataaccagctgaaaccagatactcagccccggagatgaaatcatcgaagcaattctgcttattggcaagagcaccagatttatgccattcctcaccatactcaccaccaccacggatgtttgcaaaacagaacacggtaccaagatgcctaccaagcacaatacgggtcgcgctgaaaaacggcgtcatgcttatgctaaaccctccatatgcatagagcaaacatgggtgtgatccatctagctttatatcttttctagccactataaacatcggtatatctgttccgtccttactcggataaaagacctataaaacataatcatgaaaataggaactcaaaaataatgtttgtattgcagattcagtactttgtaatggagaaagcatatacatacctgagtgacttgaaatgcagttctatcgaatccaggtacaccgatttcacgaaataccgttacttctggagcttcatgggataagtcacatatgtaaatgacgccaggtgtaaggaagcttgtgaacctaaagaaaaacgtggtgtctttacgccgagcaaaaactccacataccgagccaatatctacaggtaatccatgaagcaaggaaccggatttcaagtccctaatctgcaggatgtgttttacatcactcatgtagctaacaaccagttggtctccattaactgcagaagctgttgagagaacatccttttcatgttcagcgataacatcagtccaactgctcggttccttcaagtcaacccgaactactttgtactttggggcatctttgttggttaagaaagtaaacaatgtctcgtcgtttgcgatagcaatgtattgtgcgtcaaaagtgtcaataagcttaacaaatggaagtaaagtgttgcttcctctaaaaccttctagacctttaggaagtaatgagagatcacaatgataaaccttgtttacagggtcacaaccttcttcaattgacatgattaagtactgcattggaaaggaaaaaataacataatggttggatcaaaactcaaacccaaatcttagactttctgcatcataagactaactttaagtgaaaccatcaccaagagaaatgagaaaagagctagcttttaccttcccatcatcagtgactttggatccgaacatatgtttgggattatcttggtctctccaacacaaaacatcttcggattgatcagtcccaaggaaatggtagtataactcatggtaaaggttagaattagtctctgtaccagcatctatcttctctccctctctacagaaacaaaaccaaaatcagaaaacagtaataaaaactcaaacttttgaaacaaattcctcagcttttacaccaaaaagtttcacagttagttaaaccaaagactcaccgtggagctggatagcgactgtagaaaaaacctttcccatcatgtgtccatgtgatcccactaaacttaacctgatttcagaacaagtttcatgtcaatgtcaataatgaaacttcaaactaacgagtaattcaacttgaagacgccttacccaagataaagaatcaggttccactttcttatcttcaatcttcatcactttaatagtaacccaatcactaccactagagctaaggccataagccaaatacttagcatcctcactaatagataaagtgtttaaagaaactgttccatcatcactaagagtattaggatcaagcaagatctctgcttcagactccaaatcatccttcaaatgaaaaaaaaaaaaaattcaaatcaaaaacccacttaaagaagattatactctgcttcaaattacctgaacatgaagcacactctgagcttgaagacctgagttatggaagtaaaagtagctgttccctcgcttaaagggcgtatcgaaacgaggataatcaataaactttgtgaatttgtcatgaagcttttccttcgtttcgcaacttttgagcactgaatctgacaattgcacttgcttctctacaaattctttcacttcttcagcgtcaggatcttccaacctaccaagagaaccgaatcaattatcttaaactgaattctaaccaaaccaatatacgattgtaccaaaccgggacacaaaaaagttaatgagcaaacaaacaaaaattggtccagaaattagcctactggtccagtaagatcaataatgggccaaaaaaaaatcgatagagctggtccaaaaaaggctcgttatgctattggtcatgagctaaaaatctttcattacgataaaacagcagaaatttcagaaagctctccggtaataaaaatctccgtcaactcaaccaacatgtcaacaacgttatcatacaaaacaaacaaacaaacaagtgtagctagttacagctgagaacgtaaacgctttttaccagcggtaaggatcggagactttaacgccgtgataatcttcaacgacggactcatcacgcctcgccgttggatactgcaaccgctcttcaaacgcagggagagatcccattctatctattagctaaccttaaatttccgacaagaaaacctaaaaagacttgacgaagtagttggcgttaagttttgtggagtctaacggaaaaaataataacccgtgttgatagggtatttatagggacattaaaaaaaaaaaaggaaacatggagaaatggaaattaagagcgcgcgtgacagatatgcattgagtctctcgttatgtcgaaatagtttcgtgcatctgtcgacattgttttgttatgttgccatttttaatcagttttgtaatttacactaaccttcttttttggaccatttttgtttttcaaaccaaaatggcatcttcactttttattttattttctatacttgtattcttccatttgtttcgtacaaagaaaataaaatttgtgtttcgtatgatattgttgatttcttgtattaccaaaaaaaattcatgtatagagaatgtatttgataatttgaagattctattatagaaagtacttaaaataggacttttaaaaaaggataagagaggacttaaaacgtaaaagttaatattatgtcgttaaagaaattggtttttttcactttgatttctggtgactctaaaaccaactaaaacatctgtcaacacagttgactagtcaacggatgtggtaaccagctagctagcgaatccatgatcgtcgtgagagtgagtcagccgaaacctgctactataatagaaagtaaattcattcaaccatattatgctatgtttagccgccccaatcccattattatagactagtccattgtgtaatctttaaatggtttccatttttgtatcggttattttattattgattcgatccacagtttcttttggggaaaactaaaaatttattcagttttatatcgtataatttggggaaatggttgttttgtttgttctcttttctcatatgataaatcacaagtatatatacacttaactgatgtttgtctaagccagtaatctataaagcgatttcaatctcaaataatgttagatgagtgggcgagtgatatagtctcgtaagctacttttatttgtttttgtatttcaagtttttcttaagagtcactaaattcatcagataagacaaatttagtttcacgtgtgatagattcgcatatcctctgatgctttattgaatacttttcgtacttcttgtatacaaaaatcgaattaaagtataaatgcatgtagaataatgttgttatacatggcatccattacacattaagaatgggacaatatttttgtaaaaagttagcacaactaatattctgacaaccaaattcttatatctaaccattattactgttctgaatgaaataaatttattaaaaaccattttcattattaaaataacaccattactagcctatggataatgaatagagtttctgatatataccaaactatgattcccaacaacaacaaaattagaatagtacagtcatcactcatcaggatgcgtatgtatgtcgggcttgaagcccatacataatacctgattgaagcccattttccggataaccatgtaactatgtaagcttgattgctcccgcaaggccgcaacgaagtttaatttgatagtccacaaatgagttattgtagattatagatagagtcgataaccttttctaaaaccaaattttcattattattttttaatcaactcaactagaagtctagaatgaaaactaatgcattaatatctcatgcacagattaacattgtggcctttaacttaatttctttttggttttgtttttcgtctatatttaagaatgttgtaatagctaaaactgagtacttttttcagtcaggagaattttaaactttaattaatactagtatcaaaaactgtagcaacccggatttcatcttaagaaaacgtctagagaggtggaagtattatgtagagcaaactttacaagactttgaaaatcatcgaacggttaccaaaatcttttatgtaaaccctataattcatgaatattcattaaatccaaactgttgtccctcacaagtcacaaatcgtgagattgttgaatacattacataatacccatttacaacatttgtagaaaagatgagagtcatgagacaacaaacattaataatttgggattatgtggcttgataagtgagtatcctttatgatattatcacagcattcttcacctattccttgatcaagtgggagagaccgagagagtatcatcctctgattatgtacgaatttctataggctctgggtattcacaaaccttcgtgccaaatgaaaacattatgataacagaatctctctcatatattggagcttcatgcaaattaaactatagcaactcttcgttccttgatatataggataaaacatcagatatatatgtgagtatatttattgatctggagaacataattatcttattaattggaaagctcctaacttagttacttagaacattttttttcttgcatgcgcagctgattatatacttcgaacattatcgaaatacaaagtgttcagatttatgatctaataattttctaagtactaacgtaaaaccagatcaaatgccaaacttaaagcactgataagtgataaccaccatttactaaccagaatagtaattaactatcataaaatgtgatacatgcatacccaaataactatgatcaacgaacaaatcttcgtggaaactcaaaacatatatgaattattttcaattcatactcaaaataaagcaagtaatttatgatctttgtgtaaataggtcagaaatgataccaaatgaaggagtacacgtaatctctactactgtttcttcaacttcatatagaataagggaacatcataataacatcgtggacttcaaaacaagatgcgtctcctttcccacattaccatttctcaaagtaaaacaaaacctttgttacctttttgaaattctgggtccttctctttttcttactggtttacctttttctagaagaccatatagtccaaaggctacacactataaatgaggaaaatcgaaggttatacatggctttaaaaaaaaaaaaaaaaaacatgtaacataatcaagaaacgaaatgaagagctcaacataaagaaacagtgaaggatcaatattagaaacgaactttatatatgaaatcaaacaaaaagaatcgagagaatcaaagatgtgagaatcaagaaaatggttaatcgtaaaattaccctagatcgaggctcttcatcgccaagaaacaaatcaagatcgtcaaattcaagacattgataaacttgtatatagatcaagagggttttacgaagaagccctaacagatctctattggcagtatacccacctccttctttcacacgaaacgcatatatatatacacatgcatatatgtatagaaggaggtggacagaatgccaaagatgactgtaagaaaatctttgtcaaaccctcatgaaaaggaacaaaagtttaaagatccaatctattttactgtgttcttgaaggaaaccctctcataaaattggagagacataaaggagtttgcgatagattgaatagtgataggagagaaggacggtggtgatatttattggtattgagagagaggcagatgagttctctttatgacgggctatataagcttggcttaaaaccctagatgattgtgatggaataagagaagagattgaaaggattcggattttaatagacctcagatctaacaacatcaacacataaaagtggaagagagagattagaaaagaagtgttttttttttgggtttttgttttgttaattacctcactagaaatagttagaaactttccaacggggttcatctttgcgcctaccgtttccgtttgcttttctttattttctcagcctttttccccggataaagaagcgttgacgttggccaatatctacagagtataacccaaaatacaataaataaataaataaataactaacaacagaaaatataaatatgagactttgtattattttttatttctttgataaaagagcatttgtaatttgaataataaagtatcaccttctgcatatttttcttcgtatgacttagtttatttctaaggatatagtactagactaagaatgggttttgtttttggctgaaaacaattgcagcaagttaattttcgtactcgttttataccaactcattgttaagagcagaaacaaaaaaaaaattgttggaacttgatcgtcttgtaatgattgtttttgttgttcatatgtaactttcttgatatatttatcatatattcatatttattagctacaaaaacgttacgaactaacaaaaatatatattagtatacaagcatgcaccatgcatgttgtcacgttgatcactacaaccgttactaataaatagattatttaaaatgattaatagtaacgtaaaaatcccaaattacggtaccgatcgatttgtatcagtccagtgtccacgtacacgttgcaaatttatatcagtgcaaaaagaaacggatgatgaatttaaattttaaatttatttattaatagttgacagcgttttttaataaatagttatgatagtataatatttcgaatgatcacgttgatgtgaatataacaatttcttcacttctggtttatacgacggtgcgcgagacaacttccaattaatgggtccatttactaatccactagaggcagtggattacagaatccaaggctcggggtaaaaatgaataacaacagtaagtaagacgtctaaagtttgaacatatatgacttaaacccatcaactatctctaagggctaaataaagtaagactaagatctttggagttaaaaagggttcatcacttctctctttttcttgacatggccagtctctaatattacaataaatggaatacacataattgtttgatacattatagattagcaataggaatttaaacatctttccctacagtcaattgatatgtcgcactcatcactcccacgaccttcataatcacctttatgctcctagacaaaattgcttcgacaaatccctactttttgtttagttttgagttttgagtgaagaaaaggaacaaacttccataaaagtggagttagtattgtcataaatccgtttgaacaataatagctgaccccttcaagatattaattgcaccaactcataataatacgtacttcctcactatttactgcctgaaatctacccaccccctatttttggccgtcaacacctcatactctctcaaattttcacaactgacaaaaaaagagttaattctaaacattgataatttttcatataaagatttaaagttcttttttttctataataaatatttaacgttcacaaccaaatttaaatcaaattcctttttttactaggattagcgaggatgaaagtttcgcggcttgcactttgtcggattcattcgactacgataacttgggtttttttttttttttttttttttttttttttttttttaaacttggccatttgaaaaacaaaacattcaagtagaagtaggttatagactcatcgtagtaatatcgtctgcccatttattttatttttgacatatatgcattaggtttatggccaatgggtttgatatttatttgcattcaatgataatgaaagtaaaaactgatatagcggatttgtcggattgtgaagatgtcagtgctatgattgaaccatttaataaaagtctcaaatttctgctttccagagcattacaggctattggattcaacttctgtattgtaaggtttagttttatattcaaaaaacaaaattaacaaatgtgaaaatgtgttcttttaattttaacaccgttctctatttatcagtactattatatacggtttacatacaaaatagttaggatcagtcaaatacaaacggttacatgaaacttcataagcaatgttaaattatgatttcctataaaatattttacttgctaacgaatattcaaatttttaagttttaatttttctactcgatttgcaatctttttttgcctatcatctacttcatgacgttctaatattttcttcacattacaaactgtattgtaattgttttgataacttcaactttctcacaaataactgataccacgatgatcaaaactcgagtaagaattaatcaatcttgttgctgtcataattttgataaaacattttaggtagagcttcgatgtaaccataaaattctctcgttgaaaaattatgtggtatctttttacgttattgacctacttagccatcgtttgttgaagacaatgtgtccctcattgtgagtgagactgtgattttcgggtagaatgatttcaagcaaaacttccataagagcatcaacataattgttgtggatgtcaaatttatatgttcatttctttactttatgcactttgaacgtaaaaacccaatgtcccacattgacataaatcggaccacatgaatatgagaatctaactgtatgtaaatatagtctttatttttttttgtatggttacaggtcaatataaagaatagctagtcttaaatttatcatatctagctttcttgttatgaaaatttataatttgacaacgcaaactgtttgtaatacttcaaaccttgaaacatcctgtaggagtaaaggttcaatttcttcgattcaatatactaggtacattgcggtaaaaaggttggcaaaaagtggattaaatactaataagaacaattataagtcgcccgcgcaaatcataattatgttttggcaaatttattcccttcttgtcaccttttccttgtgcatgcgtagacactctctcatgcatatcatcatcattatcgtcatgtactattatttttttgtgtgtgtattaattcaaatctccgcaagaacatttgattacaatggtatatttgttatatactccaatttatttatgaaaattttaaaataacttgttacggtccaattgcaaacttcttacatacaaaaaaaaaaaatcagaaaaaatatattttgaaaactttactcaattggcatgttacttcaaaatagttatatttgcatccaaattctttgtttttgtatgttcaacatgtttgtggttgatcatattctacaaacaataagttgatttttttttttttttacttgggaaaatctatgtgggattccatgattacaaatcttttagggcagcatatcacgtgatgcagaaggtatttaatgaataacttgatttgttctttatgcagttgccgagaatttattgacatttttaattcatatttattattaaaaaaatacaattcgtatagaatgacgattgcagaaacataaaaacgtagaaaataaagggttgaagagacagtgttgggttgggtcgaacgtcaagtgataggatgtcacaaaagattggctttttgctatatgatttcaaaacatgaatcatgaagtcccatgactatatattattcacatcacctacctttgggtatcctttacccttttaggcttttactcctgtattatgttttcattttctaacatctaaaatgcaactggtcgaactacgagtcatgtctacgatggtagatagatagtgcaactatttcaagcttcgacttaaaaattctaactgaaatttggtcaacaaatttggtgaagcataagtggaaactttagagagaaaaatcccaacaaatgtcaaatgggttaatcagtggtacaaatagtgcggtctatacaaaaagaaatattatgaactcaaataacttaggtgtcgattgttttaaaattatttgggcttaaaggcccaatattactcaggataataaatggatattataccttataagccccagttattaattgcgctttaattgtaatacgacgtcgtagagaaggaactcgttcgtcatctaagccaaggactagggttctctgagggtacagaactaaacttaatccgttaatcgtagcaaagaactacactcagtggtgaaaatggagaatcaagagcctgatatcgagaaattgcctcgagacgatgttcctgatagagaaccagaccataagaagctcaagatttcgaccaccggccaggaaactgattcctcggctgttaccaccggcggaagcaatgtcgctgagcgtagagcgccgaaatacagacgccggaaagtcgcaatcgtgtttgcgttctgcggagtagggtatcagggaatgcaaaagaatcccggcgccaaaaccattgaaggcgagctcgaagaggctttgttccatgccggagcagtacctgatgctgatcggaacaaaccaagaaattacgaatgggcacgatccgctagaactgataaaggagtgagtgcggtgggacaagtggtttctggtcgtttctatgttgatccgcctggatttgtggagcggctcaattcgaagctccctgatcagattcgtgtgtttgggtacaagcgtgttgcaccgtcgtttagctccaaaaaattctgtgatcggaggaggtatgtgtatctaatcccggtttttgctttggatccatgcgtacatggtgaagctgagatggttagaacggatttaggttacgaatatgtcaaatgtgtagagtgctctgagaaaggctataagattccacttggtgttatgggtaaagacactgattgttgtgatacaaaatcattggagattcagtcagacatttcgtcgagcacctgtgatgcaataggagctgatgtcaagtgtgaaactttgagctctagtgtacctagtgcagaaaataacttaaactcagaagttctagatggggctgatgtatctgctttaagctctaaagcagagggtatggaagaatcgaatactttggctaaggtagagatgaacaatggggaaggagaagacatgactaaaagcgagagcaagttctgttatggagagaaggaaaaggagaggtttaacagaatactaagctattatgttggttcacataacttccacaacttcaccaccagaacgaaagcagcagacccagctgcgaatcgttacattctctctttcaatgcaaacacagtgattaatctcgatggaaaagattttgtcaaatgtgaagttgttggacagagcttcatgcttcatcaaatccggaaaatgattggacttgctgttgctatcatgaggaactatgctcctgaatcactgatcgaagcttctttcaagaagtaagctttttgtttcttattatttccctgaatatataattgtttgagtcgttttgatttgtattgattatggaattggtaactcttcaccagggatgtgagaataaatgtaccgatggcgccagaagttggattataccttgatgaatgcttcttcacgtcttacaacaaaaggtttaaaggcagtcatgaggaggtgtcaatggaagagtacaaggaagtagctgaagagttcaaatggaagtatgtttattcacatattggctctgctgaagaaaaagatggagctgtggcgatttggttgcattctctgaaccagagaaactatcctgatctacgaagcaatgaataccaaccggatgaagtcattgtctataagaagattggtgaagcctctgaagaaaatatccatgaaggcaatgctgagctattcgttgtcgataaggtgaatgatgaaacctctgaaggaacgactatggaagagaggaccacactagaggagaaggcaacagggtgaagccgcttttatctactgcggatcacaggattaaggtggaagcatcaagcttcacccgcaggtccaaactggactagtgagccagatgagtaccatttggacatttgtttcagtgtgtccttttgagttttgtctctcatgacaaaattttggaaactcaagtaatgaatgtgttaccattgtgacattttgatcttattataatgttatcgaataagtattggctatgcctatattatttttatcctttttaggaaagccattcaaacactaataatctcaataataatatataacctcatcgtgttaattgttaaaaaaacataatcataataatgcaccaactaagcaacacgatcatcactaagaaacagaaaaatggagcatgactaaaaccaatttgaaaactccctaaacatataaaatcaatcagacaaccaaaaaatgaccaagctgtcatctcatcatctccatcgtgtatttctttaacgttttcatttcaatttactccgattagtaaaagtagtttttataaatggttccacatagacaagagtcctccttactcaatcagcaaaaagctatagagcaaaagtggaataattggagaaatgttgaaacaatgttttcttccattatacctagtgtagcaaattgtgctactagaagctacgttattcgttttacatacatgaatctgttaaagtaaatttcatcacatagacacagctcatggtggttacacggtggaagagagagtatgatggtgacagaaaacagcagagtatgtatgttgaaactctgaatcttcctggtggttagtgaatggaggagagagtatggtatgatggtgacagaaaacaacaaaagctatatccaaaaatggataaagaaactcttaagcgcgttggggaacttacgttggaagaagttgataataaaggaaaaagcagagcacagtggaatcaatctctcggctataaaaacagagcataggggttacaacacagaatcacaacaagcaaaacagagagcaatttcaagcaattcgtcaagaaccgttgttaccttctcaaaagcgttgacaccacattgtattttctatagtgactctagactctagctagcacttctggaatagtataaaagtgattaagaaatgaacgataacattgaaatcaagaaaaagcaagaacattaattatggatattaatcaacaaaaaaacaagaacgtagaagtttagaaaagacaagaacgtatagaaattaagaaaaagcagacgcacttacatttatcataaccattgaaatcaagaaaagtcaaaactcctagagaaattaagcagactagtccgtgttttagtttcacatgtccatatatggcgaaagtgatcaagtttttggtattaatatcatgcaaatctttaacttgtgacacacgaaatctctgttctcttgtttgttgggtatgctaagtcttcatgattacacatgtacacataaataatcgttatacaagaaattttaaacagatcacatagctactagtctcggattaccaaagctaaaaccaaataataggtgggtctgagtctttaacttgtgtgccactagaaaccaatattgtatatttttagtatagtacaaatatttctaaagttttccacgtttacatgagtcctccacgtaaaaacaaaagcgtaatcaccaactaagcaaacactagacaatcatcactaagaaaaaaacgagcgtgactaaaaccgatatgaacatatataaactcaatcacacaacaaattaaagaaagttcctagctgtcacctcatcatctccatcgtgttttctttaacgtcttcaattcaattttactcagattagtaaacgtattttctaaatggttccacatagacttgagtcctccttactcaatcagaaaaagctatagagcaaagtggaacaatttagagaatgttgaaactctctgtttcttccattttacttagtatggcaagtttatgctacgtagaagccaatcttttcgttttacatacaagaatctgtaaaaagtaaagtagaaacacatagacacggcttctggtggttagtgaatggaggagagagtatgaatgatggtgacaggaaacagcaaaagctataatatccaaatttggataaagaatctcttaagcgcgttggggtacttacgttggaagaagttgacaagtaaaggaaaaagcagagcacagttgaatcatctctcggctataaaaacagagagggggcagagcacaaaatcactacaatagaacaacacaaagcaagagatagaaatagcaaaacttatattctttcaaaacaatgagtgggagcgtagttttccaatggggagagggagacaacaaccaactgacgctgctgatgaaccaagacaatttcaaacacaggcatgtttaatattcattggacgtttttttgtcttaatttgtgcatcgacattgttgataagtacttagttggcgtttttttccaaatctttctatgagttgttaataggctcgtaagtggggcgtcttgggatgttttatatgacgacgtattgagtagtcggtgccaaaggaacgaggagtcgtggtttgctatttctatcagaatggtgcatggaacacgcacgacttcgctttcaacatccaatagagttacaaagaaacattgggcagcgtccgaatataactatctataataaataatctcatatattgatgctgtaaatagatctctctaatttatttaccttgttaagattcagggaaacctatttcctgggtcactctagtgtaagaacattattgcatcagatatatcttctatctaaataaataagagttggttttctgaatgttgaaattctacaacaaagaataacttcttcaatgctcttatatgcaactttctcttctttggctttcgcacaaacttttgaaatataagacgtgattgtgcgtgcggctgatttcaaacccttatcattctctctatttgaatgtactaacaagcattctaccgaacagttgatatgcaaaaaggtctggtctttatacctgtcaaatccgcaccatactcagccacatctaaaacatgtaattgattctcttgatgaacaaagaacacatcatgacaggattgaacatatagcccagttaatattataaagtaataataacgtttttaaactataatcttgtagtagaactctataactatgttacataaatagtcaaatttgatttaagttttccctttttagatatgaatcattttcatttcgatagttttataaatgttaaaatacaatactccaagtcattaataataaatttgaatttaggtatatcatttgtataagtaaattcatctattgtctttgtattttattgtctaatttattttcgaaaaaaatctaaatatttaaatttcgagtttaagactacaacacttataacatttaaacacacaaattttatttagacaaaattatctcaactcatccctttcaaattttttaacaattaaaacaattttctttataagttaatatcactataaattaataaaagattatggtcttaaagttattaatctatagagttttttttttactgtattgggagtgttgtccaattatgagtttaatccaacttttataaaattaaatttacaattctaagaaattaatcaaaatatttataattggataaagtatttgttgacatttagtattttattattataataataaagctaattaatattggatatagacatatagtgtatatttctgcattcagatataatactatgaatacataatcttatgaatattcatgatttcataaattacatctaatatatttttatttccaaatccatagaaatgtcataaagttactttataataaaattgagtaattttacatttcttataatggtgaaatttgtgttgcattttcctttcattgattgttacttttccttcttcttatttttgggggcaatttgttggttataaaaattctctctaagaacctcatcagcgaatcattgaaataaaagaagacaaaagtatcaaacttaactacataagttctcactttgatttatctctgattatgaacagcttacctttgcatctcctcgaccaaattcttttcagattggaacccaaatctctggcgatgatgaaatccacaaatagaactatcaattcgcatatatctgacccgctttttgaatccgaatacttttcccggttagaatccagtttgtataacctttcccccggtggcgccagatacgtcatgtgccagcctttagtctcttcatgcaaatctatgtcaatgggggaaaaagcaattcaaggtaatttccgatgttacatgttggggtcatgctctggccttctcctactgtacatcggtggcctcttcgtcgcaaatcccctcacaaagaggtttcgatatttggatccttctggctcaaagtttatacctacgctaagtggtgatcgctggatttatttggcacatccggagagagcgatgtgcgttggttttgcggttgatcgaaagagattcaagatcgtctgcatacttgagatggagacgaggtatgaattcgaaatcaacgacggcgattcatggagattatcaaaaacgactatcaatgctgactcaaaaagtgatctcaccaagtggatgaaacctgtttacttggaaggcactcttcattggttgagaaacgacgggagcatcatagctttcaatcccgagacagagcaagcacgcttgattccttccggttttcatcaggaagtaccggatatgaaactgttacttgcggcagatgataagatcaatcgcttgaccttaatatcagggacaaaacaaacaatctcagtttacacattactcgggaatctcaaatggggtctcgctaggcggatcaagaacgtatctctgaaagaaaatgagttgaatgctggaacatggttgtgtacgatggcaagcgtcttctggtgagggagaagaaaaagaatcgtttaaatggtgtagttcatgtgtacgacatggaaactaacagttggggagttttagggtcgatcatatatacggccggtgcagtctgggacttctataagtttacgccgtcctgatgtcctgttgaggagggtgagcaaaattataaagcgatagtagattgtaatgaacatcgcgtcttctatctaatttctattatgagactcgttaatacaaccaagtaacagtgagttacgtttttcattgtttcaccttaattcatttattcctcgaatggcttaggttatagtctttttgtggaccgtgttagttactttgtccaaaagcactgagagtacttcgtatttttgtgatgacatgttttccgatatcttctctttgttctaatgttcttaacattaattggtgtgttcggttacttgtttggcaaggaacaaactttgtaagtccgaatgctttgaaaaaataatacaaaaaatgttttttttgctatacgagtatgaatttaacccccactatatctgatttcacgatttgaaaaattctcttaacatatatattcaatcacacaactcaaaaacctcccgtttcatttcagtttctctccgacttgtaaaaattgttccacatacatatgactcctccgatccatcactcagtgagcaaaaaataaagctagaccaaaagtggaacaatttataaacgttgaaacgctacgtcttccatttgactttactatagcacattgtgctactagaaaccagttttggcgagatagctgaagcttgtataaaatgcaacacaagcttgtattacgcaaaacttacattctttcaaaaacaaatatggggatcgtcgcattccaatggggagagggagaaaacacactgacgctgctgcaaaacagagacaattgggattcatggcaagtttcatttattcaaccttggtttaattttgtgcattgtttcgttgatgagtgattttgatatatttatttttattcgagtgattaaaagggaaccaaaaccggctgcttggaatgaaagtaaccagatatttagtgttctgcctgtgcatagctttgggacatggtttggtatttctaaacaaggccgacttgtttttcttgtgaatccaccgaagctcaacaatcttagtcctgtgttgcgtcctgttgatttcttactggtatgattcatgttttccttttcatatcttgtttgttttaacaatttggatctcactggattcgctttgattacaacagcgtgaaatgagtccattggactttgcaagggaatggtctgaaaattccaaacttgccaaaattatgaacgaggggatgtcttatcacatagttgtggcagatatgaagtcaaaatcaatgttttatatctcgtaagggtctgcaaaggattcacatgtccatatggaagaggtagactttggtgtgcatacccttacttcttccggactcgatatccaatttcccgaggtaattctatagaacaatctgtaacacatcaagttgatagtatattcaaatcaaacactttttttggtatacatgcattacttctgaaaacattttcctgtgagatgatgagtgattatacggacagagaagaagtaacaccaatgaaggagcttgctgagagatttactatgtatgatccatttgaaactgacaaagaagattcagaagacatatttgtaagagaatgtaacaatgttgatctaccctttatataatccacacctgcattaatctcttttcttttgtactctttcgttggattcaggggaaaacaagacgctatgaaataacgagtacaatagcattggcggtgaaacgcaataaggaagtcatgtttcatgagaggtttcgggagaatggtaaatggaaccccaatgacttcactttcaacatcgcctagttacaatatgaacttttctgagtagtattgttggtactctaatatatcttccacaacactatatctcaaatgtctaagcacatatagtagttgttggttcactttatattttccatctattcaattccatagtatctctttcactttataatccatgtatgcttctcaattccagtgagagaacttgttaattttaaaacttatacgagcaacattatcacaagaagttaaccttcacgctaatcatgttgtaacaattggtaaattatacataaaaccagacggtattatatcaatccaaattgacaatagtctctaattcataatattattatataaaacttattgcagaatatataattctagttactaagctcttaacattaaaagtaaaattcagacctcaataattccatcacttaaactcataagtaggcacaggaggagcatcaaagctctccaaaatgtgagttctgctctctgaatgatgatcctctgtttctttcttcttcttaaacaaactcccaaaccaagataccgaaccagaagaagaagaagaagtctccggtaccggtacggactgaccagatatctgacccataccatatggtaaagaagtagctgcatgatcctccatgaactgctcgttatgcgcagtactctgaactttgtttaacatgataccaactccttctatcatagccaacaacacacctccgactaaagccgatctagcagacgcgcctaagccttgacgcaacgagaggaatcctccagtggctgcaccagataagatcgagttccatggatcttccttttgtcttgcgtacaccaacgcacaatcgaaggttgagtaaagaccaccccacacggagaagcttcctccgcttctcggcccgctcattctcaaagcttgaacgccgccggagagacgagctccgccgggagagttgtagattcctcttatgaggtgatacgctgatccaccaacagcacccatcgcaaacgcacctccgacatcatctaggatccgatccggacatggctctctcgatgattctggagttcccattgattttcgattttgatctacaagtaactttttagggtataagaaaagagcccttgaaaacgaaactaagaatgaggaaaaattacaaaaatggaaaaatatcgtgttgttcacgttacttgaccatggtcaaagcccattaaggcccatttgtaaacacgctttatcacaaaatactaatataaaaacgccacgtcattcaagaaccttatctttatttaaaacgtggacaaacatcctccacctcataatgccatgtcacgacacagtatctaaaatcaaccaatcacaacgcgtctttatagataacttgtttttttatggagtttgcttttagagccatccattgtcctatctcactttctctctttcaccacataaaaactcataaactcgatcgaaccaaagctaaacgaaaaacttaaaacccaaatcttatcactactctaaaagaatcttcatcatggcctcagtaacctcagccaccgttgcaatcccatctttcaccggccttaaagcctcaaccatcaaatcatccgccaccgtcagaatccaaactgctgctgttgcatcaccgaagcttacagtgaagtcatctctaaagaacttcggagtcgcggccgtagcggctgcagcttcaattgctttggccggaaacgccatggcaatagaagttctcttgggaggaggggatgggtcgttagcttttattcccaacgacttctctatagctaaaggagagaagattgtgttcaagaacaacgctggatacccacacaatgttgtcttcgatgaagacgagatcccaagtggcgtcgacgtggccaagatctcgatggacgagcaagatctactcaacggtgcgggagagacgtacgaggttgctttgaccgagccagggacttacagcttctactgtgcgccacatcagggtgctggtatggtcggtaaagtcaccgttaactaaaatgtgtgtgtgagtaagtgagggagtctcggactcaattagaggctcttctttcacattcttacattattacataaagtgttttgtaattctaaagagtgttgaatcgaatggaccgtgattgttgttgtactgtgactggttccataaatggtttttcttggtttatatatgtagtcttatgtctcgccctgaagttatgattaatttaagtaggaaagtgaactgtttgaataagcgcttttcatagaggtatttagttagatggtctaatttgaagaaaattagatatatgactatggtgctaaatagtagttggtaaataattatttttgttgcagattgaccaaattatctcaatgcactctttgggctattgtgtatttttaaaaatgtggctgtagataaaatagtaaattattggatgaacatgtaatctcgcatcatgaataaaaaagtgcatgatagcatgttttttttttgattaaacagtgttgttataacatattcttgtttaaaagacgcacaaagccattagttatttatggacaaatttgtaatcgaccaattacttgaaaaatagaaggtttgttagtgcaaattccctattttggattaaatcgagagttgtggagccagttgatctaccatcacaatttcaaaaataatctaaattacatccttactaaactagctaagacatgtcacaaaatgtaataatgtgtataaatgcagcatatcaactttgctcatttcgtcagaagggttttaggcttttagctattagtcttccagctatctcattgatcactagtttatggtgtcggagtccatccatttactaaaacaatgcatttcactacgaagctaatgggtaaatgcctagtgaggttcaaaaagttaaacatcaaaaatctagtggcccgttataaacgatcatagtgattggcccagtaagcccactaccacaagcattaagttttcaagggaaatatacagatagtaaaataattggtctaaagaaaattggaaaatttaacccgtgccaacagaagtatcaattaagttgagacatcagagatacaaaagttaaataaaaaaggtgaatcaaagagcatctttgaggtgttatggtctgattagaagccaaacaagaaagcaacaaaagatgaaacgagtgagtcagtcatatgagtcgactttttttgtaaacaattcgaaagtctctttattaaaaagaagcttccacgtgatttccctttctctggtcggtacttctctctcatgtccattcatcaattgtccatttttttcctttcttctgtagtcaaagaaataaatcatcatatatcgacttgctaagtgtttttatgcagacaattttgagtttcagcttaaactattaagcaagataaaaaaaaattggtgaacattaagcaagataattatcagctaaagttttttttcataaagttctagtgtacttcggcagataaaattcaactaattttatacattacaaaatatgagaccacactgaaatttaaattagacaacaatgtaaaaatcagaagataaaataaatccaacaaaggtagaatttaatgagagaagtagagttttgatctgtagtcaaagaaaagaagtcgattcgacgattagtggcgatacagattgatgttgtgttggaaaaaaacatcttgaaatttgctttttctaaatgtggtggactaatgttatgatagtggctagtggttgatgttagagccacggtaggtagatcgaatgtgctccattggctagaaccgaagggaggagttggcaagattcttgatgctaattttgaatctggacaactttagatggaatggtttaatttatcataatctacatttttattcgtaaagtaaaataaagattaatgctggtttgaacatacggtagaatcacatgacactttgcataatctaatttttgtaagtttatgagagaagcagattgtatgtactcttcctccaccaccacacgtgattccttcaaagacggccatacttgaaatttggcgttacacaccctcactctagggacctcacttttctctctatccatttcatttattattattatggaacaatgcttaatctttttggtaaaagagtaaaagattagtattgaaaattccaataaatgtcttttaatgcaaaattatttccaaacgtttagatataacttgtttgaccaaatatttaagtccaagagcaacaaatctggctctcttctcataattattttgaattacaaaatttagcatttacaaatatctctgtaaaaatttccatggctattttcattactgttgggtcatgacatttaacaaaagaagaagcaaaattccaattggcaacgtaaaaaataaataatcaaatggaagaatcattgtaattaattttattcaatttgcaaaacctttaaagagaaacaaaaacttaaaatgtttttttaatattccttatttggcttgtaatttccatttactttgtctaggcatttattattattaaaagtcagtttttgaactgggattttaattagtcaaatatagattctctcagattaaaaactctttaaaaactttttgtcataaatcaggcaaagaagtaaaagagacttaaaactctctctctctctctcttggtcttcctcactcttaacgaaaatggactctttaacactcttcttcaccggtgcactcgtcgccgtcggtatctactggttcctctgcgttctcggtccagcagagcgtaaaggcaaacgagccgtagatctctctggtggctcaatctccgccgagaaagtccaagacaactacaaacagtactggtctttcttccgccgtccaaaagaaatcgaaaccgccgagaaagttccagacttcgtcgacacattctacaatctcgtcaccgacatatacgagtggggatggggacaatccttccacttctcaccatcaatccccggaaaatctcacaaagacgccacgcgcctccacgaagagatggccgtagatctgatccaagtcaaacctggtcaaaagatcctagacgtcggatgcggtgtcggcggtccgatgcgagcgattgcatctcactcgcgagctaacgtagtcgggattacaataaacgagtatcaggtgaacagagctcgtctccacaataagaaagctggtctcgacgcgctttgcgaggtcgtgtgtggtaacttcctccagatgccgttcgatgacaacagtttcgacggtgcttattccatcgaagccacgtgtcacgcgccgaagctggaagaagtgtacgcagagatctacagggtgttgaaacccggatctatgtatgtgtcgtacgagtgggttacgacggagaaatttaaggcggaggatgacgaacacgtggaggtaatccaagggattgagagaggcgatgcgttaccagggcttagggcttacgtggatatagctgagacggctaaaaaggttgggtttgagatagtgaaggagaaggatctggcgagtccaccggctgagccgtggtggactaggcttaagatgggtaggcttgcttattggaggaatcacattgtggttcagattttgtcagcggttggagttgctcctaaaggaactgttgatgttcatgagatgttgtttaagactgctgattatttgaccagaggaggtgaaaccggaatattctctccgatgcatatgattctctgcagaaaaccggagtcaccggaggagagttcttgagaaaggtagaaaggaaacatcaccggaaaaagtatggagaattttctcaatttgtttttatttttaagttaaatcaacttggttattgtactatttttgtgttttaatttggtttgtgtttcaagaattattagtttttttttgttttgttgcatatgagaatcttactcttgatttctccgccgtagtgccggcgagacataggggattattagtatttttaagtgtgtttaagattgattaacaagttagtaaaataaaatgtacttaggtgtcgacagcctgtgtgagtaacactactgactgactgatgtgagtgagtgtctgaatcttgtgttatggtctgtttggttaaaaaaacataactttgattaattaatttaaaagaaaatcagtgtcgcgacaagaaataaaaagaagctttttactaggtttgtcgcacggagttggtggtgggagagtggaaacgcatgcgtggttattttgaattattgctacgtacgtagttaaagaaaatgtgatacgttttggtttagtggttctctttaattcacgtgattctctcttagttacgattagatctgataaaaaaaaagacatttatttctcctttgtgtatctcccaattttggccaactcacactgaatagatttagtgtctgactcatattttgttgttgtcatggatctgattccagatcgtgatgattcacattgaaaatgacaggggcgagatgtagaaagaaaatctcatttatctctgtcttatctgattggtcttttgtggtatgctctggattttgacaatgatatctcgaaatgaaatcataattccttaatttttgatggagatgcatagagacaaagaactatattgttggatgtagggttattagctagtactaataaattcaagattcgtcataatgaaaaaagtgtttacaacttcactcacatactatgatggtctatgtttagccaaaaaaaaaaactaagcaaacaattaatcacacataaccaattcaagtgcctctcgttctagtgctgaagcagaatattaatagacagggacacagtagcaactatcaccagtgaccatagatttcggtcaacatcaacaaactaagcatatcgagttagacttacactttgtttgaggaatgtctgcaatcgggcaagtcagctattgcctcttcaaaatgataaaggtttcatgatttttagagttagaaataaatgtatcttttgaacttacaattaagatcactaaagtcaagtcaaaatacatgagagaaggctagcctgatgagagtgatctaacccatgccttctgtgataagtgtctcatacgtttagggtacaaagcgacacaaactatgccattgattgctaccaaaacaataaaataaaaatgcctttgataaaatagttcttctctcacataaatgcaaacaaaattccaccattttgaactcatcagtataagtcttgaacttaattttccgatatactcatcgaatttaaagaaattgggaaagaatgaatatcttacaagaattcaatactatgaaaaagattgatgtttcctctgttattttttttccctaaaatcaatgggattcaaaagtttgttgctaaaaatacaaattagcttcccttagcatattaaacttacaaactagattttaacccgcggtataccgcgggccgatttattttttaaaagtaatatatatttaaacttgcaaattttatttttataaaatatttatattttacagtttataattgctattaagtaacgctataccacgaatccatgagacaattgttaaaaaactgaagttttaacccctattaaaacaacatattaataatattttaaaattttataaatattgattcaaatacatccaccatacaacccaattccaagataaaacccgttctgtcatttctttacccgtcccgtgatttttttttaaaagtagtaatttttaaatttaagaattatttttgatatataaaagttttgcaaattgtatcattctctaatacatttatattttatagtttaattttatatatagtaacattatacataccacataacatttttggttttatataatcttttctaaattaggatgattttatatgcttaatattagtggtcttaaaaaataataaattaaagttttaacccgtattgaaacggtggattaattatattttactttttttttattaatgttgattcaaaaacccgtccctccaaatccgtcttgcaaaaaaaccatttattttattaatattaagtttattaatgatatgactctgagttataatctaaacattttaactaataacataagagtgcaccatatttatttaataggggaatgtaccatatgacccgaatgcacttttacccaaatccaccaaaaaagtcttgcaaaaatattatagagataagaaacgatagtttgttttgataggtataagattagcaaatatattagttagcttaaattagttaaagaatacaaattgaaaaggtatattatactttattcgaatatagtatcaaaacttatataacatagagatttgataaatttttaattgttgaattcttttttttgtgctaatttttatgtgattaagatttatttgatttcatatataaaatagtaaattgttttacgaacttatttgtttataatttggtaacagatagatattcgaatattcaatatattttgcttcagtttagaaaatctttgatgatccgtctttagatccaataagccctataatctagatattaacttgcagtatatcgcaggtaggtttatattttagttaaactaaaaacttttattgtaaagatgatttaaaaatatatgatattgttttattttattttaaatgtaaagtaaactgtgagttgtatatgttttgttgatattatctatattgtttaatgtttaagattatacacttgtagtttgattgttaatttaagagtttcaactgtagtataccattttgtattaatattgatgtaaaccgtcaattctaggattttccagcttatattaaaaattgaatcacatcatacacataaaaaaatctaatatgttattaattattgtagtatataagattataaattttcaatataatatgtatgaaattgaatataaatatttcaaattatgacttgttactcagtagaaagttttcttaaatctatttttcacccgttataatatttcttcatgtattaaatagtttatattcgtttttaaaaattcaaattatgcatatgggaaaaaactctaattcttttttttataatgatgatattagtttttcgcaaaaatagaatcatataaagatgagaagtgaactataataattaataaaaaattaatatgataatttagatatcaaatctaatttgttgattttaattggttacttttttggaaattaataatgtattttatttttctaattaaattaaattaatgaaaatttatatattaaatcttatatgttgattttgattggttattatttttggaaattaataatgtattttgttttttaattaaatttaattaattaaattagtatttgactttttaatccttaaagagataaattaatttactctttaaaattttatttctaatggcatacctatgtaattacttacaaaaattaaggttacatttaaaatatacttcccaaataatatagtaggattagtgacggaaaaaaaaaacaaaattaaaactgacattttgctaaattgcattttgatattatcaattttataaaataattcatctgtagttctacacttgtacttgatatatttattccatcaaaataatggaaaaataactttaaaataatggtttaataatgtagttgttaaacggatcccacatcggttaagaatcaaaaggctaagcaaaggagtcccacatcgcttgcgaataagaatggtacgcaaaattttcttttataaataaaggtgtccctacgataaaacgaggatttgtgaatcagactaacgatgtctttgattgaaaactcatgtctagaaccagaatccaaaacagcaacattaatctgcggtcacttcttcgtccgttacggaatctgctgtaactgcagatcgacggtagacagagactacggccgagcattcgattatctcgtccatgggttacaattaagccataaagccgttgcggttacaaagagccttactacacaactcgcttgccttaacgagagaaagcttcatctagtccttgacttggaccacacgcttctccattctattatgatttcacggctttccgaaggagagaagtatctattgggagagtcagattttagggaagatctttggacacttgacagagagatgctgataaaacttcgaccttttgttcacgagtttctgaaagaagccaacgagattttctccatgtatgtctacacgatggggaatcgtgactacgctcaggctgtgctgaaatggattgatccgaagaaagtatactttggggatagagtcattaccagagacgagagtggtttttcgaagacgcttgatcttgtgttggctgatgagtgtggagttgtgattgtggatgacactcgtcatgtttggcctgatcatgagaggaatctgctacagattaccaagtacagttacttcagagattatagtcatgataaggagtcaaaatcttacgcagaggagaagagagacgagagtaggaaccagggatcattggcgaatgttttgaaagttctcaaggatgttcaccaagaatttttcagaggcggaattgaggaattagattcaaaggacgtgaggctgttgctacaagaacaacacatagcagtttcaatcaaaatttgctcccaaaacctaagccatcagaaacaaatgtccccttttatatcaggaagcaacaaacatgaaaatgttaagttttacaagtcccaatcaatggagttagatactatcacaggtactggaagtagagtgtattcatcatccgaggaacattgcttggtttgcacttgatagatgtcgaagattccatatggtaaaatgtggcagatgctagttcgaaaatacatttactgttaatatcttgacgtatgtacataagtttacgcaaacataagtagagtagatacttgtgtaatagtggttgagaaattttaaaagttgtgtttaatatatcatcttgcatctcatcaaaggaaagactgaacctattacaatattttgttttgctaatgatatttgtgaaaatcctccaatatatagattatataaacgactaggatttgataattctaattctaacgtcccttaagggcttaaagcaatactagagagtacaatagatgtcaagtttgatcaaatgttagataggagatggtggggagtgacatccccttggctttttagttgtaaattgttgttctcattgtcttcttccacaagtgaatttgagaactcataggacaagactttgatccataacctttctgatcatcttgaccacgaaaaacctttatgaacattgtcaaaatttggtatttttgtgtccggttttggtatgcatagagatggttaggtaagagagtatgcatctggatctcaaatctttcgttatcatatccggacaaaaaatgctatttagaaaagtctagacagaagaaaaaaacgttttgatctattcacacgttgaattatttctgtctttttcagtctattcacaaaactcagacttagtacgtagtaacgtagcatcgtggcagccacgaaattccgacacataaaacaaatggacatagaaaaggcaacgaagaaaattcaagaaggagcttttacttaattacttgaagtggttttggtcgatccatggttcttctcttccacaaattaacttcactctttggcttcggacacaaactcaaatcctctagctgagttagaggtatacccacagagcatggaatcattacatcttctttctcacgtttcatctggaccgtccaatcaaatccaccgagagcttctctactgctcgcgaatttcttcattgcacccaatgaaggcgctgccgtaaccgcatcaacctccgcgattggatgttctctcgctgcggcggctgcgaaggcagtggagttggattttctcgacggataacttctcattgagaagatacgctttagtttcgaaaagcttccattgtcttcttctttaataacacaagacgataaagacgatgccgttttgagattcttaggtgctttgttcttcttctccggacatttaggtctagcgagtttgacctgaccgatgcaggagactttaggcgaagtgggttcggcaaaaacggcttcgtattttgtatttctcctaactctagcagccgtaggaaccaacggactggagaagaagattcctctgttcgccgtcgaagtcgtacggtgctgatgaaaatctctccgtggactaaacggcgccgcactgtgaccaattgacatcgctctttgaagcattttcgagaatttcgtggacttgttgctgtttgaagctttttccatttattcttcaagatttatgaaaagcgaaacagagagactctaggtcttatatgttctgttgtgtctgaagcttctgagaaagtgaggataaaagaggaacaaagattgaaattgtcaacggtgatgagctaaaccggagaaggcttatgtcattatcacacagttttgacttaaaccggagaagacatttatgtcttatgtagacttatacggccgactttgtcccggtttagaaaatttgatggtgaagtgtacttatgttaggtttacaattttccttattttttaggtttgtcttcgtcttttacgcggattagtttaattgtttatttgacttttagtcccacatgtgttgtgcttggacaatagattatactatttattaagccacctgatttttatgcttaattgtgtgggattaatctatcatactaataattagtccatgaacagctagtaaaccgataattaattggattgaaagagacgtataaagtgaacacttgtcgttttggtcaataaacgacaaaagtgtgtaatgataggttacataacataaatctaaatatttgtcaatggtacatttttgtcattgaaggttgagaaattgagaactactccttctctttggtcttcccttgttaaatgctgttttactaaaaaaagacttccttatttcatgacataccatggtatatgtacacacacattaaagcgaaatcttcaacttcaattttgtttaatattcaaacattttttttttcctaactttagccaaattttatcctcctctttttaaatatttatgaaataatacacatgatgcaagtaaaacatagtagaaaatgagagttaaaaaaagagtacatggtacaataatacttcttgataaccaaatgttgtaccaaaacaaagttacaagaaaattgcttgaaaatatccttaaaaactcctgagaaaaaaaagcttcttctttgatacttggaagggttcctacaatggccgagcaacgagtcccttctgaatcatcttctccaccagctcttcatgcttcttcaattgcccagctcttcttaactgagcaagaaccatctcatataaagacaagctcggtgtcaaacacttctcttcaaccatttctttaaacaacttataagcattattccaatgtcccatcccacaaaacatcgtaaccaaaagcctataagtattcacattcggctcaacttctttatcatccatctctttcttcatcttcagaaccatatcagtagattttgacccgacaaacatcctcatcagtatattataagtcaccgtattcggctcacatttcgcttccatcatcttcgaatacatcctatgagcgccattcacgtctctcttcttctcaatgtacctaaatatcgtattgaaagtcgaagcattcacttcacacttcttcttgatcatcgtgttcaaaaccttgaccgcgttttccagattctcgtctctgcaatgagcctcaataaggaagttataagtaatagtatcaggctcacatcctagcttcttcatctggttataaacctgcaaaaccttctctgttcttcctgctttcacatgaaccctcatcaagttgttaaaagtaatcgcattcggcgcacaacctgaatctaacatatccgcaaacacatcatgcgcacggctgatttgcccgcatctacacaacgcatcgatcacaatactgtaagtatacacattaggttcaatcccagccaacttcatctccttgaacactttctctgcctcagagatttcaccagctctacaccaaccacgaaccaaattggtgtaaactataacatcaggctcgaatctatctttcaaactatcgaaaaacgactgagcttcactagctctcctcttcctagaaaggttactaataactatggaaaacgcgattttatcaggtacgcaaccgtaatcttccatacgattaaagcaatgtacagcctctgaagctaatccagctctaacataacgtctaatcaaaatcgtgaaggtttcaatcgaaatctctacgtttctggatttcattagatcaatcaaatgccaagctaagtcgaattgtctaacctttcctgaaagatcgatcatttcgttgtaaggatgaggtgatttgtggtcgtaatcgtctcgtgaagttgcccaattgaagaaagctagagattggtgaagagggattccgtggcggacactgccgcacttctctatcacgcatcggacgacggagggagagacttgggaagtttcaatttgggagaaatcgagggagagagcatggagagttaagctagggtttaagatggcgtcgttggggcttgtagggtttttgcgatagtggtctttgatgattgaatggaacttttctacggtttgtgtgtcttccggagttaacagaggtgagattgggacagagacggcggcggttatggtggcggcggattcgtcgttttcatggtcactgagtagagaagttgccgaggtggagaaggttttgggtagaagaggagagatgaaggaaagggttcgagaaagatggagttttgatcggagtaacgccattaatgggagattttggtcagtctcttctaaatgtagaacggagcagagtggcgatggtgaagaaggacgaagttcactcttatgtgaatacgaattattgaaaaggtcaaatttgctttgcttccaaatgaatgctgaagcggcgtcgtttagtatatccctgtatatattcgtaatttcttactaataaccaaaaaatatatatatgcaatgagactttaaatttatagcaaatcataggagccaaccaaattgttcaatatgtaccatgaaacattctttatatatagaccttatgattcagatcttatgtataagttatggagtaaaagtcggaaaagtctcttcatatcgtaatcattatcgaacgaaattcaactgattatgtaaactattgcctgccaacaataagaaaatatttaacggttaaatacgtcaaagtcagaactcagaatttcatggatagataacattataacacatagtcgtttacacgtattatatgatgtgttaccatcttttggaggtaagatcatgtgtgtcatttagatgaagttatattggatgatgctactacttgttactttttagtcatttgtagtgatatatatgcaggcagcttgaccatgccaattttctgactcacaatattactaaacctatatgataaatccaaaatattatcttattgtaaaaataaacatatatgatagtttcaaacctagcttattggataacaaattaaaaataaaaaaatatataaaacgtcttgataaatatcctaatgacaaatagtttaagactaattaaaaaggaacgactccttctaaagcttagctcttctctaatcttcatcctaatcctatcggctttggtaatttacataacattccattcagaagtcctaacaacacacgcttatgatgtcttcaacatctaattcttattcggactaagtatttaagtcctactccgaccatatttctataaccttttttgttgttgtttatccttaactattactcctaacatcgtagggaaaaaaagaagcaaaactcaatcagtaaaaaccttaaaacagaaacaaaaaaaaaactgggttcttaccaaatattgccgtcggcgccagagaatgagagggaggaggagtatgtgtctttgaagaatctaattccgtcccgatatccagttgggactcaaacacctcagtttgagcataagcctaagtcctctaaacggcgatacgtcaaagttaaagagcctctgtttgatccggagacttccgcccgtatatcttggcgcgaagtatccgttgatgacgaccaagaacaagaacacgatcgtgggtgtttctttttattgaagaaaagcattcgaagaacggtcgatatgttgtttggtcctctttttggatcagctaagttcgacgagtttcgttaatcgttattgtgcatgtgataatcatgattgaaagagtttttttttttttttttttttttgggagatagagattggaacataagataattatggctttcttgttagggacgaaattgaattgcgacactatttaaaattttatcatatagtttctatacgagtttgttgattttgttggggacgtctatgatttctgtgttgaacccattcttaatgataaacgatttatagttttgtgatccatgcttagataggcccatatatacacatatgaattagctccttaaaataagcccaatatgtttcagcatcgatgaggaatactcagtggacatgacattttggttttgaccaaaaaaagattcaattgtggtgttagttgcaatgtaatccgggtaataatttgggtttcagcaactttctgtcatatttttttatttgttatttaatttaatttatattcagtgactatatatttttgtcattacattaacaaacaaaaaaaaagtaaaaacgtaactatctaccaatcttgtatttaaatttagatttatttgcttaagaattgtactacattttatgattaataatgtttccgtgatagttataaacttataatagttttgtaaaaatattcaaaattaaaattacaaaatttatataatgaaaaagaaaagagaaaaataccatgtctgttatagactataacgtaaacccgtaaaagagaataatttattaccattggatacaatatttgttggtattttgttcaaaaggaataacaactcataaattaatttgcaatccaacaaaatctataaatatataatcttatcttttttaattatttcacaaaagatatttaagatatatataagactcatttgtccatttaaatcttatagatattcaaatccaaatcaatgtaaatgtcacaaaaattatttcaaggaaattagttaaatttaagttttttataatggtgagattatcttgcattttgctttattgattgatggttacttttccttttctttgaatcttgctagctataaaaagactatctaacaacctcatcagcaaatactgaaataaacaaagattacatatcaaacagaagttggagaaatttttagatttaagaaaaataaaactttaaactctaagactttgattacaaaataaaataaaaaaatcgaagactttctaatgtaaggtgcttgaacttagattacaaaaaaaaaaaaaaaaactctgtttgattaattaaataaattagttagctttgctatccattaagacaactatggttgaaatgttcgattacatgaatttaatgaatggttttgcaggcaataatctaaatagagccatatttaaagaatataattttgtttttttcctcttttttgcttacaaaatgcttatagaataaataaaaaatgttctataaagtttaagcataacttatgtatattattatcatctgcgattatgcaaaaaagatagagagcataaatgttttatttgcatagagttcaaatggaagcatgtttactctcatattggctcagctgaagaaaaagatggagctgtggccatttggttgcattctctgaaccagagaaactatcctgatctacgaagcaatgaatgcaaacggaatgaagtcattgtctataagaagattggtgaagcctctgaagaaaatatccatgaagagaaaattacagtgaaagagaacactaatggcaatgcagagcttttcgttgtcgataaggtgaatgatgaaacctctgaaggaacgattatggaagagaggactacactagaggagaaggcaacagggtgagccgtttttatctactgcggatcactggattcaagcttcaaaccgcaagtccaaaccggactaacattttgacatttgtttcagtgtgtccttttgagttttgtctctcatgacaaaattttggaaactcaagtaatgaatgtgttagcattgtgacattttgatcttatgataatgttaccgaataagttttggctatgcctatattatttttacccgttttagaaaagccatccaaacactaataatctcaataataatatataacctcatcttgttaattatataaaacataaacataatcttcattggttgagaaacgacgggagcatcatagctttcagtcccgagacagtcacagagcaagcacgcttgattccttccagttttcatcaggaagtaccggatatgaaactgttacttgcggcagatgataagatcaatcgcttgaccttaatatcagggacaaaagaaacaatctcagtttacacactagtcggaaatcccaaatggacattcagaaaaaatgaaaatcccaaatgggctcttgacaagaggatcaagaacgtgtcgatggaaggaagtatgtttgaactctggaacgtggttgcgtacgatggcaagcggctagtggtgagggagatgaaggatataattgaaggtgtggttcatgtgtacgacatggaagccaatagttggagagttttatgctcgaccaaatgggtgaacccaagcgacagtgacttctataagtttacaccctccatggtccatgtcggggagggtgagattatagcttataatgaccgacgcatcttagatctaactgcgattatggaactcattaatacaacaaagtaaacagtctcatgctttactcaatatgggcctaagtatacaataagtgtccggatttgtagtaggtggatgtttttttttttttttttttttttgataatatgcttaagtaatctcatggtttaagtatttagagtctaaaattggttgtataaaacaatgttgctaagaccgaagcataatctctatagtgacggtcaatgacgaggaacaatagtccaagctgaagaagaagaagaagaagaagaagaagaagaagaagaagaagaagaagaagaagaagaagaagaagaagaagaagaagaagaagaagaagaagaagaagaagaagaagaagaagaagaagaagaagaagaagaagaagaagaagaagaagaagaagaagaagaagaagaagaagaagaagaagaagaagaagaagaagaagaagaagaagaagaagaagaagaagaagaagaagaagaagaagaagaagaagaagaagaagaagaagaagaagaagaagaagaagaagaagaagaagaagaagaagaagaagaagaagaagaagaagaagaagaagaagaagaagaagaagagaagaagtacatgatagtgaagaagaagaagaagaagagaagaagtacatgatagtgatgataaatcgcagaagaagaaagtagatccaagagaaaaaaatgagaaaaatgaagaatcagagaagaattaaagtagatatccttttgttttaatttctaagcatggtgtgttcagtttcttgtttagcaagaaaagtttaagaaggcctagacgagtatgagttaacattactatttcatgatttaaaaattccctgcagttcaactcaaattacctcccgtattcattccactttctcttagattgtaatcttcttcttgttttttttccgaattgttctagcatacacacgacgactcctccgactccgatctatcattcaatcagaaaaaaaagaaaagaaaaaaaaaaagctagagaaaatgtggaccaatttgggaaaaatgtcgttttatacgtgaactttaaaaaatgaccatttaatacgtaaattttttgtgtggccaaataaaacataataaaaacgttgaccggccgtttcacacaaatgtccccatgccgttatctttcattaacggatccgttaattccgttaacacatgttaattagtttccgtcaatactcaaacgacgtcgttttattgaaatcaaaaaatcaaaattcctaaaattgatttcaaaatctctaaattccaaaaaaacaaatccttaattcctaaattccaaaaatcaaatccctaaattctaaaaaccaaatccctaacagcctcttattttcagcaattggtcgtcgtaatagtcatcgtcgtaaagatcctcaagagagctaaagaagggccttcgctttgatgtttcctccttgttcatcatcgatcttgttcctcccccttcgtgaattcaaacgaacagctgttgtcaatagtcgaatgttattattcatattcaaattggttctgatgtgtgtgtgttcgtaacattttattcacaagacaacaaaacaaaaacagggaaacttccaacatgatgaaataagattatgagagtgagaaaagaaccttggacaacgggattgagattcctaaagaagaacatgatgttgccatgtgaagcagatggattgaagaaaaatgaattggattccattttggaatttagggattttgaaatcaatttgggaattttgattttttgatttcaatgaaatgacgtcgttttgagtattacaggaaactaattaacgtgtggtaacggaattaacggatccgttagaaaaagataacggtatggggattttggcctggtcaacaataacatttgtgtgaaacgaccggtcaacatttttattatgttttatttggccacacaaaaagttcacgtattaaatggtcactttttgaaagtttgcgtataaaacgacatttttcccggaccaatttggaaacgttgaaactctacgtcttccatttgtcttaaagcatcattattgcttgtctcttatataagagatagaataagatgttcttagtaatcaataaaaaaaaatcttaaaaactaatctaagagacagctaataataatgctcttactattatagcacaatgtgctactagaaaccactttcggctaatgggccttatagtcaaagatgacactatagtttttatggaaatgtagtaatcaacaataagcccattggttgatctcatgtgtaataactaaaacattgtgctaggaaacaaaaccaattcccaacaataaaatgacgaaatcatccctattttctcaaccaccgaccaccgtaaatatcgccacatcatcacgtaaataagggtacaaatgtcatttacagatgcagcgttagaacagaacagagattaaagaaaaaagacagagaaagaatccttattagaaggaaaaatcatttatgagtgaaatagaaatttgatatctctttattagtttctgcatctcgaggggtttttgggattctctgattcgatcgagttctatttgtcgttgtgtacaacatctcgggtggatctttgttgatggcgaaactgagacactcgcgatttcaagcgaggaaatggtcgacattgatgctggttctgtttatgttgtttatgttaacgattgttctcttaatgcttttggctttcggagttttctctcttcctattaacaacgatgaatcctctcctatcgatctctcttatttccgacgagctgccactgagaggtgagctttgcatgaatttcttgatctctctggaatttttatattaaatttgtttaatttcctttttgtttgtgtatcgaattcagaagtgaaggacttgggaagagaggagaccagtggactgaagtgctttcttgggaacctagagcttttgtctaccacaatttcttggttagtctgattctttattccacagattttattcgattaatttaccactgattgtgttaatatcttcagtttgatcattgtttaagatttagtatctggaggattgattaattaattattgatatgattttgaccagtcgaaggaagaatgtgaatatttaatcagtcttgcaaaaccacatatggtgaagtcaactgttgtagatagcgaaaccggcaagagcaaagatagcaggttcggtctcatcatgcttcttcgtgtctgagaattttttcttttttatattcttaaaaaaaggcaagcattgtggattgttgtgatgatttgtgaaatgaaaacactttcagggtgcgaacaagctcagggactttccttaggagaggaagggacaaaatcattaagaccattgagaaaagaatagcagattacacctttattcctgcaggtatcagagacttatacttattttaatcatcaatttacagttttggactatcattatctctcaaatttgatcataaatagatgcattcatctgtatattagatcatataagcttttttatgtatgatgaactatgaatcaatgaatgtgtgcagatcatggtgaaggacttcaagttcttcactacgaagcagggcaaaagtatgaaccacactatgattattttgttgatgagttcaacactaaaaatggaggtcaacggatggctacaatgcttatgtatctgtaagagttttctaactttacttgattttaaaggttgctatgttcaagtatctactaattttgccttcaaaatccttattctacaggtcggatgttgaggaaggcggtgaaacagtgtttcctgctgccaatatgaattttagttctgtaccatggtataatgagctctctgagtgtgggaaaaagggactttccgtaaagccgagaatgggtgatgcattgcttttctggagcatgaggcctgatgctacactagatcctacaagtttgcatggtaaactaccttcagttttgaaagtcattcgaaacactcttgttatttttttccgataccattgagtttgtggttgctaatatatgtcttcttgtttctaggtggatgtcctgtgattagagggaacaagtggtcatctaccaaatggatgcatgttggcgagtacaaaatctagcgtgtttggtttctggtaactgtccattcctcctaagtttcaaataagcaaatttgtccatatctcagtaatagagtggttaagggattagaatcacttatcatcagtgatcatatgttgtaaacataaactaatctctttaattcaacatagcttcctctcctacaacataagtatgcacacatacacacacacacacatatatgaacatagactatggattatataagcttgttatcggtgtgcatacaagattaagatagagtactgtgtgttggctcttggttcttacggttatctttttttttcattgggcaggacagtaaactgtttcctttcatggtggatgggatgcaaagttggaactagaaattacagagagttgatgtttgttttttccctgcggctcggtgcattccttgctttgatgggattcaaggtttatcattagagaataccaaaagatagagattttgttagagtaaattaggatggcttagagtgactcttactcattggtatacccataaaggtcttgtgtctttgaacaagagttgtgaattacatagttttgtggtattcttttgttttgtttgtgattagaaacataatcaaattaaaaattgttatcataccatgaaagctgaattgttatatatatttacccaaattatccaatggactgatccttagtttgggttgtgtgacacaacttgcgtgtcattgacttaattgtggaggttctcataggcagataattagatcaagtataagattaatattcaacaaattgcacaaacaatggtgtacatatatttaaaagtgttggaagagattattattacaccacaacaaaaaagacatgattcaccagtttggaagacaggagctgaagtggtttataaatagattttgtacgaagtttctctacacaaacctttattatacaaatggaaaaacaaaagaaaattcccaacttcacaattctctgagttttgttttcacgcaaccaatcctgtttgtcttctctcggtatgatttaagttccaaataagataagaatggagcaacatagagcttgttttaaaaggtttagcttgtggagtcgcggctgtagaattgatcaagtgttttggcaggaatacggtgaagaagctcacgtgggaagatacggagcagtgtccatgccaagtcaagcgactggaagatgttccttgtatcgtatgcgccttgcatcacaaacttcctttcaaatttatccagaaactctaaatacagctacaaacacacaacacaataaattgttgtgagtaattattgttgcatatacagtatcttgataggaacacgaatattggtgaagtcagagagaggtaccagatcctcggaagacagagcttcttctccaacaacagctttcatggcttgaacatcttttccgattgcataatttgcgtatagctgaaggtaaagagaatgttgtcaattaattcgatactatatgaacatgtgagctactttaggcaagtaaggttctttataggtagagaacctggttggacacatcagaatggtctttgcgagtcattccttcaccaatagcactctgtagaaggaacaatgattaagcgaataagtaatcgtatgtttcaatccatgtgaatccataagggtataatcaaattgcaaggctaccttcatcagccgagaaagtgatggaagcacgttaatgggtgggtatatctgttttagggaagaaccaagacagaatcagagatcattgtaaatgtatgagaaacctttcttgcttatgtttgatgtgttagagagctcataatgagatatatgcaaaaaagtcgagcttattgcacctgtctgttgtgaagttgcctatcaatatatatctgaccctcagtaatgtaaccagtaagatccggagtagggtgagtgatatctgagttttaataacaagaaatattatgagctttgtttaatcaaaaaacatttgatatgaatggaatccaaaaacgataaaaaaaattaccgtcattgggcatagtcaggatagggatttgggtaatggaaccctttcttccttcaatacgtcccgcgcgttcataaatagttgcaagatctgtataatataccccggatatccacgtcttccaggaacttcttctcgagcagcagaaacctagagttcacgtttgttaattttattcaaagcttaaatcaaattttgaatcatgggacatacacaaaggacagtgaaactcattacctcacgaagagcatctgcataagaactcatgtctgtcaatataacaagcacatgctttccacattcataagccaaatattcagcggttgttagggcaattcgaggagtgataattctctcaatggttggatcattggcctgttcgagtggaatgcataataaggtcaattcctcactgatataatatgatagtactacaagaagtaagattggaagcatagaaattactagtagtactagtaactagtaaattaccaagttcaggaaaagggtaaccctttccatcgatccattttcttcaaaatcacgcttgaaaaactgagctgtctccatgtttacacccatagctgcaaaaacaattgcaaaattgtcctctccatgatcctggaaaaacacaatgttaataatggagtttacaaagcaaacaaaactacacaggaattgagagactgactgctatatcaatcttcatagaagttgagtatcatgaaaagtcaatggcatcacaaattataaccctttaaatgtacctatccttagagatagttaaatctttctacatcagttagaaagtgaatgtgcagaaacaggcacttacactttgatacttggaaaacaaaagtactttagtggtggtggtaatggggcaaatgatttacctcctgaattaagttctcagtcttttccaaccgcttcacaagtccagcctgacgacaaatttgagcagcaatctcattatgaggtagaccagcagcagagaaaagaggaatcttctgtccacgagcaatggagttcatgacatcaatggtagaaatccccgtttgtatcatctcttcagggtaggttctttcactggggttgattgaacttcctataaaaattatcgaccgaaacaatttaaaacagattttttccttctcttcagagtacaattgacttgaggcagtcaatgctcaccagaaatatcaaggtatgcctctggcaaaataggagggccattatcaattggctttcccgagccgttaaatatgcggccaagcatgtccaatgacacaggcgttttcagtacctgaaaacacacaccaataacagataatgacaaaaaaagaacaagaaaaaaactgtaaccaagcatcctcttagtttttagaaaacttccaaccaaaattttaactaatctgccaaaagcttaaaagaggagaaggcttttatagtaacacctctcctgtgaattgcacggtggtaaacttgttgtcaatcccagatgttccttcaaaaacctgaaagccatagatggattaatcattgagggcattgatctctatagcatgtgcattcatcacctagattcaacaaactagtgttatgcagaattaacatttacaataatatgaaagatcataaacctggacaacagctttctccccatcaacctccaagacctgaccacgtctcgttgatccatctcctaagcgaatattaacaatctcctggtactttggaccctgatataataaacatttcaacaaatctatacagtgagtttccctgacaaatgtaaaacaagaactctactattcaatgtcaaaaagcttctcattttctataccttcactttgtcaaggatgaccaaaggtccagcaactccggagacagttctatactctacaattcaaagatcctcaaatcagtctcttacaaagacaaaaacgtaggtaaaaggcgctaaatcataacattcacaggaaacaactaactaataaaaagcaaagcaagacaaacacaagtgtttatacataaatccacaaaggaaaaatactatgagcaacacaactcactaactaaactagaaccgaagcaatacattattcgacactccatttccaattgcaaactaggtgaattcaaacttatattcaataagattaagctagatcgctcgctaaagcttgaaaacaacccccagaaatgagattcttcttctatagtaacttctaaactagacaaattccaaccaaacgttctagagaaaacggaagaacagatgtgatccaacgcaaagatcggtggtgactaacccattccgatctcgagagttccttcctccatgtcgatactagtctccaccattgtcacagatcgaaatcaaatcaaaccaaaccactccacaatccctggaaaaaaagtcagaacgcgaacatatcaaaaatcaattgaaaattcgatccaacaatcaaagtctgaggaagaagacgtaatcgaactgtgaggaaagatctgatgaagaaatcacgtacctctgtaatggattcaagcagagaagagagagaaatgtgatttgttatgaagaagtttgatgaaggtggtgtggctctctgtgaaaacgtggttggaagatttctgacatctcattatttttcgtcattttcctatttctctaaaaattattattatttttttgggacggagatatttctaaaataaatggggattttctaaaaagacaaataagcgcccaccgtggggctcgaacccacgaccacaaggttaagagccttgcgctctaccaactgagctagacgggcttgctgattgtttttgccttcatacagtatatatagtgttatagaaagcgacgcactatcaatttttttttggaaaaaggtggatggtaatgcatccaaagatatatcacgtgttacatatctcgggcttcagctaagaaatccatcataagctcaaaagttattgatggtggtgaatggtattacctccaaaggatagataacgtatatgataaattatgtgtctatatggagttttactgtgaagttattctaacaaccaaattttatgtcatgtccccatgttggagaatttggtagtgaattgtccaaataaatattaataattttattaaattcaccttaaaccttacttccattgtagtttagttaacattttcaaaaataaaattttattaccaatggatattatacttgttgacataattttcaacttagtaaataattaattattttccaatttaaataagattataaatgtataatcttttgatttatcttatctattattttgccaactaaaaatttacaatattttcaattattcatgatttcatcaaagataattgagattattgatttttttcttaaaaatcaatcaaaatgtaataaattttatttctactaacacatattggtgattgtcttgctttaaaaatttaatgaaattgattgttaccctttttcttttgtttcaagctagaatttgttgtctatttaacaacctcctaagtaaacaattggtaaataaatgaaaataatcacatcaacaagcaaagcaaaagtagggagattcgcattttgatttatctctgaatcatggatggtttacgaagagaaaaacagtagcatgtaaatgatcatttcgattcatcttccatcatcaatggtttacctttagatctcctagacgagattctcttcagattggaacccaaatatctagcgatgatgcgttgcacgaataaatatttccaatcgtatctatctggccctaaatacaaaaaatacactttttgggtcagaccaagtttctttaacatttccatttttggctcatgtcatatattttgccagccttcggtctcttcctgcgactctatgtcacaaggaaaaaaaatagattgtaatgtgcttactactgagcgatgttacatttttggctcatgctccggccttcttctcctatcatacattggtggcctcttcatcgcaaatcccgtaacaaaacagtttcgaattctggatcattctgggtcaaagcttatacctacgatagctgatcataaggacagagcgatgtgtgttggtttcgcggtaactcgaaatcgaaccaccatgagattcaagatcgtctgcatactcgagacgcaaacgctgtatagattcgagatcagcgacggatactcatggagattatcggaaacgaccatcacccctagctcaaaaagtgatctcacgacgctaatgaaacctgtttacttggacaacactcttcattggttgagaaacgatgggagcatcatagcttttaatcccgagacagaggaagcacgactgattccttcaagattcagatttgatcacaggaatacattatttgcggcaaacgaaaatatcaaccgcctgactttgatatcaaagacggtaaaaagaatatcagtttacacactactcgaggattcgaagtgggctctcgccaagcggatcaagaacatatctatggataaaagagatattagatactcgaacgtggttgcgtacgatgacaagtgtcttgtgctgagggaatttaaagacattaagcttggcagtgtggttcatgtgtacgacatggaaactaacacttggagagttttaggggccatatgtcagcacgctaccgtccaaaaattgtataagattacaccctctttgttctttgtcgaagaggatgatgagaagcacaaggtcgttgtagcatctaatgaccaacacatctatctaaacgcggttttgggtgtcattgattcaaccaagtaaactatctcatgtctgatttataagagtgtttgtttcctatatgcttttctgatggtattctcatgtttatgtgtataaatcagtaattagggagttttaccgtaatatcttcatctcacaacctaagtcatgttcccttgttgggagtgtcttacagttatgaattgtaatgaactttgattgaattgaaacctttaactttaatccatagttattttatttttgtcgtgagatagatccaaacactcataattcacaaaaaggttctaaccaaattttggaaaaaagttaatcatgattcatgagtcttattacatcacagcagaaaacatctcatgataaagttcgttttgcagaaattacgaaaagttttaacatatgattgtttttcttcctaaaactatataagccttcttgattaaaatttctctttggaaaagtcctaaacaaaaccggcatcagtagctatcagagtagtaaacagttgaattatctcataaagaggacgacattattttagttgagaagagatataatgattttggaagtaacttctaattgagcatctcgatcatctccatcttcagtagagaaacattaattttagcaatcctttttactctattgaatcatggatcaataaaaagagacacgtttcttgtaaaactctatacaacacatcaaaacacataataaagcgaaacagaaacacattttgctaaaatggtattttgtttaaacagaatcaatcaatttttattaccaatggatattatgatatatttatttgctgacattgtgttaaccttgatagctaataaagtattttgcaatctaaataaaactataaatgtataatcttttaaatttgcatataaattattctggcaatttaaagaaaaattataaataattaaatatacaatatttttgaatttccattattttatcaaagataattaataaaaattgtaaattctatctcaaaatctatcaaagtgtaatatatttcctactaaagaattggtaacttgtataattatattatggtgagattgtctttgccttttcctgtattaatgcaattgattgttttttctaagctagagtttgctttctatcttctatttaacaacctggttagtaaatcattttatataaactaaaataatcacatcaacaagcgaagcagaagtaaggagatttgaactttgagtcatatctcagtcaacatgaatggtttacctttacaactcctaaacgagattctcttcaaaatggaacctaaatctatggcaatgatacaatgcacgaatagatttttccgatcttatatatctgacccaaaatttgaaatatactcttcttgggccaaaccaagtttgtttcatctttccagctatggcgccacttacatcttttgccaacctttggtctcttcaagagattctatgtcaccagaaaatgaagtgaatctgtctagagagccatgttacatttttggctcctgctcgggccttctcctactatatattggtggcctctttgtcgtaaatcccctcacaaagaggtttcgactttttgaacactctggctcaaagcttctgcctataatagttggtggtgatcgtaacgttgctggtagggaaagagggatgtgcgtcggattcacggtaaatggaaatcgaacaactaagagattcaagatagtctgcatacatgagatgggaacggtgtattcattcgagctcagcgatggatattcatggagattatcggaaacaaccgtcaccgctagctcaaaaagtaatctcacggtgcaaatgaaacatgtatactttaacaacactcttcattggttgagaaacgatgggagcatcataacgttcaatcccgagacagagcaagcacgcttgattccttccatatttcatcaagaaccagagatgaaattgttgtttgcagcagacaataacattaatcgcttgatcttaatatcggggacgaaagaagaaatttcagtttacacactactcgacaattctgaatggaccgtcaccagccagatcaagaacgtatctatgaaggaaagtgaacttgtatgctggaacattgttgtgtacgacggcaagcatctagtggtgagggagatgaaagattcattaaacggtgtggttcatgtgtacgacatggaagttaaaagttgggaagttatagggtcaaccaaatcttggtccagtcgcgtccgagacttctataaatttacaccatccttgttctttgtcgaggaggatgagcagcagaaggtgacagtagcttctaatgacaaacgcattccctatctaactgcgattatgggactcattgatacaaacaagtaaacaatctcatgtataacattatgaaccaaatatctacaagtatcatgtactatctgaattcattcactgtcaaatgcttttgatgtgtcaatataagcttttgatgtataaacaatgggaaactattctccgagcattattaatttatgcactaccatcaattcaattcccatttataagctttagatgagctttttaaacgaacctgaaacactagtgtagataaaagaatatgagacatgtatctcttactcttagtatcaccagaaatctccacaggaacaaattccgtctttaaaatgatgaaacctatttgtatctctaatgaaaatctctctacctgcgtaacttgatataaatttaatgactgcatggca

SEQ ID NO: 1139 - DNA, 99231 bp, Arabidopsis thaliana
gaattccaccggtttccgccagaccttaacgctaggctagtctcaccaaactccccgggctctaatcagcagactggttcgtcctcgtcgcagcatccggatctggcattacagctgtgaagatgagtattggatatttgaaagaggaagaagaggcattttccattggctatctcagccaaggattttctggaatgaaatcttgtggaaagtcaaggcttatttgttgtgacatgaaaatatatgggacaagtctctctctatttgtacagattgttgcaacttccataatttttttaggggtaaaaagagaaaacaagagggaaaagaaaaaccacaggagtcacgcaggctgtagaatatatagtttatatttttttctcatttttctagaaattttcagatatattttcgtatgtcctaatcttggccataaaacaaagtaatgttaggtttgtgtccttggcatttcaccttttgtaagacttgtcagtttatttcttgcaagacttttgacggcttcgattttcaagttcctcgctcatgggaactcttgatttttttttgctaagatagttaaaatgttacaaattgttaattatttagttacgatatgctggtataatcgattagtggaatcacttgaaatttagataaacggtatggatttgttcaaatcaatatttttgagcttatgattgaccatcaaattctacattattacattagaaatctgaaaatctaaaatctttaaagtattatatctcattaaatcgtagtagatttattatatatcaaagtgttcgatcgttcttcaatggtcttaatttgaattttgtctagagaggggctcacggcatgcatcacgggatttacatgaacgtctctgtttggtgggtctcgacgtctcgtgatatttattttcctctcaaacccttggtttattctcttcaccactaataatcatgtaagaatattaacatttatcccgttcttggattccgattgtacattcgtcaggttcgattttataagtatgtaaataacttttttcggtttataatgatttgctctgtttatactagtttttacttcttttcttgaatatcacagctacaaaagaagcatgcaaaatgacgtaaatgttcttatttatagataaaatcaccaacgacgtcgttttcaatagccagcttctgaaaacgacgtcgtttgaagattaactcctgagttacgttttatgccatctttgtatatctgaaaagccctaggtttttttttaaatcgtcgagtagactagctagggtttatctagggttaatattagaggatggttaagaccggttatgtttggtcttctcttgggttactcaacaacgaatatgctttaacagatgctgatattgtgcatcgaaagatagagttagatcttctcaaatgtatagattttcctgagtttacgggttctgttgtaaaggctctgtatttatgttgtacacattcgatcgtgatcaataacacaaacaaattgatctctgaaatttttcagttaatgatgaaaacacggcgcaatacacgatcgatcttgttcgaattcaaggaaaagagaggagaaaaattcagaaacgatcccgttcgatctcgttatcgagatactcacgagattgccggtgaagtctatagcgagatttcgttgcttatcgaagctatgtgcttccacacttaacaattcagatttcaccgaatcgttcttcaccatatcttcgtcacgcccgaagctattgttcacctgccccaaagacggtgaaacattcttcttctcatcaccaaagcctcgtgattcttctcctttagcggtcaattttcatatgagcttctctattaatcatctctgcggcatttgccgtcctgtttgtggcttcatatatggattcaatagtcatacgagaatttgaagggaagaacaatttctaagccactgatatgtaaccctagcacaggcgaatcctggcccttaccaagagtgaaaacgaatagaactataatcacaagctattttgggtatgatccgatcaacaaagagttcaaagtattgtgtatgaccaaatcaaagtttggagtctttggcgagcatcaagttctcacattcggaactggaaaagaactctcatggaggaagatcaaatgtgacatggcacattatcctgatgttgtggattatgaagctagtggttatcctcggcctctatatgatgggatatgcatcaatggtgttttgtattacctaggccgagttcatgatgacttagacgggtttcctgatatagtttgctttgacattaaatttgagaagtttagttatataaagaaagctaatggcatgaaacgtaactcaggagttaatcttcaaccaactcttgtaaaccacaagggtaaaatagctaaactccaggcaaatattggtcctggctcaatacgatatacaggaattcaactatgggttttagaagatgccgagaaacatcaatggtcgagttatatctacgttttgcctcctccttggaagaatataattgaggagaccaagttacgatttgttggaacgagtgacacgggggatattgtgttgtcgccatgcaatatctccaactctttctaccttctctactacaaccccgagaggaacgctatcacgagagttgaaatccaaggagtggaagccttcaagtctcataaatcttacgcctttctagactatgcagaaaacattgttaagcctaagccaactcgtaagttgtaacgtacctagtccatgtatcttattggattgctgttgccttttgttttttactgatagtatctctcttctcttagcatggttcatacacttgtcagccatggttgttttaagcttaaattttttatttttatttccatgagcaaactttgagaatttaggctttgatgagttctatgttagtcatcatccgtatgtaaaaaaaaaaactacaatagagctaagaaagttagtttaagagcgagattgtagatggattaaaatcatgcgaaaatgtaaaggtagactctagattccaaacgaaaccatcacatatatttctaatcccacaagaaagacaaaatgcatcatatcgtttttttaaaaaagtggacatataaaacgatatttttttcaaacaaaaactaaaaaaaataataacagttttgaatgcatggttgcatgttaaaattaaaatagtagttgtgttatatatatatatatatatattttttttaataaatagctatggaaactaaaaggaagatttaatggaaacacatatgccattagtagcagtaaattcacaataatgttattaacacaatgcaaaaatatggaggacacataaaaaaaagagtttcaaaagtaaaagggcgctcataataattctctcttttggttcaaaattttaattccatcaacatgctttaaattgtagatgtgtgaatggtaacaagatcaacaataatgtcataaatacgagaaaaaaaaccaaaaaaaaaacagctcgatgataaaaagaaggaaaagaagcaaagatatgatagaaaaagataggtgaaaaattccaaacatatcagctaataattgattgatttataaagtagccattattattcttatgatgatagatacagaatttactaaaacggtaaataaagtcaaatgcggggaaggcagaggacagtatgtgtgacccactgtaatacgtaaggtcaagataatctaatctggaccgtccatttgtcaaaatctcgacttcaaaatccactgtcggcctcatgggtgttctcttacaaacactgtactgttagagggtactatagtaatttaaaccaagcgtggttatcagagaagagaaggggaccaaaccggtttaaatgccagagaagaagaagaagagtttaattttgtgggaaatttttttaaatatcgatttttgaatagaagatagagaatgagtaagaatttaattttctttattgaaaaaaatgggaccgagttggaaaagaacaaaacgaaactcgtcgtcttctaccacttaaatatttttcagtagctccaactaaaataaaataaatgagaagaacaaaaattcagttgttaaaatcaaagtagtgtctctaccgtgatttttatttttttctatatactgtttaaacctcagtttttttgttgttgttataagatccttgtcattttttgtcgtgattagatgtaatttgtataattttagtaactcttcagtttttttttgttttaaaaatatattttctctctctctgtcttcctgcaatctatcgccggccgattcaataatttcgctttactctgccaaaaaagtttgttcttttgttttctgggattatccaaagagaagaaacagaggaaatcaatctcttttttagtttcagaccctaaatcctaggttttgaagttttgtttctttagtaattttgtcaggttttgtgtctggtgttgggatttttcggagcttggtttcttgaaccagctccattttctaaaaattccttctttaaatccccattgttgtaagtcttaaagaaaaaagaagatgacttgttgtttctcttgtttgaatcctcgaaccaaggacataagagtcgacattgataacgctcgatgcaactctcgttaccaaaccgattcatcaggtactttcatgtccacaattcaataactttcattgtttttacctcaaaagttttcgtttttgtttatagtatttttctttgtggtttcagttcatggaagtgatacaacaggaacagagtcgatttcgggtatcttaggtgagtcgtgagtgtttcttgattatgtcccttttatggtgtctttttaacacattttttgagaataatttctgtcggaatttggaacagtaaatggtaaagtgaatagtccgatacctggtggtggagctcggagcttcacgttcaaggagttagctgcagctacaagaaacttccgggaagttaatttgctcggagaaggaggttttggcagagtttataagggacgtttagattcaggacaagtcagatctctctctcttcctcaagcccttttaaagagaaactctgtttttaatgagcttttgatgtaatttgatatgatttgatgaaaacaggtagtggctattaagcaattgaatccagatgggcttcaagggaaccgagagtttatagtagaagttcttatgcttagcttattgcatcatcccaatctcgttacattgatcggttactgtacttctggtgatcaaagacttcttgtctatgaatacatgccaatgggaagcttagaagatcacctttttggttagtttacttttactccattgttctttcaagtgttttgttgtaactatcttaagaatgttcagtttcaaatgttgtactcttttgtatgatttttcagatcttgagtctaatcaagaaccattaagctggaatactcgaatgaaaatcgcggttggtgcagctcgaggaatagagtatcttcactgcacagctaacccgccagtgatttaccgtgatttgaaatccgcaaacatattgttagataaagagttcagtccaaaactctcggatttcggattggcgaaactcggtccagttggtgatcgaactcatgtatcgactcgtgtcatgggaacttacggttactgtgctcctgaatacgcaatgagcgggaaattaactgttaaatcggatatctactgcttcggtgtagtgttgcttgagctgattactgggagaaaagctattgatttaggtcaaaagcaaggcgagcagaatcttgttacttgggtaagaaacttactaaatcgattacagcgtaatacctaaaatcctactccagttataaccaaaacttttcttatctttgcagtcacgtccatacctcaaggatcagaagaagtttggacatttagtggatccgtctctacgaggaaaatacccaagacggtgtttaaactatgcgattgcgattattgcaatgtgtcttaatgaagaagctcattatcgaccgttcataggtgacatagttgtggcactagagtacttagccgcacagagcagatctcatgaagctcgaaacgtctcatcaccgtcaccagagatttcaagaacgccgcgacgagacttgtaaaaactcaaaaacagcttttaagaatttcagtttggtgttgtgtaaaaatggttttttttgtttctttctcagaaaacaatatatgtttggtaaatgtttcgttattagtctcttttacttgatgtatatggcaattatggaaacaattaaagttcttttatatgtgtatctacatttgaaaaccacattcgaaaggaatttcagaagaaaaaaacaacaacttcaatttctcaggaagataggatctttacatgttcttctcttcttgtctctggtgcgtttttaaaaacaaaacccaaagcacctctcctagtaatctttcaaaaaaaccaaagataaaattatgaacaattataacagaacacaaaggtattactatcttttgtgtcatgtcctaaaacgcttctttttctttcttctttctctgatttaaggtcagtgccataaactgtattcagtagctgaagaacgttcagggaaatgatgagaagaagcctgaagcaaaagcttaatggtatgactcggtgtagttctgcagacatctacacactcttctacatcttcgtcgcaagtcaacaaaacccattcattgtcttcgtctaagtactttagatcatacctgctcatatcctctatgctaaaccgcttcccaatctcccacaatagatctcttaacctgcgcgaattccgcatccgtaatctgatcttctcttctccgtagctaactttaatcctcagaaagtcatcatcttgagatgataacaagttggtgccttgagggatgttttctaaactggagagagtcaaaattgtctcgtcaagactcgagctttgaagctcgatttcgctgctcgtcttcttcaatgcacctcctacatcagttgaaggaggatcggttgttgcaccgctgtttagttgggtttcactggagcaacattggctagagtttgaactgtgactatacgaggatacaggggactttgcaagctgcactggcggcggaggaggaggcgtggtcttggcttgttgtgatggttcttgtgactgtgagactaaattggggaaatttgcatagaatgagcctatgggaagaggaccagaaacaccttgaaccgaatcaatcactcgttggatcttctgcagagaatgtcccactttttttatctttcttgaaggccatctttgtataccatgctgtctgcatattctcttcaaggtcgttggacaaactgaaaatttccaagacaagaaaagggcaaaaagaagagatcagtctcaggactttccgataaattgaatcgagaagataaaaaaatgctgcttaccaccgatattcttggctgcatctttcaagctcccagcgaaatactgtcgaagaacatccaaagtgatggttttatctgcttttgtacgctttttctcggccatcatactgaaaccaccactagagaaagtgctgctctcattgacattagaatccatggtgtagtcaaaacctctttttaagccaaaaccatcatttggtttgtctcctccatcaaataccagtccaagattctgaggattactagtattattactccgctggatttcttcaagagaggcattccatggggaatttccgtggagttcagatgcgttttctatctttggcgttactatctcttccctctctatcacttcactctcttcttctagttctttgtctgtaacagtccttaagcttctaggcacatgagccataatagttgaaagagcattcaacattttcctctgttcctccagatcatcgcagtctttaggcaaaaagaactctaagacgaaatcagcagagcccgtgtggatgcaccgcaggcgaattgcaaccgcgccatgtaaaccgtacatattagcatggtgagagagagggtactctgatttcttgtagttagatacatcagatgaaaagcaaggtccattggtcaagaaggcttgacctgcaactccttggcctttcaagaggtgatgctcagagcaagcttcatggaactcacgaactgttggatcaccaacgtagcaagcatcatcaatggttgatacgcaatggatgtagttctcatcgttgtgacggcacccgcttttgttttgctgttgacaagaaacccatgtctgagctaaaggtagtttatgagtctcacaagcacatctcaagaggtttcggatttcaggtaaggcagctttgtaggataagtcacatccctgaataaagaagaaacaatcttgtttatacccaaaagctgaacataaggaactcatgtagtttctttgattacctttagagaaggtggaatcggaagctcggtgctcctaagatcaactgcctgcaaaaaggaaacacattcatcactctcagaaaaccatttctatagcaaaagctgaaagctttagagaagaacacaaacctgaagtgctctgcaaatgctttcaagctcaggtcttagtttaaccatctcagtggtcattacaacctcaataacacccaagcaaatcttactaccttgttcaaacaccggaatcgccagcgttccacggacatcgcagtcctgagcatggtgtactctcggatactcctcgctcttgaaaaacctaacatcaggagtccattcaggaagcttccccaagaaaaccctcccaggcaaaccagctaaagccttggaatcatcttgctcagcagagaagtgataattcacagagatctctctatagtttgcaagtctttgacacaacggatcatggctaaaaggttgttcctttgtggtcaaaactcgcttaccgcctctattaaccggaacccataactgaataagtgagcctctcgctgttgtgtaatctttaatgtgttcaactgcttgaaccaacctctcagtaaccgaagaaccaccacctcctggtccaatccaccatcgtttgttccattgaaactcatcaagactagatctttctacacaatcctgaccatacatctgagatacaactcctgatgtgcaaagagctgatgtatcttgagttggagaccacatgaaggaagttggatcaaaagggctaacagaagaagttgaaggagctatgttaagaaactcagatccatctgtagtctctaaccaacaaccatctagtaacaatccatccatgaagtcagcgtccataaccacgttctcagattgaaggaaactatcttccatggatatatctccaaaatcaatgaagcaacatctgcaaatgcgaagcacccattttcaaaaacaaacaaacagaaggtcgtgataggactaatgtgtatagaattcaccaaccgataaagtaggaaattgaagggcccaaatcaaaacttaacacgaatcaagcacaaatcttgtctaaatctaattcatgaagacaaaatgaaacaatccaaagtagacacacaaaaacaaaaactttttgtttgaatccttcaagctggtcaaacaatatggctcaatgaaacacaaaaaaaaacgaactttgaactaatcagcttcgtttacaatgaaaaatcaaacccttaaaagagaaactagatggaaaaactcacaagtcagagagagattctcaaagattccttcctcaagtgggtttttaaatttcctctgttgcaatttgttgtctgagatagaaggaacagatatgaaaagaaacccaaatctcaaaaccaaaagaaacaaggaaaagaagaaagctttaaagatgtctgatgggggttatgtggtactacttcttcacggaagatgaaaacaaaaaaagatgaaatttttaaaatgaaaattttgtggatcgttatctcatttatgcatcgggacatggcgagaccttactatgaattttgttttcatatagtatcacattactctctctctctcttccaggctgcttgggtttttttgactggaggagagatagaagattcctccactttccagagagagagaatacagacacagagggaataaacaaatgaccaacaacatgtctccctgcagtgaatttctatttatgtaaaaaagtcaaaacctttttttttttgttttgttatagcaaatagaatttcaccaataatcacattttgacttttttacataaatagaaaattcacaagaattttaaactatatgtaaataaaaagaatttggaatatctcatttgacaattgttaaccagaattttaaactatatgactgaaatattaagataaaaaaagaaatagtaaaagcattttttttctttaatattaagatttttttctaagctgactaaagattaaatactttgttgtttaatacaatcagtggtagaataagatcctaatttagtttttgaaaaaatcaaatataatggctgtacgtatctttaaaatataccaaatatctgatttcgccaatttgttcaaaagcttattgaatttggagactgattcttcaacattttattatgctggtgatgaccaaagcgaatcgttttcgatttttagacgctttgttgctgtttgaggataagttaataattattcatgtcctacaattgtcaattttgttacatgttgttataatctttttataattatgaaaaattaaagaatctttaaaggccactattatactctttatagcctataggcttatttggagaagttatagagtaaataaaaataaacgagtgggggagtaggttcttccctcaatttgatcagaaaaaatatattaatctactcaaattgacaatataaagtagttcagtgaaacaaaagtttctatttagtggagggtattgtgtaaccaataccatcttctgctcgtgaatagattccaccgctaacgaataaaagaaatatttatttggttaggcaaaaccattgattattaatatactttcgttttaaaagttttatgatagttcgaaccgagttctcacaaaaatgaaggatgttttcattgtttgagctagaacaattcatcaaaatatgttttcaacaatcaacatatacgtttctaattagtaaccacatagtaagaaatgaatgaattttgtggatttgtggaacggtttaatcgatgtggaaaatgtttttctaagaaaggttgtggaaagcggttcaattatgctttattatgtttccatgtttttttttgctataatcatttgtataggtcaataacttttgactgtaaatctaatctgtttttattttattttataaaatatttacatttttaacaaaaaaaaaagaagcggtttaattattggagtcattccaaaaacattcaaatgctcaaaaaaagagaaaaggacttgtaaaaaaaaatcaaatttaagaaaagatttggttgtgatcaagtcaagttatataagagattattcatggtctggttataatatggtacaacaaactgagaagggagaaaagacaaactgaatgatgctttaaaaaaggggtatgatagttttcaggaggggagttagattggacgaacaaatgtgaaatccacatttacgagtgagtgagaggatgattttataaaaatttacataattcgtattcggtagggtttcatgattattagtttggatcacgttagttgtaggacaaaatagcttttggcggatgggatatatataacatgaataagtactctagtgttctagtctagtatctcatatgaaaatatttttttttgtacgtaacggaaacgaaacgaaacgtaacataacagagaacagaacgtaaattaagtttattcatacaaatttaattatacgtaacaaggaatatgtttatactcgcaagtgtttcaatctacgttcacaggaagcgcaaagctaaaaagacgaaacaagtggtgcatgactgcgtttcctccacttaggttttgtctaacgtattctctaattaggtacactccacataatatttactcatgacttcacattttcaatcacattcatttatcccttttttttgccagtagtaagtgtgtcacactgtacattgttttattccggtcctactataaaagaagttggattttgatcttcaaaatggatttttactttttatttatataggtccaaacttaaacatggatttttatttttatttttatataggtcaaaacttaaacatggatttttatataattgtataattagtggactaccgaaatgctagagttttttttgtaaagagttatttattttatttgaaatatttatttaatcagtgaaaaattacttaacaaaatttaacattttaccaaggataaagctaatgaccaactttttcgtctaatattcaaattagaaaaatattcagaattcatcatatatgacacgtagttaagatctaaatatcatcttttagttttaaatatggtcaacttggttctctaattgactgaattatatagtgctttctaaataaaataaaaagatatttatttgagaatgaattgaagatgatgatatatattagtcagcattaaaaagttttcgttaggtcactcatatgggctgttgggagttttatatattttgatgaaacaaaatgcaacactcctcccatacgtaatattttccttcattgtgaagaactctggacaaaaagacgatcacaaaattaactatctttcgttttttttgtttctctgtggaagagacctctttatataacttctaatcttcgatcaggtttgtatgtacgaagtgtccggttagaatttagattttagatttttgactctaactaaatttagtggcttatttgaataaaatcgaagttagggtgattttggatggcttagataaacgcttagacatctgaaatttaaaacataagatcttatgttcaagtttagcaaccccatgttgaaatgtgtataaatcacatcaatatttaacatatggtataaaggcgttgaactaattactgatcccgtcatgtatagtggagtgtgatttgtttgttgaacttcataggataatagaaaaacaaacaatatatacaaaattaactgtggattacaaataattgtgttcatatatcttatccacttatataaactagataccatgatacttgagcttaaataattgatcacatccgccgaacacaaatcatggtcacatccacatgaattctttcattacttttgtttgagatttaagtcccaacgggtaaattggaatcttgcactactttaattgtatatagtttattgcctaaacagccaataatcagtttcacaaacaaataaaatataactaaaaacactccaataatcagaaagaaaccaatagaactgcaaggaaaacaaacttttttgagtaaccaatgaatttttaaactttgcaaatacaaaagaagattctgattacacaattttaaattatgatccgggcaaatagaatctcttttcatagggctttgaaacgtataaaaaatgattaatagttggacattgataatagagatcccttaatataatacacaaaaaatgagtccttaattgcaaaacaaaattagtataaggttggccgaatcattaacttccacgtcaaataattgtgataatttttgcacgtcttggttaggtataaaacctatataccttatttttggggtacggagacgatattatttatgttgagtacatttgttggtagacctagacgtaggtccacgaaattatactcttgcattatacacctcaaaacttagatatttacataattacattttatcgtttagtatagtgcttaagttccgtcacatgcaatcaaagtaaagtcttcttgatttcgtcatcaagatattgacttttcctaaatggatccgagatcttgttaacgacaaccaaaacacgttaaatttgttattgtttttcgttaaactgcaaagttatgaattttaaatgtataaaatcctggaccattagcaaacacagttcactataccatttcattggataaataatctcttaagatgcgtaacttcgatctaaaatcttcgcacactaccacttaacaagttgtaaaaaaaaatatgagactgaaaaatacatgagaaaaggatattattggtgattaagtttgatgtggctccatgtgtctaatttctgatttgcgctgaggttctctttaagaaaagaaactactggctgagagacatcagattaatcagactgtattagctgattaaaagttaagcgcaacaaagtataagcataattaaaattggtctgctctcattattctttttgcatttccactagcagcggaataatcaaatactccacccccacttacatgtaaattataaattatgaatgcgatgtagcatcataacgattgaccaattaaaaggtctgacgtgatgagtgatgactatgccaatttatcaaaatatggacagacataaaacttttttatcaagatcgtgcgtctgacattagaccccaataaaattccaactataagctcacgtcatagatgcagaagattaaaatacaaataaaaatccatttttaaagtagaaccaaatggatgatagtgatacttgtttactaagctatattagtcatagctttttatttatttgccttagaaaataatcgttaatattttgaaaagaagattacaaacaggaactagtacccttctttaagcgtttcattgtcaataaacgagattacttagaaaccaaaccgtaagaggagcatattgagtttataggatttcacttagtctttagagatgatatcattcagaagtttggcctcacgttaagacgagttgctagtttctgtcccagagatttgtctgcctgagaccagtaagagatccaaatgctgcggatttcgtgcgtgacacgaggctccgaaagcgcttcaacaaaacgcttcacgaatcgttcttgcctattggtacaaaacaaaagaccattagaatgaattatgacatttgtggttcatgtgtaattgttgattttgcaatgtggtttttgagtttttagtgtttacctgtctgaatcccaggaccggtatctctcccctggttgcttgaagttgttctccttcccgatgaagcactgtgatataaagatgacatttgagttttaactatgacttatgaggataaaacttgtgatcaaaaattaatgtatgtagaggactctgaccttctcacgatttccagagcagacaataggagttgtagggtatttttcggcatggcgaactggatccaaccttgaagggaagtaattgacctggaattggaaagcaacaaattcacttcatataaatgtgattgcgaatttaagtatctgggagtttctagagccgagagataagattacctcctcatccctgtgcatgaagttcataaaaccatcatggtgattgttgtggtgagcacatttaggggcattaacaggtagttgcagatagtttggtccaagacggtgtctctgactatcagcgtaggagaagatccgggtctggagtagcttatcatctgaatagtggatgcctggaaccacaagagcaggacagaatgcaatctgttcgttctcattaaagaagttgtcgatgtttttgttcaagaccaagcgaccaacaggttgtaaaggcaagatatcttcaggccagatctttgtgacatcaagcggatcgaagtcaaatttgtcttcatgggcaggatccatcacctgaacgaagagattccactgcggatagttcccggctgcgatcgagtcatagagatctttggtggcatggctgtgattggctcctccaactctgatagcttcctcatccgacaggcatttgatcccacaagtcggcttccagtggaatttcacatagtgagcttttccagctttgttgattagcatgtaagtgttgaccccagcgccttccatgtgcctgtagtcctgtgggataccgagatcatcaaagagaaatgaaaacatgtgcaaactctctgggtggtgggagaagaagtccagtatcctccagttctcctgaatgtgagacttgggattcggtttcaatgcatggaccatgtcagggaatttcattccatcacggacgaagaatacagggaagttgttcccaacaagatcaaagttcccctgagtttgcaaacagagggtaagaggaatcatcagtatagtatgatatgatttgcaagtaatcatataggtggtgaaacgaaatagataagcaaataaacgtttgaatatcagcaaacacatcgatatcggttatagaaaatagagagacaatggaaggataagacaaaaagctaacctctctggtgtaaaacttaacagcaaaaccacggggatctctgagagtctcgggactgccacgctcatggatgacagttgagaaacgaacgataacaggagtctgaacaccaggtcctcgaagaaaatcagcagaagtaagttgggtaatgtcatgagtgacttcaaagaaacccttagcactggctcccctggcatgaacaaccctctcaggaatccgctccctgtcaaagttagcgagtttctcaagcagatgatagtcctccagaaggattggacctgacaatatataaaaccatcgcttaacatatctaaaaatccaagcaactgagacagaatcaacattgaggaattatatcagatttggcataaaactgaaggaagaaatgtgatttacgcaagtccacaacaaaaacactaatgacattattatccaaacgtttataaaattatttggcttccactactctagctttaagggcatttctaacaaccactggttcaacatatttgttataatttgtattcaagagataagaaagagaaacggacctcgagttccgacagtcaaagaagagttgttgttccagacaggagcacccgagtttgtagtgaagaaaggggaatcatgagcgcttgaaggacgaacctgcacaccaacaaataaattcagaagaactggatcacaaaaaaattaaccaaatttccatagattggagaaacgtctatgacaaataatgatacattgatacttgatacataacaattccacataagtatatatgatcaattaaaaaaatacgatacaagcaacaatgatattcacaattgaacacagtgattaaaataactttaaaaaaatcgtaaagaaaccttaaaacatgtacaacgatattgacagatcacgtcagccttaagacttgtgtattagaacatgagcatgagcatgagcatgttgacaaataaacaatcaatagacggaaaaacatgttgaattttccagtggaatcttcaacgcatgcaaatcgaaacccaatctccactatataataaagaaatcgattcacacaaaaaaacctcaacaagtcgaacaatcaccccaattttgcatcattttaaccgagagagagagatcattcatacactttggattcaacacgaaatcacaccaaatcgatacgaaatcaagtaaggtaaaatcacagattacaaaaaaagagaatcaatcgatgtaccctgtatggatccatgatgcttgaagacaattttgatccgaatttttcttcttttgcgatttttaggtgagactgtgtgtatctcgcaaatcggcgtgtgtctgcactgttgtcgattttttttttatagcgagagccaaaatatcttattttagctcaacaccaaaacacgtatgtgttttgtctttgttaatccttatccaaatgataatcctcgtattaatagtcaaactaattacgtgtggatgatatcgtctttgatttcgccagatactataccataattagacaattgttgatccatttcaggattctccttaaaataatacatgttcaattacggtatcttctcttttttttcctgaattaataatatgtataacgaccaccataaatcttagaaattgtttactgcttcaagaaacattgatttattgtaaaaagagattacaaagacagtgagagtagaaaggaaggaaacatgagtttttgggattacaagcattattattatatagacaagaaacaacaacacatgtgattatctttttgacggatttaacgaccaagcgatgatagatcgatgagattgattgtacctcacatagactgagcttatatggagattggcctctagatgcttggcctcacgttcagacggcttgcaagtttctgtcccaaggatcgatcagcctgagagatacagagagataaataatgttttagtttgctgaaacttggtaaaaaggacgtagaaatttgaccgagtgtttttttgttctgacctgagaccagtaagagatccagatgccgcggatctcgtgggtgagacgtggctccgatagaatctccacccatctcttaacaaacctgtcttgcctgtctggtgcccatgatctgtacctgtctccagcctgtttgaagttgttctctttcttgatgacgcactgcaacattagcaattaaaaggttttcttagcaccaatattctaataaacttgagtttaggatttgaagatttagagaaggcatggcaggaatcggacctttgttcgaattccagtgtaggagtttgtaggggtgggaactttctcagcgcagcggacaggatcaaactttgaggggtagtaattgatctgtaaaaagtacaaaccaaatgagaattttgattccaagtaaaaagactaacaatggtagctcaagtggtgtactaagacgtacctcctcatctctgtgcatgaagttcataaaaccttcatggtgattgttgtggtgagcacatttgggagcattgactggaagctgcaaataattcggtccaaggcgatgtctctgagtgtcaccataagcaaagatcctacactggagcagcttgtcgtctgagtagtagattccaggaaccacaagacccgggttgaacgcaagctgctcagtttcattgaagaaattgtcaatggtcctgttcagaaccaagcgaccaaccggttgcagaggcaaaatatcctcaggccagatcttggtcacatcaagtgggtcaaagtcaaacttatcctcatctgcaggatccatggtctggatgaaaagtttccactcggggtagttgccagatgcaatggcatcgtggagatccttagtggcgtggctgtgattggctcctccaacaaccttggcctcttcatcagtcagattcttgatcccacaagttggtttccagtggaacttcacaaagagaacttttccagatttggcaataagagtgtaggtgtggacaccgaaaccctccatgtgcctgtaatcttgtggaataccaacatcatcaaacatccagcaccatgtgagcaaactctcaggcaagtgggacatgtagtccagaatcctccagtactcttggatgtttgttttcgggttaggtttcaacgcgtggacaacatccgggaactgaatcccatcacggatgaagaacaccggagtgttgttcccaacaagatcaaagtttccctgatcataacagtaacaagacaaaaatcagtcctgattctaaagaagctaaaagacgattaaaaatggaaactttgaatcttttcttatacctctctggtgtaaaacttgacagcaaaaccacgaatatccctcatggtttcaggactggcacgttcgtggacaacggtggagaaacggacaataaccggagtttgaacaccaggggctctgagaaaatcagcacaagtgaggtttgaaatgtcatgggtgacttcaaagaaacccttagcactgattcctctagcatgaaccactctctcagggatcctctctctggtgaaattagcaaccttctcgatcaaatgataatcctcaagaagaaccggacctgcccattacgaagtaacacatgttaaaaataatcacatcacgcttcacgaacaagatctcagcttagactctatatctcagttttatctctttcataaatccaacaagttccgattcttattgatagactcttgaaattcagggttacgatacctctttctccgatggtgagggaagagatgttgttggagactggagcaccaccgtttgtggtgtagaatggggcgttgtacgcgcttgaaggacgatactgcaatcaccattatacgatcgattatcaacaaaatccaggaagaaatttggtcaacaatcaaacggaatcgacaagaacaatccacaaaattttactaccaactgattgatttgataaaaagccctaattttttgtcgtaacccgaaacatatcaaaacccgtttcctgatcggatccgggtggtccatcccgacacgagtagtcttccgaccattatttgccaaaaaggctttagatttgatgacgcaaacagtaacatgtcggagagtagggttgtagataaatttcattttatccactaatatttattcgattattacacttttaagtgacttccgtatattcaagccttttgttcgatggatctacataataattttttatttttttttcgtcggtgagataatttttttgtatgtgaaaaaaaaatacacttgtattgatagatcgaccgacaatggtttgattaaccgaatgttgtaaaaaaagatttatcatatgtatagatctaactgatcggttatttaatttgattaatcaaacgtgtagatttgattactcaggtgtttagtagatctgatcaatcattttgttgatgattacttaatctgatttggctgatatcactaaaataatatacggtcggacgtctaaacaatcgattatatcatttgaacgtccgatttttagaacacatgtgtgtaataataataaaaaaaaaaacaacaacaaaataacttctaatctaaggaaaaaaacaacaaaaaccacatgtggcgtgtctttctcacgcagtggttaaacgttttaattaaagatagccagccaaaacagaaatcaacatcatcaacttaggttcaagcgatcacagaatttaagtaagtttttgagcataaaaagtattttgacccttaagatttaagaacatcaatccaattaaaaaatagtttagaaaacgagcatatatagttgaacctaattctaattaagatacacatacaccacacaaaaacaaagaaaaagtaagaagaatatgatcgaagataccttgtaaggatccatggtgatgatagaaggttgatgatcccccaaataggcttttgaggattttggtttagtgagagtgttgagatcctatgtgaaagtatatatagtgaaacagcgtgtgttatgcacaataatggattcccgaagtggaagggtacatttgtcctttcgagatcaatttctcgatacagtaaaaatgggccattgttgtttacttttccttggtgttaaaacaataatgtagtgcccccacttagatatttttttgctaggttttggctccaacccaagaaaaattcgttcggtgactaataataatcgctgaccccgacaagtcagcattgctcgttgttgtgctgtgcttctcaagagataaaaaaaagatacaatatcttttgaaaatcaattattgtgctgataacaaaagaaaaataaatcataaagtctaaaaacaaaactctaatggatgctccaaaaaaagaaatgatctaaaaaataattctagaaatgatttttctcttaaaacttccattcactttccaagttgtttatttccgtatttggatcttattactaatatgagttcatctatagtaaagtctgctgatatacatgttcgatcttatcgcatagaaactcgtgtcagacacgaggtggaactgtagatctgaggtttctttgttttaaatttttgtcttcaaaagtatatagtttcggaaaattaatcaacatgtgttacaacaaaggtgtctgtatttgcaattacaaaaatgcgtgaaacatgaaaataactaataccgtcgaaaggatataaacagtattggagtagttgaacaaaagtaattaatactactattcaaaataaaataagttagttaacttaactgggtgatattattttagtcttatccgatttgagcttgcgtacggcttttaaataaatcaatatgcagaaaagtatttaatgaattattaatagatgatcatgaatctataaattatgggttgaaaatttaaatacattctttataaaaatacaaaaagagagagctgaattgacattattgagtgggtatggtggggagtcgatgttgtggagcatatgacgataattaacacgttacttcgatgatgaactgatccacaatttttgattgagggtaacttggggtccctttagtgtcaacaagttgctcttgttacttagtttgatattattatttacaactagagctaggtacaacaatcaacagtaacatactattctcagaaagtggcaatcattagaagacaatcttcatctatctccgtttaacagaattcatttcgcattcttttatatatttctttaaaggacatattgcgcagttgcccccctccataaacattgtagtagctctgttacgaaaacaacaatccaataagctataagagataaaagtggagtagggagatactctcgtagttataaatttacttgtttataatttagacatttagagttattaggacttttaatcctctccagtatgccgcatatatattaagtgcaatgactaaaataactcaaatgcagttttttgtgtgtgtgttattttgtatccacatggaccacatcacgtggagcacatatgacataaccaaatgtggtgttactatcactggtaaaacgtgttgtttcaaagttattggctccatttttgatgatagataatttcaaatcacagaatatatcttcgtgttatcaaatgttgagttaattacaaattagaggatatatatgctatccaatattaatcctaaacctgaagtaataatgaacccaagcctgatatctagattcaccccaaaaaaagaaaaagaaattgtagctatgtaaaaaatatcatagcccccgtttttttttgacacaaaatatcatagtccccttatcagataaagttgttgaaatcgtcttaccacggtcaagtctcttcgtttagtgacgacaaaagtcaaaaaatgccagaagctttgggaaagtagtacgtagcttagctaaattgtactatgcatataattaaatttgtagagttgtgtgataatattctcgcaactcgcaagtttcgtcatggtgcatatgactgcatgcgggattgtcaattgttttgtagcgaagaacttaagagttttttcagccgtagaattcgaatatacttggtatttaacgaccaaaattctatatttaactgtgaacataacgtattgggattttgattaagtaccttaactatagaaccacccggagattataaaaacaaccagtttaagatagaaaaatatgatagtaaaattgtttagttgtcagtcttatgcataataaatagattggtgtagtgttttttcgttttttttttttgttgaatgtgtatgtttcattttgttactatatgcgtgcgtgcatataccatatgatccgtaatttatttactcagttacgtatacggtatttcttatacgactagtattagctgctatttcttataggactagtattagctgctaaaaaaaaaaaacagcatagctccatgcgagaaactactgcttaattaatactgacataggatatcaactacttcacacccaatattttcttgaggtgtccaaactaaataaatagagggttaccaatactatatcatacatatatacatagtttttatatacagtacataatataacacgtaacgctctaagattttatcgtggtaaaattgtgagtcaattaaaacaacgtaaatttttatttttacatttcaaaagtaaaaagtaaatatagataatgaacgttgacgataatgtttaggcaaattacttcacgggctatactactaaattatcatatcataaacgagggcaactgagaaccacttacaggctgccacgtagaaatcttacccttgcttagtaactttttggtgttaacccaaccaatgaaaattcgttttggtggttcaacacgacaaaaacgggattacaccttatcctttctttctttctttttggatttcgaattttgtcaatggagttgaaaaatcaaagagaaggacaaagctttctggcagtcgaatcttttggtacctcgttttcttctcagatggggacctaactagctttaagttcattcaatcctttttggttattcataatgatgttagtatataatttaccaaattgtgaatctcatgatactaattatgatttaaattaacaaatttcgtagttatattttcaagaaaataaaatttcacttgtaggattactcattttcattagattttaatgtacattatactgtgggtttaaggttttgtgttgtttcttttcttatagattttcaaaatatcaaataaattactaatcatctaataatgcaaatccttttaaacattgtttggttattattagaatggtacccttattagaaatttaaaactattgaccttatacatagtttatcaatttttacaagtccaatacatttttgtgccacaggcccaccaagcctaatatatctattatctaagatactaatgggctctagtctggtgggtaagttttgggccaacctgtaatggaaaaaaaaacagttgtattcattaaacggatattaattacaagagactgagaacttatgcaacctaaaagatatacatgtcaatttaaatgccaataacaaaaatctgaaacaagaacttatagaatgatctcaaacttaacctaatggcatatcatatttatttaatgtatctatatcaatggaaacaaaatgctattgttgtgtttctacatagaaacgcaatgttcacacttctacacaaatgacttgattgatttaaaagtgattgatagtaaatgcagtatatcaatgccattatcatgtaaacaactctatatatctttttcccataaaaatatagtacgatattctaatgatacacttgaagaaggtctaaactttgtgtgagatttcttactcgaaaaagaaaatcatttaacttgagattaatataaatgtatttgatttcttaaacgagtcttggtttttggtcaaaggtgatgtatttgattttttaaataatagtattttatttgttattatagaaatgtatattatatagtgtaattttcgaaaataaaataaaaatagttgtctttcccaaaataaaaaagggaagggtattatcattcttactcggaagaatcgaaaattaagtccatttttttctactgtttatcttacactatttttgtggcaaatacaataatacctctatattatataactattcttattgccataccactgtacctgtgaagattacgacaatgatagtttttgttcagattcagttcaaattggttaacaatcaaattaccgagttaactaatactttatctagaggtagtgacaataataatcttattggatgaaattcatattttgcacgttatagtaactcgttaatttttttatatgatataataaatgagttaagacggtaaatataaatatatcacataagttataacttattgcgattcaaaatgacttagcatgacataattataaatttattgatataaatattttgttatcatgttaacctaataaatattaccgagatatttgttattgaaaacaaaaaaaacccaaagaatttgaataagtacacatacacatggatgaaaaacaatgatagccgttgaacataaggcaactttcgatttggaacacgtggcattaatccaacagctgatatgaactaggcaactagctgttaattttaaagatattatacagacaatatatccgctcttctagtcttcaaaatctctattattctttattttttctttttttctttgcccttgtagtataatattctaatgatacacttgaagaaaatctaaactttgtgtgagatttcttgcttgaaaaagaaaatcatttaacttgagattaatataaacgaatcttggtctttggtcaaaggagacatatttgattcttttaaatagaagtgttttatttgtttttatagaaatgaatattatttcatggtgtaattttcaaaaataaaataaaaatagttgtcttccccaaaatagaataaaagaaaaaaaaatcaaagaatttgaataaatctatacatagatgatatacaattataaccgttgaatagaagacaactttcgatctggaacacgtggcgttgatccaacggctgagatgaactagccgttaattttaaagaaaactaatacactatagacgctcttctaatcttcaaaatcaatcttactcttttttttttctttttttctttacccttataaagagagatagagagagagtgggaagtatcttcaaaaccgaagccattagagagaaagagagcgtggttgaatctttgggttttactaaaagatctctctttctctcctttgtttgatcaacttggatccaacgggataaaagactattagggtttaggagattcactgggtttcataagaatttatgatcaagggtcgacttaatctcgcgttggttctttgaattgactgtgaaaaggtgatttttttgaaaaaccaattcgtgggttttcgttatcttctgggtatttgagatttaggtctttgttgttcttgattgggtctttcattgagattattaaaccggatctatagggttttgattgtcaagactgtttttttagtttcaattttgaaaacccctgcttttaagttgggggatgtttcgattttgaaatttgatttcttcaagagaagagatttaatgaaaataaataacttccgcagataacgaagaagaagaaaatggttagatcagatgaaaatagccttggattaatcggatcaatgagtctccaaggtaccctaaatcgatcgattttgttattaaaaatcaaaactttcgttctctttgatttttcccccaaattgattttgaatttacttgatgtagggggaggagtagtaggaaagatcaagacgacggcaacaacaggaccgacaagaagagcactaagtactattaacaagaacatcactgaagcgccgtcttacccttatgctgtcaacaagagatcagtttctgagtaagttcactttaatcctcagattcaagattagtgttttttttttcttctccctttgattagactcttataggaaccctatttctttctgtgactttgcagaagagatggcatttgtaataaaccacctgtgcatcgaccagttactaggtaagcatagatctttactcttgtctactttgagtatctcacattgtctgattacttaacttttactactctctgttggttcaggaagtttgctgctcagttagcagatcataagccacatatccgtgatgaggtaccctattgttcaatgtatgtttcatttagagcaatgatgatatagaccggattttaaagttctgatctttaactcttaggaaactaagaaaccagactcagtttcaagtgaagaaccagagacgattatcattgatgtggatgaaagtgataaagaaggaggtgactctaatgagccaatgtttgtacaacatactgaagcaatgctggaggagattgaacagatggtatacatatttcctaaccattctttgctttgtttatggaagtgttaatatagttactcatattgtttgtgtctttcaaaaggagaaggagattgaaatggaagatgcagacaaagaagaagagcctgtgatcgatattgatgcctgtgataagaataatcctttggctgcggttgaatatatccatgatatgcataccttctacaagaattttgaggtgaatttgtcttgtttcacatcaacttttgcttttgtgttctttatcatcgaaaggattgtagtttcaaaatcttgtacttatgtttgattcattcttatgattctgcagaaacttagttgcgtgcctcctaactatatggacaatcaacaagatcttaatgagagaatgagaggaatcctcattgactggttaattgaggtagacagatctagacaaaagctatttaatgccactttttttgtctcaatgtgcctgaagataaattgactggaaaattatcttgtccaggtgcactacaagtttgaactgatggaggaaactctttatctcacaatcaatgtcatcgacagattccttgcggttcatcaaatcgtgaggaaaaagcttcagcttgttggtgttactgctttgttgcttgcatgtaaatatgaagaagtttcagttccagtggtagatgatctcatcttgatctctgacaaagcttactctagaagagaagtgctagatatggtgaatacacaactttgtcttgatcattaactaccactggttgatgcttcatagttgaatttacctgtttttggtttctattgcaggagaagctaatggccaacaccttgcaattcaatttctctctaccaactccatatgttttcatgaaacgatttctcaaagctgcccaatctgacaagaaggtatatatctccctaactaaaaaagcttgaatcattatatccggaaaccatcaggcctaatatctaaatcggtgtggtatatgcaattgtggtttcagcttgagattttatcattctttatgatcgagctttgccttgtggagtatgagatgctagagtatcttccatctaagctggcggcctcagcaatctacactgctcagtgtacacttaagggatttgaagaatggagcaaaacctgtgagtttcacacaggctacaacgaaaaacagctactgtaagaacatacattgatttttttgaaaaccccatgacatgagattttggtatcctgacagtgggtttttgtgttttttctagggcatgtgcgagaaagatggttgctttccatcacaaggcaggaacagggaagctcacaggagttcacagaaagtacaacacatctaagttctgtcatgctgcaagaactgaaccagctgggtttctgatttaatattaataagaatctaatatgacttaactcgagtttttctttagaacaaaaagagtgtgagagaaagagagatagtagagcaagttgcccaaaatgggagaagaatggatctttagatatcatggcaagtagcccaaaaagagtgtattcttctctttctaaggtctttagatctttcttcacttgagagagaataaaaagaatcttctgatatcatgctttcctatattcaacttgtgaatcgattcttgtatagactcaggaaaatctatgatccagtttggttaatattactcgggagctgaacctctagactgaatcaaatattcttctacatgtcgttttggtactctggaactgaatctctagaccctatcaaatattctacaagtacatggcaattttttggattgtaatttgggaaaattgcagttgacaaggtttttacatgatgaaaatacaagtacaatattcttttatagcttatatattaatgttataaatgaccatatagactacgttatttagacaactcaaagtctacagtattgcagtctttattgaaggaggatataatcattacttctagtatttcataatcttgttccttcaatttatctttgttttctgatcttagtcttattaagacctttatgaaaacaatgtactttgttttactcatctactgtcagaaatggagaatgcgcaaagaagaaaatagatcacaacgaaaacttgtcaatgattcaaacatcttggtaacccaaaatacagaactagtagtgcatctggacatatctctcttgttctcctttgtttggttttacagtgttctctaagaagtgttgcagcacctgactttgctgcctcgaatgaagacatgctcaagctgtgataccttaccatcctgtaacatagcaatgaaaaaccgaaaacaaaagttaagtgacaattattaataaacaaacccattaagttgacagattatttatgaatacttatgaacaataacacattaaaagagttaaagactttctgaactaaaaaactacaggtagttctttcccaataattacaggttcattcaaaacccatacagcacattattcgcaaagaagacgaagctttaagacctgcatacttgagactattcacatttgaccactgtattaattcttgaagatctcaccctaatttggattcaagaaagcagtagtcttcaagatcatcccactcgattagttaatttcttaaagaaaatgtaacgtagtgaatagcaaagcaaagctttcgagtctttatgtgcctaaacatccaaacagtgacaaaatcagaagtcttcaaaagaccataatctgccacaaactgcatccaccctgaagttaagacaggtgttttatccccattccacatcttgaacttcatctgttgaacttccccgtctggtccatacaccgaaacatcaaccccctttaccggatcctctgattcttctagaaaaggaagcatcttctccttcacttgctccttcgataacatgagcctgctttgatctgtatcgacgtcgctcgacatcaactgcttctttatcggtcggctgaatcgcctcgtcacctcatcatcgccgaatatatcctgtggatcgagttcagcgttgtaccaatcctcaattaacctcagagtttcttctgaaaagtcatggatatttattttcatgatgttctgattcttaaccctcttaggttgatttttttcagttttttcttccctcttcctagactgcttttgattagcttggcttactagtaataatggaagggacgcaacctcatcatctatatcgtcttcatcatctatatcctcttcacgatccataacatcttgcatcaattgtgctaatatgtatgtaacttcttcatcttcttgtgttgaacttgtcggtttacctgttgaattcgccatgatcgatctctcacgttctctctatcttaccttgctgaagaacctatctatagggtttgtttttttccttctttctagcaaatcaatttccttttatactttgattttccatttaaatcatatatatgaaagttggccacctcatattagtttagtaattttagttagatatttttttattattacgttttgtgaatatgattttatcatatgaccttctttctgtatatttttgtgcgttctgataacttggtaatattgataaacaatttttttcacgtaatagtcatctgacacattagacataccaaaaaaaacataagacattatattgttatatgcaaaagaaaataattaaagtgttgacttaaattactagcatatcatgatgtgattgtttactagatgacaaaaaaatatatggaataaaaaattgtttgttataattaagttagacaagtttcaaaacacataagtaatataactacattcattttatcaatctatcatatattgttgttgtatgtgattatgatagttaaatattagaaaaatagatatataaattttcatattatagtagaattgatatttcgagttatagatgaaactaatcataaaaattaataattatattaaatagatatgaattatagtaataattatattgaacatcaaaataaaaaaaaaaccataatcatatttttccgacaattcaaaaaacaaaaaccgatgctacgcatgggtgttcatctagttgtaattaataaaaacacatttaacttttttaatcgacaaaataattattttaactctgtaaaaatactgctctgtttttcaaaaacgtcaatgagagatatagactagagacctctctaatagctgatgatgaattttttataataaaaagctctgtttcttgataccatgtcgtataaatttctatatcatacatgtatatgctctacttgaacgacttcttatgtaacttgagttcttgttatctcaatacaagttatgtttgttcattcttgtctttagggaaaaactaagaagatttttgtcatcgacagattccttgcggttcatcaaatcgtgaggaaaaagcttcagcttgttggtgttactgctttgttgctcgcatgtaaatatgaagaagtttcagttccagtggtagatgatctcatcttgatctctgacaaagcttactctagaagagaagtgctagatatggtgaatacacaactttgtcttgatcattaactaccactggttgatgcttcatagttgaatttacctgtttttggtttctattgcaggagaagctaatggccaacaccttgcaattcaatttctctctaccaactccatatgttttcatgaaacgatttctcaaagctgcccaatctgacaagaaggtatatatctccctaactaaaaaagcttgaatcattatgtccggaaaccatcaggcctaatatctaaatcggtgtggtatatgcaattgtggtgtcagcttgagattttatcattctttatgatcgagctttgccttgtggagtatgagatgctagagtatcttccatctaagctggcggcctcagcaatctacactgctcagtgtacacttaagggatttgaagaatggagcaaaacctgtgagtttcacacaggctacaacgaagaacagctactgtaagaacatacattgattgtttcgaatttttttgaaaacccgatgacatgagattttggaatcctgacaatgggttttgtgttttttcctagggcatgtgcgagaaagatggttgcttttcatcacaaggcaggaacagggaagctcacaggaagtacaacacatctaagttctttcatgctgcaagaagtgaaccagctgggtttctgctttaagggaggaaaaaactataataagaatctaatatgacataactcgagtttttcttttgaacaaaaagagtgtgagagaaagagagatagagcaagttgcccaaatgggatatgtacaatggttggttcggttcttctctttttaaggtctttaagatctttcttcacttgagagagaataaaaagaatcttttgatatcatgctttcctatattcaacttgtgaattgatcctactaatttcatgtataatcgttgtaaaatactcaggaaactctatgacccattttggttaatattactcaggaaccgaacctctacactccatcaaatattcttctacaagtcgttttggtgtttgctggtactctggaactaaacttttatagactaaatattgtacaagtcattttggaaattttttggataatttgggaaaatagcagtagacaaggttttacatgttgaaaatacaagtacaatattattttctagcttatattattaatgttataaatgaccaactttgttttctgatcttagtcttattaagacctttatgaaaacaatgtactttgttttactcatctactgtcagaaatggagaatgcgcaaagaagaaaatagatcacaacgaaaacttgtcaatgattcaaacatcttggtaacccaaaatacagaactagtagtgcatctggatatctctctctcttgtttggttttacagtgttctctaaagcattaatgacagaaccaagaaaggcggctttcacctggatatcacagaaagactatcccagaatcaaagcttacatgttgagcgtaaaatcaatcatctcctcacaggtggtaccgctccccttcctccagttccacgcccgggcccggcagccggctttaagataatatcacaaagattcaagaatctaaccattagtagtgacaaagaagaaacaaaccattaagggataacaaggatttgaacatcttaacaagttccataaaacttcctaacattgcattcatgagcactaaatcataagagagagagggtgaacttactttccctcgcattgcacctctacctctgccaacacccagtgatgagctctttccctacattgattaagcaagtaaggtaagatgtttgttggagatatgtatagagatcctaatatcattctgcatccagggttcaaaaagcatatataccttgattctagcatctaaccgcttgaacattggagcatgtttgagaatgtctggtatgaccataaacctgtcaagatatatccgcaggtcaattactaaacagctagggttaacaagaatgatcccatgaattacataaacaaggaaacaagtacagcacctgactttactgcctcgaatgaagacatgctcaagctgtgataccttaccatcctgtaacacagcattggaaaacccaaaacaaaagttcagtgacaattaacaaacaaacccattaagttgacagattatttatgtatactatgaagaataacacttaaagagttaagactttctgaattgagaactacatgtagttcttttcccaataattacaggttgactcaaaacccatacggcacaataatccgcaaataagaggacgctttaagacctgcatacttcagataattcacatttgaccactgtattcctaaagagcaacttaggctttggataaaacgttacaaagcacaaacgtagaacctttcttctcagttattgatgtgtcctatagatcaataataagtttaaccaatcagaggagactataccctacagtcaaaatttatctaatgtcactggcaggatcacgcattctagggttttatacagcatgaatttcaaggattcttaatctcacttagaacttaaaataagaagcaatctaaaatttcccagcaaatttgcccagctcaccaaatctagggttttaacagcactaacatcaaacaatgaaattgaaacgaaacctatggttcaaaaaacagtctcatataaaatgaatcgagatcttcagagtatcagttgattaccttggcggtataagtaatatcctcgagctgacagttccagttatcctcacactcaatcatacttcctctgtaaagctcgccgctctttagctccaccgtcacgatatgacctgaggcctcgtgaagaagcttcaccggtattcccaaacttcggctcatctttctctctacaaaaccctaattgaaaaccttctcctttaactctgcaacctagaaagaaaaaaatggcggaaggaaagaagagcgactcagatgcgattgacgagtttacctcttttaaagctttcctgatttatttttgggctttatataggcccatatttatattaggcccaatttgagaaacttgctttttagtccctatatttgacattattttaatccttatttttgtacagacgacggctgatttcacgggttaagacgaaggaaccaccgttaccaaaactcgccggaagagatggcggacgagatggagaccaaaggagagaagaagtacaagtatagcataatcattcctacctacaacgagcgcctcaacatcgctatcatagtctacctgattttcaagcatctccggtaaatgaatatttatttcttttggtcttttcacgttcattctttcatttcagaatcggaattacgttttttgttattcttttactgaatactcgaacctgatcgccaatttcaagttacggatctcggaaattttccgatcatgtttctgtagattgcagatcctaattcgtgatttgttgtttctgtgcatgagctagtaaaggccaatgtagtgatccctcaaactatatagtagtagtttcatggtgttttaaaaactttgatttagtgatcggagaatagtcagaagctacatgtgctaatcttagatcgattctggttatggctgcttatatgaaattaatatagaattgcacttgttaagtagactctttgttaactgttactgagaatttgcttcgctacttgtttgtatgatttagggacgttgattttgagataattgttgtggatgatgggagtcctgatggcacacaggaaattgtcaagcaactgcagcaattgtatggtgaagaccgtatcgtgagtacaatgatgtgttaagaccttaatttgtaaattattgggcgttcttctgtttaggtgaaatcatgtttttatcttttttatgatgcagcttttaagagctagagccaagaagcttggtttgggtatgtaatttgtatcttcattgtcttctagttttggttaacaagaaatgaaattaattttcttggcatggtcaatctcaggaactgcatatattcatggtttgaagcatgctacgggtgatttcgtcgtgatcatggatgctgatctttcacatcatgtaagagccattaatttagttttcttgtttacctgtttaattgtttagctaacccagtcacttttcttctgtgcagccaaaatacttaccaagtttcatcaagtaagaaaaagaagagtctcttgatctcttactagtttcacaacctatagtgacttcaactgatttgttttttttcttattatcataaaggaaacaactagagacaaatgcaagtatagtaactggtacacgatatgtaaaaggtggtggtgtacacgggtggaatcttatgcggaaactcactagtagaggagcaaatgtgctagctcaaacacttttatggcctggtgtatctgatttaacaggatcattccggtataattcaaataacatatgcgcatatttttaactgacatcatttgatagtatcatgtctgacctccgcacctctttgtttggaaggctatacaagaaatcggcgcttgaagacgtgattagctcatgtgtgagtaaagggtatgtctttcagatggaaatgattgttcgtgcaaccagaaaaggataccatattgaagaggtctctctttttataccaattcactgtgattttgattctttctaaactatatttccattcatattcttgattctctggtgctcatcttcatctgcaggtaccgatcacttttgttgacagagtctttggaacttcgaaactcggaggatctgaaatagtggaatatctaaaaggcctcgtctatctcctgcttacaacttaagacacaccaagcaactcaacaacacacgagtctctctttatactcttcatttgttccattgcttcatagatttctcttaacagttgaactctgatcatgtcgtttagaaacttcacttactttgacttcagagagtcgcatcttttaagactcaaaagttcatattatagacattgttgattttgaatgttgagttgagatatcttacatttcataaataccttaaccaaccaaccaaagaaggttttatgttttagatcgttcgtaatgtgataatctttgtcactgcgacgggcctttataatttgggcccatttgagacctttcttcacttgctctcactcactctctctcaaattcacccacatcaaagcttctccgatttccctccgaaccaatttggtatgtgaaaatcaaattcacagtgatgtctgagtcgttgcttcgtattgatcacgccggcttagacaccctaattccgggaatgatgtgcagtcacagagtttggacacactcagaactagctcctccttcagtgagcgtgaatgaatcccatctggtaatgccacaaacactactcttttcaaattcttttcggcaaagcaacttaaaccctttttctccggaggttaattaggtgaaaggtctcttacaagctttgcaaggtttctctagtcccttcattttctgggaccgaaaggaacaaactttccgcgctaaaagtgagatacgagtttctcatttgtctcagtcaagccttcatgtccttctcgctggatttttgtatgctgctacatgtttgaagcttgtggagtctattgttagtggaattaatgcctctcttaaatctcctcctactttaatggcattttcgaactctgcctctggttggcttgaggcaagtagtccacaactccctattagtttttttatttatttatttggcttgttcttgaatatttgagactgatgtacaattgggtattggaacagagacttagagatattgctttgaatgaggaagtgaagatcaacgattctaatgttgctgttactccaactcttttgggattaactagttctttatctaggtgtgtagcctagatcattttcatatattgaatgctgtttctcggttcaagaactatatttaatagcagtcttcagtttttttctttctatttgctagtctgtgttcagatgctgaataccttttccaagttgtacgaggtgcgatccctcatgcgtattttgagtcgagttcggctatttcaacagctgaaattgctgtgcacgttcttgattacctttacaagaggctagatgaagtatgtcttgtacaaggtggtgagcttgtggccgtttttttgtgttcttttttttttttttttcctttgttgttgctcacttctctaattggattattgaaaatatttggaccaggtggaaggatttcacatgttattgcaaatctttgctggaagtttattgccatatgtagagagtttggattcatggttgtttgagggaactcttgatgatccttttgaagaggtaggtgttcttggggttttatttatgttccatgggcgagaaactattttcctctatctttttgatgccaacatcaaagtacattctttacaaggcgagcaaattgaaagtttgatgatgatgaattccttagttgaggtgaagattaacttttgtttcctcgcagttgttctttacagccaaccaatcggtctcggttagcgatgcagagttttgggagaaaagctatctgttgacgagggtgctgggtccaaaatcaaatgtaacttcgctaaatcaaaagaaagggatgagtggaaatgactccaattcagtttctgacaaagacaaagagcagaacaatcgggtgttatgcccactgttcataaaagacatatgtaagtcgattgtttctgctggaaagtcactgcagctgatgcagcatattccttctacgtcttcagaaaattgtgaaaagattcagtaccatgggcgaaatggttttgggaattctggctgtggcatactcctggctggaaagaatagctttagaagcattgcagacttatccttgtctgaaatattctgtctatcacttgctggcctcataggccatggtgatcatgtatctagatatctgtggaaagatgagacagatgagtgggagatttctcctactttagcatcatatataagtggtaagctagtgaatggcacaggtgatcttctcacatactcagagcgaatgtggtataagttgttggttggtgctgtgcaagagaaaaaatctatagaagccaaatcagaactccagagtccatgttgtgttacttgtgttaaagaagaaaaaaatgttctcgctgccgaaaaggtgttgcaggggttgttttgtcatgaaaaccttgttgtttcagcatctaaaatggatcttgagaggaataaaaatgcctggcatgtcttgaacttatcagagaactattgtctaccctctctaaatgataagagtttgttgagtgctgtttttgagggatctggcgttgcaccaaaatttgtcggaacaaactacaaatatggattccaattcggtagatctgaatatctttcttctcaagatgacaccaaaattctagaaacgttatttccttttcctacattgctgccgtcattccaggtacttagatactgatcattttatgtccatttcttcacttttatcccatgtgcaatagtttatgatagcggagtttgaaatctttgtgatcaacaaaaaagtcgaagctccatatgtcagaattcctaccttaccaaaagaatagtacacttccttcaagagttctcagctggatacttaggacagagccaaggaatactctacttcctgttgtaataatgcaagaatgcttcacaatcaacatcaggaggcaggtacggtgatgtaagctgtacattgccacttgttgctacggtatgcatacttttgttacgttctgatagctgtgcgtgttgtaggtggacaacattagcaaagtgattttttcaaaactaatgaatgaatggaaattgatgcacgaacttgcggtgttgcgtgccatttatttgttaggttcaggtatgttttatgtgctttaacctttttggcaataggattgtaactggaatcttaacaaatcctataaatttttcaggggaccttctgcagcattttttgactgtcatatttgataggctgggcaagggagagtcatcaaatgatgattttgagttgaacataatcattcaggtaaccaaatttaatgaacttctttcttagagacacttctctcatctttatagtctccagtaaatagattcactgtttgttaactgtttgcttctgtatcactgttttctgttgccgtatatagtgtttatacaaacaaactaaatttgaaattgtacaatttacaggaatcaattagaaattcagctgataccatgttgttaagcagtcctgatgcattggtggtatctatttccagtgaagggtgtttggacagagacaaagatgacaagggcgacgtaaaatccctttcttcacctcgtgaaagcagcgttaacaattatgcgatagattgccttgaatctctcaaattcacatacaaggtgtagagaaaaacatttagtcttacacccagttgcagcgtagtgacatattacagtgctaacatctatctgtaaaagatcttaactattttccttttaaggtgccgtggccgcttgagcttattgcgaacagcgaggccattaagaagtataaccaggtaaccctttctcatccagctatttttttggggaaacagtgtgatgttctatgtgttaattgtttaaatgaaaacaggtgatgggatttttgttgaaggtcaagcgagcaaaatatgtgcttgataaggcacgaaggttgatgtggaaggtctttgatatctctcaaaccatttctttccatttagactgcttcatttgacatccgaatccaatctcagatagcctgagtagtcttttgatatacgtaatgtactgaggagtcataatgatgtggtttagtttgataaacttaatgactttggtgtttatgtattatagggtaaaggctctgcaacaaaaatccgcaagcaccactgtttactggaacaaaagctcctcaattttgtggatgcttttcatcaatacgtaatggatagggtaatgtctaatactggataattggttataattaccgacaaccgtattagtttccgtagttataagtatgtgcaagtgttgttgcaaaattggaagttgatgttatggcttcactgggttttacaaacaggtatatcacactgcttggcgtgagctgtgcgaagctatggtaaaagcagggtctctagatgaggtcatagatgtacacgagacgtacttgttatcgattcagaggcaatgttttgtggttcaagaaaagctggtaattgaccatttgtatatgcataataagtattcggatttgtagctataaaaccaagtatctggtgggttctgtacacagtgggcaatcatcgcaagtcggatcaacatgattctcggtttagctctagaattctactcaatacaacagacgctgagcagcggtggagcagtttcagctatcaaggctagatgggagatggagatagaccgcatcgagaaacaattcgaggactgtattgctttcctccttagagtaagaccactctatccaaacttcggtgcactcttttcttgtctcagtttagtaaatatgtactatcggaacttgcaggtattgacttcgaagaagaatgtgggacacttccctcatctggctgatttggtgaccagaatcaattacaattatcactacatgtctgacactggaagctcgatgactgcttctggatcatagaccaactcttccaggtccattgaactaaatcccaaatgaatgtgtgcaaaaaaaaaaaacataaaattattattatgacatgtttgagcaaaaataatatgtggtcgggacaggtcactaccagtagtcgcccactagtctgattgcaaaattcaaatagaaaagatatatgataatacgacaacaaactcaggctagattacagagtagttaacttatattatatacctcctcgatgcacgagcgagcaaaactactactgtactacttttccggcgataaaatctatgaaaatggagggaactatcaaatctccggccaactacgttcctctcactccgatcagcttcctcgatagatctgctgtcgtctacgctgacagagtctccatcgtttatggctccgtcaagtacacgtggcgccagactcgtgaccgctgcgtcagaatcgcctccgctctctcccagctcggaatctctaccggagatgtggtcagaacttctcgttcatcgatttctccctttttcccttcttagctagtttaattagttgattccatgctatttggagatcttttctgttcatagatcgaaacttagtttgttgcgttttctgattctcaaggtttcagtgttggctccaaacgttccagctatggttgaattgcattttggtgttcctatggctggagctttgctctgtacactcaacattcgtcatgattcatcacttgttgctgtcttgcttagacattcagggacaaaagtgatttttgcagatcatcagtttctccaaatagctgaaggagcttgtgaaatcctctcaaataaaggtgacaaggtcccgattttggtcttgatcccagagcctcttactcaatctgtttcaaggaagaagagatctgaggaaatgatggaatacgaagatgttgtagcgatggggaaatcggacttcgaggttatacgaccaacagatgagtgtgatgctatatctgttaattacacatcaggtaccacttcaagccccaaaggtgttgtttatagtcacagaggtgcttatttgaattctctggctgcggttttactcaacgaaatgcactcctcgcctacttatctatggactaatcccatgtttcactgcaatggctggtgcttattgtggggtgttactgctattggtgggactaatatatgtttgaggaatgttacggccaaggctatatttgataatatttcccagcataaggtgactcatatgggaggtgcgccgacgatattgaatatgatcatcaatgcgcctgaatctgagcagaaaccgcttcccgggaaggtgtcttttataaccggtgctgcaccgccaccagctcatgtgattttcaagatggaagagttggggttttctatgtttcattcctatgggttaactgaaacttatggaccaggcacaatctgtacatggaagcctgagtgggactctttgcctagagaagaacaggcgaaaatgaaagctcgacaaggcgtgaatcatttagggctcgaggaaatacaagttaaagaccctgtaaccatgagaactttgccagctgatggtgtgactatgggtgaagttgtcttcagaggaaacacggtgatgaatggttacttaaagaaccctgaagcaaccaaggaagcttttaaaggaggttggttttggagtggcgacttaggtgttaaacaccctgacggatacatagagctgaaagacagatcgaaagacattataatctctggaggagaaaacattagctcgattgaagtcgagtctactctgttcactcacccttgtgttcttgaagcagctgtagttgcgaggcctgatgagtattggggtgagactgcttgtgcatttgtgaaacttaaagacgggtctaaggccagtgcggaggagcttattagctattgcagggaccggcttccacattatatggctccgaggagtattgtgtttgaggatcttcctaaaacatcgactggaaaagtccagaagtttgttctgaggaccaaggctaaggctttggtaagcttatcaaagaaaggcagaagcaagttatgaattggtaagctttctttgttacttccaatctctacaagatgtcttataaattactgtctataagatcatgtttgtgtctaagctaaaccagaatgagatactaaaaccaatttgtatgtttctgaaataaataaaaccgggatgaaattgtaattccggaagattagatctatagcattctgattagagttgaatctgatggcaagtggatatattattatcttaagggaatcaatctttggattgtgtctcttaattatctatatttttgctgttatttactgcaatttgtttattagatttcgattattttaagaaaactaaataagtattactattgttgttagaaagtcgtgtattgttcaacacatacatgacatgacatggtacaacatataaaacgattcattaggggtcggttaaaggttggttaaatttcaatctgtatgttttttataacccttcataatcataatttaatttgctctttagtttgatttttctacatgatcattatcaatggttaattgatattttcaattttgaatgcaacattaattgatgtttataatgaatcgaaaagtatttcatatttataaatttgtaattacagaacttataaataatcactaaataaatttgttgtacctaacagtctaacaaattacgttgtatagtatttaagaaaagtagatgttaacattgcaacgaaatgagtgcacttactataataagccttcaatctacagtatatggttgatgaatgacacttgaaacaactaaggttcacatggtgaaacttgtaagtaacaagagataatcatttgtaatagttccgtgaaagcgtaaagataaacttaaaaatctactaatcaaatttgcgtgtgaattatctttttttctcaatcaatacgagtgcttaatgactaaaccggaccatgactcgtttaaactataggtagatgacctcaaaccgttgattattttctgattttggttaggaggaatacgaatccaaaattcctcaaaccggctcacaacatttatgttcatcgattgtgacaacaccaagcaaacagaaacttgtataaaagacagacaaaagagttatactttctttctcagttcacgctattgttcacttacactctttagcaaaaagttaaacactgaagtagacaaaaagtaatttgaaaatattcttctttttactaatataaagatgaaaaaaatagggatgatacaaatgtaaagccaaagagtaatatttacaccattatggaaatttagacagtaatggttctaaagtgatttcatttcagaataaacacatagcttgcaacttgctctactgtcaaaatttagttagtgttcacaaaatgctaaacttatctcttaataatgtctagataagaataaaattaagcaaaaaaaacaggaaatttaacaattaaaacgaaatagagcaagaaatagaataactttcatcttgcaaaactcttaaaatccagctcatagtttatcaccaaagtaaaaacaattaatttgattaattaaggagtaataattaaaaataaaataaagctgttagaacaacgaagtgctggaggcggtgcctcatttctttcagagcccagaaatctataagaactgtctcaaaaccaaaaaacaatattcactttccttttacaatattaaaaaattcaatctttctctgtttctgtatctcaagtatataaaaattcaatctttgattgaagcaaaagatagagaatcaacaatgattattgtggtgatggaaatgtcgtgaaaaccagagaagaatcacaaataaaaaacagaacagacaatactttcattttgaatctcttgaaaccagtgtgtactcttaaagagaaagacttttggttttgtctccattggaacacgaatctctctctctctgtctggcgtagagacgaaggtaaaagcgccgcgtgtatagccttcaatggcttttcaacggcggcgcaacaattactacaaccgtctccgtcgtcttcttcctttcatttgcgctgtctctggagctcttctcatcctcttcgctcttctctccattctttcccctcctcctgatgattccgatcgccgcatctccgtacactctctttctctctctcaatagccttgttgatgagattctgatctctgtctcttaacgccattgtttttgtttgattgcagaagcatattaactatggagccaatgatgagaagaagaacacaccagtggttttcacagttccggttagggttcttatatttgatatttttgttgcaaagtctgtatttgtttgctaatttgggtttgtgtatgttttaaaccgaagcagagaggtggaggaagatcggatcgtgatatctggcgttcatggaatgctgaattcttttatggttgttgtaatgcaagcagcaagttcccaagtgtgtaactttataaagttcttttggtgtttagagtgttttagtttagaatgcttgaatgtttctgtcattgaggtttattagtcacactacaacattttgatttttcttactgcagatgctaaagcaattactagaaatgatcgatacttggcgattgccactagtggcggtttaaaccaacaacggactggtgtaagttcctttaggtttctctggttttatggtgatctttttgttgttacttagatcttggtctgagtttcacaacgcaattacttctttcagattgtagatgctgttgttgctgcaaggattctaaacgctacgcttgttattccgaagttggaccagaaatcctactggaaagatgccaggttcgtactagctctcgtaaaaatcaaaacattatgcatcttatttagtattaacatacttttgtgctttttatatatgccagtgacttctcgaacattttcgatgttgattggtttatgtcatttctctcaaaagatgtcaaaatcattgagaaacttccacagaaaggagggcaaacatggagccctcgcagaatgcgtgtaccgagaaaatgcaatgagaaatgctatatcaatcgggtgttacctgttcttcagaaaaggcatgtaagttttcctgtttttgtctctcaatctttacgcttcttagcatctaaaggtttcattatttcctctttctctatgatgcttatatatgatttggtcttgtaactctttgtttcaggcagttcaattgaataaatttgattacagactctcaaacaagttgagagatgatttgcagaagctgaggtgtagagtaaactatcatgcgcttaagtttactgatccaattcttgaaatgggtaacgaattggtcagaagaatgcggaaaaggagcaaacacttcattgctttacatcttaggtttgaacctgatatgctcgccttctctggatgttactatggtggtggtgagaaggagaagaaagagttaggaacaatcagaaggagatggaaaactttgcatgtatgtatacaaatcttacttgtgcaaagttcttcttattttcttgttggatttaacgaattttgcattgcaggtaaataaccctgaaaagcaaaggagacaaggaagatgtccacttacaccagaagaagttggattaatgcttagagctttgggatatggaagtgatgttcatatatatgttgcatcaggtgaagtttatggaggagaaaaatcattggctcctttgaaagcactttttccacatttctattcaaaagacaccatagctacaaaaatggagttaaaaccattttcttcttattcttcacgaatggctgcactcgatttccttgtgtgtgacgaaagcgatgttttcgttaccaacaataacggaaacatggcgagaatattagcaggtcgaaggtagttaaattaaccatagctaatctttcttctttctgcttcatttctgtttttaaggttgttagctctttgtgttgaatgatttcttggttttatgtaggagatactttggacataaaccaacaattagaccgaatgcgaaaaagctatacaagttgtttatgagcaaagagaatactacttgggaggagtttgcttcaagagtgagaacatttcagaaaggattcatgggagaaccaaaggaggtaagagccggaaaaggtgagtttcatgagaatccagcggcttgtatatgcgaagatactgatgctaaagtaaaagcgggaaagatggattcgagaaaattcgggaagaaagagcagaaagaagatgaagatgcagagttgtcgtcgtcagagacagattatgaggaagaccaaactgatttacaggacagaggcttgtataatggtacgaggttagattatgatgatgcgttatcggtttcagaagagcctgagctagaagaaatgctatcagattgattcagttcaaagtcagctttttttttattgtggtcatatacctcatcaatgttatctgtacatagaaatccaatccgaaggaattttcagtttattttcttacttagtcgttgagtctgtttaggtcaaagcaactgaatattgataccgatagaatcttggtgaatgatagatagatacatcaggatccacaaagattgtgtcaaaagtacattgtttcaaatacaatagtgccaactttaccaaaagatgggtcgtgtctgggtcagagcaaaagagatgctgggtttttactatattcttggaaggaaaggcttgacggattcgatgatgacctaacatttatatacaagcaagattaatgaccccgaagctctttaaatgaagtttaggttgatcttgtgctgagtatatggggtagagaaagtttacttactcttccgtcatatgataatgatgcaaaaacccaaggctcacgtgaactccaagcaaggcctgtgttgttaattaaacagtattaagtatttgttcggttcacaagatagaatggtaatcataaggtgtaagggattttaccatagacactgtcttcatagtcagtgtatgagttgagcaacgggttcacacgctgtcgtgtggattccacaggactgaaaaagatggtaacaatgaaatcacaacagtgttggcaaaaaatgaaaatcatcggtgcaaggatgtttaggagatttgaaataacctttctgaggttttgtcatcactggatgttgctgaagcataccacaggttgacaaccgaatctgttccagcgctctgtattttacttgaatgattcagaattgacacaaattataagcgtgcaaattaaaagcagaggctttagtttttctaagctaaaccataggatgtaccgaaaataaaactgcacatttcagctaaaacaactgcgactgacatacatagctaccaagtggaacgttttgattgtgttcagaagaacaaaggagaaagagagtagagtaccagaatcagtccatcatactcagggttacacctgacagcccaagtcctgtaaaatttgacaaaaaaacatacaaaggcacaaattcaaggatcaagttcttggttcctttaaaaaaaggtttacaaagggaaacagaagcaaacataccaatgtgtatgaccaggaagctcttggacaggaaccttggccttccggagatcccagacatgtatgccagattcatcctctgcagttacctacataatcgaatgtttgatccatcacagcaaagttatgataatatttttaaatcaaaggttgagctccataacaattcagttcagctcaatgctgatgtagaaaacgacctgaacggatatgcacagcatatttatctgcacaccattctattcaatagggtactgcgcagtgctttggagttacaagagaggagtcttacaagtatatgttctctcttgggattgtaatcaacaccgcgtacatgagcatgttcaattgagttaaccttcctttgttggggaaaaaacatggagaaagtcatgtgacgaggtaaaaccacaagcaactaacactaatttgaaaattgaaaacccccatcagagcatgttataacgtgtgtgaataaaatcaatgcgtaaaacctcctaactgcatgcagcaacagaggatagcaacagtgataccatacttcatagtacgcaagtcccagaactgaacagatgattcacccgttgctgcaacagcatttacatcatgtggatcccatgctccaccagataaagaatgcaacatcccagctgaatccttagatagaacctatataaatccaaacctgtttaaccgaaataccctacaaaagatctaaatacttgagagataaaaaaaaaatgaggttgtcactatattctagtagctaaatcacctcagcagactttttcgaacagtctaagctccacaagaaaatattttgttcatcaatgctgattaacttgtcacatcttccagaaggccaccaaagaacactgtttccaccagagagaaaaattgagagtcagcttcataagatgattgaggataagaaaaaaataagctcttaaacacttttacataactgttagcaatagaacgctgaaaacgtttgatcataaactcaccaattaatcttaccaacatgagcatcaagagaagcaacacgctccaattgtggagaattcagttgaccatataactcaggaatttgccatatcgctgctccaaacgattcaccttaacggataaaaccattatcagtttttgacacactcacgctataaatcaatacaaagaccagagctccaaattcttgctaatcaactcaagacaagcgaatttaccagtggagaagacggtggagaaaatgcgttgatcaaaagggcaagaagcaaggtcccaaatctcattaggatgagagaacaaaccctcacatataagctcagatccaccagatgacaaacgaagaagatgaaccttaaaagcatctcaaatggtggagaacaaaaaacgaaaactttcagtatcttcccgactaaaatagaagacgaaatcaaaatcaagacatgggttcacctcattttcttcttttaaactaagagttccagtgagaaagcttgtgtaatccgtatcggctttcacatccgatatacatctagactgaaacaaaatgaattccgtctttaaagaatcttcctaaggaaaattaaggaaaatatgaagatgatgaatcacctgatacttcaaaccgtatccaatacccgatgatcctccttgcattgtcacctgagccagacgcactgattcaggtagagaagacgacgagctgaagcagatgctggttttcgtgttagtgatagacattaatgggcctaacttaataaagtcaggcccaatctcttatgttacaatttcactaactactcagagacatatacatatcaaatttctataaattatcactactcactctagtatatatgttacaaaacgggtcaatggaattagagtcccatagatgtctattaggcccggtcatagttacaacgttgtttgatcacccaaaaaaaaggcataaaatcatgaatcaatcaccagaaaaaagaatgttatcattacgtttgttaacgacgtcttagtaaagccacagatagtacgtgatgctttcatgattttatgaccgttacttaacaatgatgtgttttttgagtatttttgcgaagccatgcaatgcaagtaacattagaattgacgactaggaaatgtttgtcaaccaacgtaaagaaatatgaaaaaaactgacaatagcatattaaaaatctccacaaccgcgcacagccagaaaacaacgactattagttaaactcttatataatctacaataagttggttaacaatgtaatgtaaaacagagtataaatataagaaaactcctaactacgagattattaaccatttctcttagaaaggttgaacgataagtgactttttctattgattttgtcgaaacttcaatgtgtctgttcgcgttcatgtaagactctaaacttatcgtggttttgttaatatgggtatattcttgaaggaaataatgtttagttgaactgattttaatacgcgtgggaatatcctatgataagaaaggttacaaaagtagtgataagaagacaaaatatgagaaggtggatctccaccatccccaaaaaagaaacattcctttcttttttgtttcacccaaaaacattgataaatttttcttctattaggaactaattaaagatcctcgtgtattctttatatatggaagttttcgcttttttcgtcttatcttctcaaaagccgcaaacccaaaaagttccaactctcactcttaaagttgaggatttttaagttaagacgtgtgaagacgctcgttcatgcacatctctatctgaaaatgtatttatattgataattatcatggtaattgtagacaagaatttcatggtagttatatgaaacaaaatcatgtttttagtagggttttgtggaaaatgtattcatggtgatcagtaacttgctacaactagaacatactactgattaaaaattatattttgtgtatatcttcattaaaattgcaatataatgttgaaagtagaaactgatattttctgtatgggtggagatggctttgttggtataatatataggcatgggagtaaactataaaactaatatgttttctatctctggatattatttgctagaatagtacaaattaaagagaaaacaacatattcattctataacatagtgagaagtaggaagatatgagatatgatcagtgtggtaatgtatggatttatatctcgagttattgacaaaacttcattttacttgtgtttgaagctaatcgtgagttttgagttctgaaaaaaggggattaaaatatgagtttggtacctacaacatgtgcatgtacttttagagcatgatttcgttataaatttgtttttaacactttacgttactttgaatctcaaaccttttttattttaacttttcactttttagctttaactttttaacaccacgtctttttccactttctatgcttcaatgattcacagagtagaataattgcatggttccttgcaaacttcatttttatgatttctaacgacgataaatcaatgcaaacgtttcaaaaaaaaaaaaaatgcaatgttaatcgtgaatagaaaaaaatagataattgcaacgtttatagtactatgattactagctagtttccaaattgaagtttggttgcatgtcccttcctaaaaaaaaaaaagaaacggctctcttattcgaatcataatcatttattcatatgtggaagttgtcagtactctatgaatttttccttttgaaatgtaattgcgcttttactgttttaaatttggtaaaatgtgaaattaagtgatcatttttaagtttttaatgataccttaaccttaatcacgtaatcacttttatatgacaacaaatccaagcttttgaaaaaacactaactctccaacgaccgttatgggttgctccccctccaagctcgacggtttaccggccgtatctctatgccgtgaccgctgcagctcactcgaagatacgctccggcgaagctacgccttagccgacgctcactcagcttatctcctttctctgaacaccgtcggtccagctctccatagattcttccaacatgccgtcgagtctccgccggatgttgaatccgaagctgacgaatcaccggagacgtattctccggaatcctgttcctcggctcactcggttaccagttctgattccgatttgcctcccaagttcgattcggattgtgaggaaggtgaaggtacgaattgcgatctcttaagcggttcaaaacctgaatctctaaatcttaatcatgactcgttctactcccggagatacgaatccggcaccataacgccgcctcctccaccgccggctccgagtaattacgcttgggattttatcaatttcttcgagagctatgagcttccgtacactacggatgtcaatgatttgaaggatagagagaccactccttctcatgaagaagataagttgaagaagaagaagattactgtgagccaaaacgatgagaagattaaagtagaagaagagaaaaaaactctgagaatctcagagaaaaataggaagcgtgctcctaaagaatcaaaggatcaaaaagtttcatcagatttatctgaagtaacaaagcaattgcaggaaatgttcaagaaagcttcagaatcagggaatgatgtttcgaagatgtttgacacttccagattcagatactaccagaaaagctctgtttatcaatgtaatgttcgaattcttcttccttcttcaaacattctctacacgaagaaggtgatgactccatttgatcccaaaccagtggaagaatctaatttcaataatctttcatctactctgaagaaacttttcatgtgggagaagaaactgtaccaagaagtaaaggtataatcaaaatgctctgaatggattgaagcaaaattatctaagtgttttatgttccttaagacttttgatttgttatttacaggctgaggagaaactccgaacatctcacatgaagaactacaaactattgaggagattggaagcaaaaagtgcagatctaagcaaaatcgaagctattcgttcttcgattcagtgtttgtctacaagaatgagagtttctatccataagataaacaacatttgtctgacgataaacaagttacgcgatgaagagctctggttccaaatgaaagagttgatccacaggtactacggacattaccataagaattttgtttgagaaatctcatgagttaactcagcttgttgtgtctcaatatttaggttgtctgagatgtggaactctatgctagaatgtcacagtagacaatctaaagtaattgcagaggctaagaagcttgataagatgacaataaaggagaatctagacttatctcagcttgagcttgctatggaattgaaactggagttgaggaactggagtctaagcatgtcgaactggatagatgctcaggctcagtatgttaaagccttgaacaattggctaatgcgatgtttaaaacaggaacctcaagaaccaacaccagatctctcagaagagccaccattgtttggtgctattaacacttggtcacaaaaccttgagatatcacacggagagaaggagtttacagaagcggtttacacgattttgatgcacgtaaaccatcaggtggagaaacagaggatggaattggaagagcagaggaatgttaatggcagcgtaaaggatatagaaaggaagcttatgatgttagagaaggaagagcagaagatgcagaggaagatgaagacagtaccatctgttgcattaatggggagtttaaatctgaagtctaacatggaacagatattcaaatcgatggagaaattagctacaaactcaaagcagacttatgaggaacttgacttgatgtgcacgtaatgtacggctttgttttagttctcatcagttctgctatctatcatttattctatgtgtccttggaagagttttgaattttgctaaattgaaaattttgattatgtacattcgacatatatctataatctatatgtatacgccgttagtgatctttaataataagatagtacattccaatcatgaacatgactctgtgtttagtgtttaaaaggtgatgaattcgacaaactattaaaccaacaatacaaaaacaaaattctggaacatttcagatataaataaataattcttccgttttattcagataattacaaacactggctggcttggttcatgcatggtttctgataaaggtatccgattataatttaaattaaaattgtattttgttttgttatgtagacaataatatcgaagcaaatccataatgtagcctaatctagtgccacttacataaacggaaggttcctaaataccactaacttcaactagtttgaatttgaaaactaaatgacctgtctccaacactaatgtcttcacttatgtacaaaaaaaaaacacctcgcaaagaaaaggaaaaaactaacctcagggttccttcttcgtactttcctcattcttctcagatccatcttcaactccaattcaaacaatccctatttatggacgtaaccctaagatttcactaaaccctaatcacaaatctctcatcaagttctcatcaagcaatacccttttgaggtttcaaccgaatggcgctactggacttggaaggtttgagagaactacaagactgcgcaaactatcttctcgatcactgtccagaagcaagagagtctctgtgccaacaagggaaagagaactggatcgagcaagtctctgaagcttcactaataatgttagatgtctgtaatgtgtcgaaagatgtcatggcactcgtgagacatggcctgcaagatcttcaactgactctgcgctgtaatggatcaaaccttagtgaaaaggttgcagcgtataatcggtataggaacaagctcaagaaggaaacgctcaagtgtttaaatagtctaaagagtattgaaggaggagggagagggatgatggagatgcagagcatagagcagaaccttctgtttgttgctgaggttttgaaagaagtgagaagagccgttgtgactatggttgagtctctgttctcactcgtatgtgttccttggctcgagagaaaaccgagcatagggtcattttcttctatctttacgatgcagttttgctgctttgatgatgcgtgggacgaagtagcgatgcggagcgcaagtacaaggttggaggctgcagagatcactgttgaggagcttgagatcgagttggagtgtattttccggcgactgattcagaccagagtttcacttcttaatattcttacagctaaaacatctccggtttgatacggataccacttctggaagacatcaaacagatatatacctgtaaaaattagaattataagcaaatacagaaatattatcgtcctacaaagtcaaatacacgtattaaaagtaatttcctcacagtctctttatttcgacagaaaattttggtcagaatctcctcacagtttctcatccattgtttattattgctcaaaaagtgaatgttataaaacaaaaagacacaccagtggaaatacagacattacctagtgataatctctaagagaagggcaataacacaatttagccaagaaggaggaagaaacagaaaccaaaccttcaaattacgaaacagaggaacaaaaaaaaacgaacagagtcttaccaccatctctgtgcaatgtgcatgatcaagaacctaaactcattagtaaactaaatataagcattcacaaggagttcatgggaagataaaaactgtgtgatagctttggcaattattcaattacaactacaactcaaatttttaaaccaagtcgcattacttctttgatcaaaatgtatgagaaacaaagataaattgcctctgatcctgatcagttcctcttattatcaaattgattcataaatccaaggtaagtagtaatcacccgaattctagaaacatatccctaacatgctcaattacagagagacaaagagagagaggttcaccggaaccctaccttccggcttcacatttcagtcaggcaagcgcttgctcttctcccagtatagcaatcctacccgggtgattcagttcaagcgtgtgtgaatatcgattcggctctttgggcttttaactaaaggcccattataatctaaaagggctccaccacgtcattttcaattcgttaattgaaaaaacatattcttcacgtgccgctaacaacgacctggagaattggaaatatcgcggaacaagaacgccaacgtgttcttcggctgctttagacttttcttattataaaaagtcaaacctccttctcaaccataaattaaatttccactgtagtgtcaagttacatagaaacaaaatccatggcttcagtgaattctcgaagtggtttctgcaactcaaactcaacattctacagcaaacgaacaccaatcccactcccgccaaatccatcactcgacgtcactactttcatttcttcacaagctcatcgtggccgtatcgccttcatcgacgcttccacaggtcaaaacctcaccttcaccgagctatggcgtgccgtggaatccgtcgccgattgtctctccgagatagggattcgcaaaggccacgtcgtcctcctcctctccccaaactcaattttattccccgtcgtttgtctctccgtcatgtcactaggcgcaatcatcaccaccacgaatccactcaacacttcaaacgagatcgctaaacagattaaggattcaaatccagtcctcgccttcaccacatcgcagcttctcccgaaaatctccgccgccgcaaagaagctcccgatcgtgcttatggacgaggaacgagttgactcagtgggtgatgtgagaagattggtggagatgatgaagaaggaaccgagtgggaaccgagtcaaggagcgagttgaccaggatgatacggcgactttgctttactcttcaggaaccacgggaatgagcaaaggagtgatctcgtctcaccgtaacttaatcgcgatggttcaaaccatcgtgaatcgatttggatctgatgatggagagcaacgattcatctgcactgttcctatgtttcacatctacggtttagctgcgttcgctactggattactcgcttacggatctacgatcatcgttctctctaaattcgagatgcacgagatgatgtcagcgattggcaagtatcaagccacgtctttgcctctcgtgcctccgattcttgtggcgatggttaacggtgcagatcagattaaggctaagtatgatttgagctctatgcatactgttttatgcggcggagctccgttgagtaaggaagtgactgaaggattcgcggagaagtatccgacggttaagattttacaaggttatgggttgactgagtcaacgggtataggagcttctacggatactgttgaggaaagtcggagatacggtaccgctgggaaattgtcggcaagtatggaagggaggattgttgatccggttactggtcagattcttggaccgaaacaaaccggtgagctttggctcaagggtccttccataatgaaaggtacattgatttgagaatcgtttttgattacagaaatcatcaatgtaggattttttcttaccatggcaattttggttgttcttggcaggttatttcagcaatgaggaagctacgagttcgactcttgattctgaaggatggttaagaactggagatctttgctatatcgatgaagatggattcatattcgtggttgatcggttaaaggaactgatcaagtacaagggttatcaggtgatatatagaacacaaattttgagcatggtcgatgttgatgctatagatttatagtccttttgaagcattagaaaatgctgatgagtcaaaaatcgtcttttgtgaactgatgatagagtctgcctgtagtgatatgctgatggatcatgtcatcctttttatttagtagtgagtttgtttggctaaactgctagaaacctgacctccttcgttcctttgaactaataagtaatctctgagtcttgatatgatgattgtgtgtgtatgataagcttttcgggatggagatggagtatatttgaacatcattctttatcttactgactttagagaagcattggctctatctatagcaatgagatgaatttgtgctaaactaaacttattttggtgattattgtataggttgctccagctgagctagaggctttgttgcttactcatcctgaaatcactgatgctgcagtgatcccgtaagtcactacaacactcactcgtttttgtatcagaaacagtctatgagtttttaatgttttggtgatttgcaggtttccggacaaagaagtggggcaatttccaatggcatacgtcgtaaggaaaactgggagcagcttatcagagaagacaataatggagtttgtagcgaaacaagtagcaccatacaagaggatacgaaaagttgctttcgtatcttcaataccaaagaacccttcaggcaagattctacgcaaagatctcatcaagatagcaacttccaactccaagctttgaaattattatgagagtcaatctccatgtattatttattgtttgtgctgtagacctgtagaaaaatctgatactatgcatccatgttgaaatatgaccatgtggtcccaaaacacagaagattacacacataaatggccactatatggtttatgtaatagagtatatgttcaaaacatgtttctgatcaaattggtcaaattatcctaagttctaactcagattgattatggcagtaattataacttgagttttgtttattgtgaaaaaaggttcaatattttttaactttactattttatatgaaaatggtatttcttgtgaaacataacaaaaacaaaaagtaaaatttatcaacgagttttagaaaacccaccaatatatcatttaaagtaattttagagtagttttgatatgtgaaaactcaccaatatttcatttaaagtagtttttagactagttttgatatgtgctaacaattccaatttgggctaagtcttcacaaagctgcactgtgtcgtgagtcgaaattcgacgtctatctcttcctttttttggcattacttgcgaattttatatcgtggttttgattgatagctatttaattttccgggtaaaagggtttatcgttttcattactatgtgaagttttcagtgatagctgttttcatcaaaataaacgactctttatctactcgacatgcattttagcactcttcgggaaaagaaacaaaaataaatttgtattaaccactctttaaattcatcctctggatctgttgtactcgtatagagaaaaaatggcgtatcctgagagatctctcattgttgatcctagaagtggtttctgcaaatcaaactctacattctatagcaagcgccaaccattaagtctcccgccaaatctttcgcgtgacgtcaccacattcatctcctctcagccacaccgtggcaaaaccgcctttatcgacgctgccacaggccagtgcttaaccttctccgatctctggagagccgtcgatcgcgtcgccgactgtctatatcatgaagtcggaatacgaagaggcgacgtcgtcctcatcctttctccaaactccatcttcattcccgttgtttgcctctccgtcatgtctctcggcgccgttttcaccaccgccaacactctcaatacttccggtgaaatctccaaacagattgccgacagtaatccaactctcgtcttcactacgcgccagctggcaccaaaactccccgtcgctatctccgtcgttctcaccgacgacgaagtttaccaggagctcactagcgcaatcagagtcgttgggattttaagcgagatggtgaagaaagaaccgagtgggcaacgagtcagggaccgagtcaaccaggacgacacggcgatgatgctttactcgtcgggaaccacgggaccgagcaaaggagtgatctcgtctcaccggaatttaacagctcacgtggctagattcatatcggataatttgaaacgagacgatattttcatctgtaccgtcccgatgttccacacctacggtttattgaccttcgctatgggcaccgtagcattgggttcaacggtggtgatcctccggagatttcagctccacgatatgatggatgcggtggagaagcaccgagccacagctctggctttggcgccacctgttttggtagctatgattaacgacgcagatctgatcaaggctaagtacgatctgagctcactgaaaacggtgaggtgtggtggagcgccgttgagcaaggaggtgacggaagggtttctagagaaatatccgacggttgatatactgcaggggtatgctttgacggaatccaacggcggaggggctttcacgaattcagcggaggagagccggagatatggcacggcggggacgttgacgtctgatgtggaggcgaggatcgtggatccgaatacgggtcggttcatgggaattaaccaaacgggagagctctggctcaagggcccttctatttctaaaggtaaaatcactagatagtttttgctttgcttgcgatagaagtaataacttgatcatttttttggtcaaaggcaaaaacttaaccatttcaaatcaatgtataagataaagataaattaaattgttattgagatcaagtttataactttttgtgaaacaaatatagcaagaactcgtatttgatttccaagttttttctagtgatggattttgcatatggtttttggactagtgtgaataagtgaattttcatttttgtacgagttcaaaaagttaggtagctccatataatggaaaatgacgacgtgaaagatcccgatttgtttgtgtatataccttgttacgtaagctttattaattgacaaacgtaaaatgaaggttattttaaaaaccaagaagctacaaatgaaaccattaatttagagggatggctaaaaactggagatctttgctacatcgatgaagatgggtttctttttgttgtggatcgattgaaagaactgataaaatacaaaggctatcaggttcataaacatctatcttcattctttcacaaacagtgaaattttaaaattataaagatctaacgataagtaattgataaacaggtgcctccagctgaactagaagctcttctgattactcatccggacattctcgatgccgccgttattccgtaaaatatttcataacttttttttttcctccaatttaaacgccatgatttttgccttataaacgtaaaacacaacatgttcatgtatgtatgcttttgtgtacgtactgcaaagttttccggacaaagaagcaggacaatatccaatggcttacgtggttcgaaaacacgagagcaatctctctgagaaacaagtcattgacttcatctctaagcaggtgtgcttttaaaatcacaaaacaacaccttctcttctttaccttgttataatgtttttaggtggtaaattagttttatgatagttggtttcaaaagattactaaaattttgagcaggtagcaccatataagaagataagaaaggtctcatttataaactccataccaaaaactgcatccggtaagacgcttcgcaaggatctaatcaaattggctacttctaaactttgaaaggatcttatttgctagattctcacttttacttgtagttgaaataactgggatgtatgttctctttcaataatctcgtttttatttcaataaagagagatttgtaatatatctataatgctgaataattttaattaaagacactagtatcaaatatgtagtagacaatttgctgataacacgagtttatatcttatcaaaattataatatccaaaagtgaatagaaagataatataacaaatgtgtgtgttatgacttattacaagatcaataatccgaaattcaacattttaagtttttaaccgaagaaaaagaaagaaagagggatggacgatcggaattggtttggatttgagcaacaagaagataaatttggtgtgtggctagacccaaggacaatatggcaagtgaagtgggctttgaggttacctaatcctggttatgggtcactggttacccaaataaaaaatctcacgtcatcaaactgaacatagaagccaacaaaacaaaacataggggttaggcacggcggcgacggtcaaatcgaatctcccggtagttctcaggaacgagaaccacgtgacttcaccaaacttgtgataaaatattcttacaatgaaaagttctttatgttttgtattattattttgtgtttctcatcacaattcttattgttttgtgtcggccacatcaactatcatattatctacatcatttaataatccgacacatgttgtagatagtatggtatattaatatttcatattcatattacagactaatcgtttagagaagttgtacttagagaagagcttcatattaagaaatatggcgtatcctgagagagatctcattgttgatcctagaagcggtttctgcaaatcaaactctacattctatagcaagcgaaacccattatgtctcccgccaaatccgtcgcttgacgtcacaactttcatatcatctcaaccgcaacgcggcaccaccgccttcatcgacgcctccacgggccaccgcttaaccttctccgatctctggagagtcgttgatcgcgtcgctgactgtctatatcatgaagtcggaatacgaagaggcgacgtcgtcctcatcctctctccaaattcaatctacattcccgtcgtttgcctctccgtcatgtctctcggcgccgtcgtcaccaccgccaacactctcaacacctccggcgaaatctccaaacagatcgcccaaagtaatccaactctcgtcttcaccacgagccagctggcacccaaactcgcagccgcaatctccgtcgtcctcaccgacgaagaagacgagaagcgagtggagctcactagtggagtcagagtcgttgggattttgagcgagatgatgaagaaagaaacgagtggtcaacgagtcagagaccgagtcaaccaggacgacacggcgatgatgctttactcgtcgggaaccacagggacgagcaaaggagtgatctcgtctcaccggaatttaacagcttacgttgcgaaatacatcgacgataaatggaaacgagacgagatattcgtatgtaccgtgccgatgttccactccttcgggttattggcgttcgcaatgggctccgtagcatcgggttcaacggtggtgattctccggagattcgggctcgacgatatgatgcaagcggtggagaagtacaaagccacgattctgagtttggctccaccggttttggtagctatgattaacggtgcagatcagctcaaggccaagtacgatttgacctccctgagaaaggttaggtgtggtggagcaccgttgagcaaggaggttatggatagcttcctagagaaatatccaacggttaatatttttcaaggatatgcgttgactgagtcgcacggttcaggagcttcgacggaatctgtggaggagagtctgaaatacggtgcggttgggttgttgtcgtccggtattgaagcgaggattgtggatccggatacgggtcgggtcatgggtgtgaaccaacccggtgagctctggctcaagggtccttctatttctaaaggtaaacaaacactaataaacgctaaatatttggcaataattagattatttgaaatagacattttattattgggaaattatttataaaacaaatattatgatcaagtttttaagcagtaaaatgggttttggatttggtgtgagtaattgagttttgtatacatcgatatgattagtattcgtaacgtggacaccctaaccgaagaatggcttcagttcatttgcaaattaaatgaaacttatttaagtgaactcaatactattgaataacaaaagaaacactcttaaatctgtcttgggacaaaacgaaaacaattttttgcatggcaaagacatagttttgaattaaactaacatttatatgctttaaaggttatttcggaaatgaagaagctacaaatgaaactattaatctagaaggatggctaaaactggagatctctgctatatcgatgaagatgggtttctatttgttgtggatcgactgaaagaattgatcaaatacaaaggctatcaggttcatcatcgttatgtttactaatagtgtaaattttcttaaaaatgaaaatctaatggttaatatatgataagcaggtgcctccagctgaactagaggctcttttgatcgctcatccacacattcttgatgctgctgttattccgtaaaatatttaacaactaaaacaccatgatttttgccattcaaatatcgaaaaacatgtagtttgtttcttttgtgcattgtacaggtttccggatagagaagccggacaatatccgatggcttatgtagcccgaaagcccgagagcaatctctccgaaaaagaagttattgacttcatctctaatcaggtacttctataatcacaaaacgtacaacatcttctttatcatatattgttttacttaaaagttaaactatttttgggtggtaaataatttgatgagcaggtggcaccgtataagaaaataagaaaggttgcattcataagttccataccaaagactgcatccggcaaaacacttcgcaaagatctaatcaaactatcaacttccaaactttgaaaggataaatttgctagactttcttaattttattgatggtattgtttttcaataagagagaaaactgtaaatctgtaatcattgtatatatttttctgtatacatatgtatagtgttgaataatttccaaggacagatataattagtttgcattaggcccaaaggcgtaatggatcaaagactcaaagtatagtgggcttttttataatatagtccacgtcataaaacttaaatcagaaacgacgtaattaccaatctctaacgaccaatcaccgagaggctttcgatacaaccaaagtcctttaacatggcggttaagcacggcgtcgacggcgacggcagcgaaatcgaatcgagaactctggcggtagatcgaaaaagcggtttctgcgaatcaacatcgatattctacagcaaacgtgagccaatggctctcccgccaaaccaatttctcgacgtcacgtctttcattgcatcacagcctcatcgcggcaaaaccgtattcgtcgacgccgtaaccggtcgtcgactaagcttccctgagctctggctcggtgtcgaaagagtcgcgggttgtctttacgcattaggtgtacgcaaaggaaatgtcgtcattatactctctccaaactcaatcctcttcccgatcgtctccctctccgtaatgtcactcggcgcaatcataaccaccgctaatccgatcaacacgtccgacgaaatctccaaacagataggcgattcgcgtcctgttctcgccttcaccacatgcaaactcgtctccaaactcgccgccgcgtcgaattttaatctcccggtggttctcatggacgactaccacgttccttcgcaaagttacggtgaccgcgtgaaactagtcgggaggttagagacgatgattgaaacagaaccgagtgagtcacgagttaagcaacgagtcaaccaggacgacacggcggctctgttatactcatcaggtacgacggggacgagtaaaggagtaatgctgagtcaccgtaacctaatcgcattggtacaagcataccgggcccggttcggtttagagcagcgaaccatttgcacaatcccaatgtgtcacatcttcggattcggtggtttcgcgacggggctaatcgcgttaggatggacaatcgttgttcttcctaaattcgacatggctaagcttctctcggcggtggagactcatcgttcttcgtacctttctcttgtaccgccgattgtagtagctatggttaacggagcaaatgagattaattccaagtatgatctgagctcgttgcacactgtggtggctggaggagctccgttgagtagagaggtgacggagaagttcgttgagaattatcccaaggttaagatcctacaagggtatggtttgactgagtcaacggctatagctgcttctatgtttaataaagaggagactaagaggtatggagcttctggcttactggctccgaatgtggaaggtaagattgtggatccggatacgggtcgggttttgggtgtgaatcaaacgggtgagctgtggattcgaagtcctactgtgatgaaaggtgtttgattcttgatctttagttcatatgcctgtgaaatatgttttttttttttgttattggtgttgtctcaaacttgttgagttgtttataggttatttcaagaataaagaagctactgcttctaccattgattcagaaggatggttgaaaactggagatttgtgttacattgacggtgatgggtttgtctttgttgttgatagattaaaggagctcatcaaatgcaatggttatcaggtaaataaataaaatgtaaccaatcaactttagttgatctttcttaatgcatggatcatctgagtaaagttgggggttttggtaatggtgaaatgtttgttaggttgctccagctgaactagaggcattgttgcttgctcatccagagattgctgatgcagcagtaataccgtaagtcttgcttttaacattgacccatcaagcaaattcttctctttaacgatcctttttgctaattgctgaagcttttacttttctttcttatggttttttgaagcatccctgacatgaaagctgggcaatatccaatggcatatatcgtaagaaaagttggaagtaacttatccgagagcgaaatcatgggatttgtcgcaaaacaggttttttttaacaatgcagttcatgttttctgactaatatgacagtggttcattaggtatttaggtttaaccggaattctggttgggttacataggtatcaccgtacaagaagattcgcaaagtcacatttttggcttcaatccccaaaaatccttcgggcaagattttaagaagagaacttacaaagctcacaacttcaaaactctagcaggaggctctgtcaccatccttatctcgcacttcacggtatgttaacccgtttgtttggtttaaatgttaagttacttcttccacatatatctctgtcaaaaatgaataatgatatacaaactgaaggtttatagagaatctctgtttctatttatatacaaacagaaaagatttttgtgtataaaaagcgctctccacaaccataaactgttaaaaaactagagactggagcttgctctgatcatgggctgcgttgcaacgaaagagagggaagaaatatgaaaccgatgaagctcccttgcacgacgtgctcatgggggacacatcctggttcatcgtcttcttcacaccatcatcaccaccatcatcatcatggtcagacaaactcttgttcctcaacaacatgaggatgtgatccatcaaacctccgtcgcaaggaacctgtaaagggccacaaatagtggagccaaactcttcctctgccatctccaataagacctgaaagattggatgtttgagataatccaagggtaaaacaaacctcctgccttctctggtatacacagcgaagtgtcctttcttacacttcctccacttctccatcaaatcggtgagtctaagcctcgagcaagatcttttcttcagagacatatagagagctttgatatgttaccaatataataccgttgtgtatacggttagtatgttactgtctgaactatacttgcctctctctccacatatatatactataaaatctgattagtgtatgtggtagttgtcttgcggctcaaaaagaggattaggaatgtgtggaaggagtaaggtagccgtgtgattcttcattatttgggttaaaaagatataactgtgagattaaatgtgtggatgtattattgtcttgcatctctaggtctaaacaatattttttttggcaaaagaaatctgaaatatacatatatgataaaatcagtatgatgcaaaccaaattgtcaaatctttaaatctttttacaaaaaacagattgaacaaaagatacttccacaaaataacaaatctatgtatatgctaaaaaattgtgttagtgcctaatattataactgatcgttccaagaataattttgttttaattaataaactagagaggtacaaaagaagacagatagtgcataaaatgattttgattgcgaatggtaaacaacacttacatataatttaggccacatagtatcagtttgtgagaaggtaaaaggagatgtggtggtgacaatagagcatgtgagatgtgaccgtttagagcaaattgctgctgcttttctttgatatattcacgtcctcaacttctctattcttactttcttgtgtatctatctcccttgttttaatttcttcttgtctttttcttcaaatcacatgaaatcctacaagccctcacttttcaactatgtgtagtcccgagtagtacaccgttatagtttctatttgctgaatcttcatctttgtggtatgtagttagatgaggtctgagccgtaatttgaaacaaaagtttatgggaaaagattggttttattgtttcatgcctaaaccaagtacaagccgaaacagacaaattacaaaactaatcttcgagacactgaaaataatgcaagtttggatattatttttctcattcgtttaccctaaaccatctgaatttcacaacccacaattacacatgaaactcaactctttgaaacacatatttctctgaacaaaaccagattgcagccacatgctaatcagaaaaatgattatctgactctaaacctatatcctgaaatcgcctggctgagccaccctagccttactcaaccctttccgtgagcataactgtcgtttccatccataaaacgcgtaattggatcagcaagatcaaccaggaggtgagttttttgaggctcaataagagaaaaaggttgcaacttctcatatagtttggtctttacatagagagtggaagaagcatccttcgcttcttcttcctggctaatctcacttgctttgtgaccttcatgcaaattagtagcagcaaagtgacacataccaagatgaatgcgagttgtaaccgcttgaagtacaaggaaaccgctgaaaacacgaagaatgctaagatgactagctcccagatgacaaagactacaacatccaccctggatcaaacgatatagaagcttgttaacaatgtataactcatgaagatgtctagatgttagtgaagcttgataagtagaagtcaaacaagaaaggactcaatcatgattgtaagagatggaaggaagagaatttcgaccaatttagcatcatataatgggactgaatcttgaaaaacgagacgtactatcggcttaactacataacactgtgggacttgtatactaggataggcaagtacgtgacatatattatattttacaataattagctcctgaacttaaaaatggagtgatccacatagtaggtaagagtgaaaagtcgatttgaaggtccatgaggttagaggaaccaaaaaacacatgggtgcattacttctgtccatctatatattacgaacctctacaagtacacagtgataagcatgaaattctgttgaagtcccatactaaaagtaaaataatagcatcattatatcagacaaaatcgagttaaccaaacacggaatggtagcaagactctaataaacacactatattcaaagaccaatagctactttacctatagaacaaacttcatcttgcctgaattaataatgtcaaaagtctcataaaggtcatagggaagctagcgtgacttaacatacataattactgatagagccagaacaccaaatcatactcttagtggatgcatattttccttattgtactaaagagtaacatgatgtgcaatgaactgaaattatcttacagaaaagtttatgctttccttctatagacaaccaaaccttcattgccatgctctaataaatataggatatctaaaacagagatcaaaatccatttcctatgtcttccaaatgacaatgactcgagcagatttaacaaagagatgatatcgaatgttgcttaattctctaaatcagaattcacgactctgaattaacaaattttaggagtttctattgagattcagatctcccaaaccctaacttccacatgttcaaattcacgtaaccaactccaaattctctaaatcattattcaaccagagctaatatccagcgaaaaacacagctctacggtaacaacaaactacacaaacacaaattggagaaccaaaaatgcatagatctcgaatcataaaaaggcaatgaatcctcacctagaagaagaaaaattcgaggtcgacgagaagaaagagacagaagcccaatcatgcttagatcgaatctgatattccctcagctgctctgctagattcgatcttgttatcatcgctttcctatgcagcgattctccgatttcacaaccgaaacaaatccttctcttctcagtcgactgatatatccggagaagccgtcggagaaacacgagattgaagaacaattcttcgggataggattcgaaatcgatgaatctaacaacgggaaacaactctggagattcaaaaaaaaattcagagacgaaacaatgtttcgattcgtctaaagttcgttagcgtagactcttcctccttccctctgtctcggtgtcaaattcccgggtcgggttttaactttccggttccttacccgattcgattttagaagcccatgttagtgtaatgatgtattacacattgggcccgtcgagatcttaaactaaacaaaatattttgagtttcgtttatggatagtcgccgttacgtgtacgaaaattaatggagttggatcatttgtgtgtttgatctataaaattgtttaatctttggggtacaattatctcattctactcaaaagtagaaattctagagggataattttgtgcgatgttttcacatgaatttagtttgtttatttttttattactatcggatttttttttaatgaaaacatgtaatgtgatctcatatttccaagtgattcttctcttttctagttggttctaaaacttctaattcttttatattcccattttgatgaggtttgtcctaattgaacactacgactaggtggacaaaataatttgttaattaaataaaaattagttcaatatagaaatgaaaacgattgctttgtttggtatgtgtcggtacagtgaccatcctaatgcctaatataaaagattcgatcggtatgttacaagttgcgtgtatatgaaaacgtcacattttattaagtggcacgtcgttgtgatgaatctttcaaccgaacacgattcataatctataagcaaaatccgaaaatggtgccttctcaatgccccctatctgttcaatctttttttttttttttttttttgtatatctgttcaatcttatttaaatgtaatgacaaattaaatgaagtttacgttagtaatataagctgacaaacaacaccacattacatacataaaattaaattcttttaagtatttcaataacgtttctttatcttaaaaattaaatttacttcgagagcttcctacttcgtcaaaaataaaattttactttgctgcatgtttttactttctttttgtaacgtcttaaaaaggtgattaacgtcaacttaattcaccgaaagtctctgcaattgatattttctgccgacgtggcataagaagtccgattggcccacatgaccgacatccacgcttaaaccaatcaaaaccggccattcagttccatctgtgggctcctgaaacgttctcttgacacgtgtttaccatatattggcttaatccatccatagtctttctatttactgacaggtagtatttttcctatcaattatttattttcacgtggcatgatggctatggctagttgaacctgtgaataacttggtcatatctactctctatttatttagatgattcattttcttgaaggacttgcaattttatccccttacttttatttctttgagagataacctaaaattctcaaaatgagttggaaacatccctttgaagttcctctacaggctttctatgtgcataagaatctgcttaacattggaaataatatatgcattcttctccaattctcctagttggatacatatatgaagtctataaattacacatatttcccacaaaaattattgtaagagtttatatttcaacatatagtatgcaaacttaaatcgtgagaatgacacaaccactaattcaaaccactacattatatattctaatccattcaaattcattaattatacattatatatcatatctatataatgttataatatacaatcaaacaataaattagaaggaagtaccatgcaaccaaacttccatacgtctcccgtgaactaaaagtacattactatgcaaatatctaatataagttaactctatatcaatatattaaaaacataaatccttaaattaagaaaaaatatggggtgatttcattgatattcatccaccgaccgaccgacgtaaaagaaaatgggttcactctgcaacttaagaaatagtaaacgtcctttgccataatttaaaaaactaatgaaatctttaacagcgtgtgacctccgcgttggcctggaccctctacttcacacactataaagtcccactcatcacaacaatattcatcacacagctcttgaaaaccatcttaaagcaactcaaagctcaaatcgaaatttctagtttctctttatcattcacgctaagtgttcaatcgaatcaagattaagtatggcagaagagtacaagaacaccgttccagagcaggagacccctaaggttgcaacagaggaatcatcggcgccagagattaaggagcggggaatgttcgatttcttgaagaaaaaggaggaagttaaacctcaagaaacgacgactctcgcgtctgagtttgagcacaagactcagatctctgaaccagagtcgtttgtggccaagcacgaagaagaggaacataagcctactcttctcgagcagcttcaccagaagcacgaggaggaagaagaaaacaagccaagtctcctcgacaaactccaccgatccaacagctcttcttcctctgtaagtaaaagtttgactagtttgtagtttttcttggttaaatcttgaaaacaaactcatggttttgaaattttgaatattcatgaacagtcgagtgatgaagaaggtgaagacggtgagaagaagaagaaggagaaaaagaagaagattgttgaaggagatcatgtgaaaacagtggaagaagagaatcaaggagtaatggacaggattaaggagaagtttccactcggagagaaaccagggggtgatgatgtaccagtcgtcaccaccatgccagcaccacattcggtagaggatcacaaaccagaggaagaagagaagaaagggtttatggataagatcaaggagaagcttccaggccacagcaagaaaccagaggattcacaagtcgtcaacaccacaccgctggttgaaacagcaacaccgattgctgacatcccggaggagaagaagggatttatggacaagatcaaagagaagcttccaggttatcacgccaagaccactggagaggaagagaagaaagaaaaagtgtctgattaagagaaaaatatgataagagtgaataataatgatgtgggagtgggacttatgttgttttttgttttttgttgatcattgtctcttttattttgtctttctagctgttctccaagtttgtgtttagagttagatcatttgtgtctaaaatctataaaattattttatctatggggaaacacttgtttactcaatggagcttcaatggataaattctcatgaaaagtttttatgtaaagaaaatcagaaattttgatgaaaaaagcatgcaagagttagattaaatatatggtgattcaataatttcacctgaaattagtccgttccgccacaagtcatggcctcatggggatagtaagattactgtatgaacctctcttttttttaatggatttcagttaaccaaattatatgctaaatttaaatgtttttaccatttaaaatatatagatttcagtgaatagagctataatattttatagtatgaaaattcttttaccatttgaaatatatagatttcagtgaatatagctatattcataagtcataacaatagaccggttcaatatcacatttatgaatctatagtatatttgttcataaacgaaagtagtgattacttcttcatagtagtgaactaggcaatggacttttcaattattaaaagaaagagtttcgatagtctaattggtaaattcttggcacataacattatcatattttggggtcaattttatagattttcagtttaaaataaatagaaaccggtttgataatgatttagaactttagattcagtttaatattgtttttagtcatatacagtaacatttgacatttctataagaaaactagattttttcgtttttgttttttccttttaagctcaggtaagtttacatgtggtgcacaaaaatatttgttgtaaagtttaacgtaacagattaattaaatcaatgtagcaaacgaaaacgattgctttgtttggtatcatgtgtcggtagagtgaccaccccaatgcctaaactttttaaaattcggtctgttaattacgggttgcgtgttcatgaaacgtctcaatttatcaagtggcacaacgtcttaaatctttcaaccgagcacgattcatataatttaatgaatttaagcaaaatccgaaattgtgcgttctcaaatgccccatctgttaaattttataaggaaaaagctttcgtctgttatcatacaaggcacaaaacgacatcccttacctaaactgttatacttataaaaacaaattgatttcaaaattaaaatctgctatgctgcatgtacattcttttggtaacgtcttaattcttaaaaaggattagaggagtgacaaaaaaaaaaaaaaaaaaaaaaaggattagaggagtaatggcatgttagtaatttacccgaaaaatatctgcaatctagctttagccgacgtgtctaatggcccacatgaccgacatctatgcttaaagccaatcaaagccgaccattcagctccatgtgtgggcccgttcccacctcttttaatacgtgtcagtaaattattggttcaattcatgccttctacattattctgtttttcttctaattcgtcctaacttctattgtataattagtctttccatttagtactgatcctttggctagataattctgttaatacttaatagttcggttataattcttcccttttaatttgcccctttatttatagtatattttacagatacaacctgaaagtcttaaaagagttggaaacatcacttttgaagtttgaaatttctttcatatgctttttatataatatttttcaacaagtaagtgaagtaaaatgtcaaaacgatttaaaataaaaatcaagaaaaaggttttaaaaaattgttaacttctatttccgggcaaattatgtagtgttttgttgttttttgttacaaaaagtttgaaataataggatggtgacacaacatcaaattcaaattccaaacaactacataacatatatgccaagtccattgaaactctttaaattatacatctgttatccttttaaatctgataaaatgcaatacaataatagattaaaaggatgtacttcaaccacgtaaccatagaccattgattaatccaaaacaaaaccatagaccatagttcgatacagcttctgttgataaaagtacatgactatgcgattatctaatattagtttaactcttcatctatatattaaaaacatatatcgtttaaattaagaaaaaagtggtgatactgatatcatgatattcatctaccgacttcaagaaataagaggggtcattatacaattcaagaaataaatatccatctttttggatcattttaaaaataattaaatctttacagcgttacctccgcgttggcctggacccttctcttgacactataaaaaccccactctctcttatctcatcacaaacattactcattcacaaaaccatcttaaagcaactacacaagtcttgaaattttctcatattttctatttactatataaacttttaatcaaatcaagattaactatggctgaggagtacaagaacaacgttcccgagcacgagacaccaacggtcgcaacagaggaatcaccagcgacgacaacagaggttacggatcgtggattgtttgatttcttggggaagaaggaagaggaagtgaaacctcaagagacaacgacgctcgagtctgagttcgatcataaggctcagatctctgaaccggagttagctgcggagcacgaggaagtgaaggagaacaagattactctgctagaggagcttcaagaaaagaccgaggaagatgaggagaacaagcctagtgtcatcgaaaagcttcaccgatccaacagctcttcttcctctgtaagtaaaaatttatgaaattttgtttgatcgaaatggttgataagagatcatgatatatatataagatttagattagttttatagatcttttgattgaaccaataatcatactcatggttcttgaaatttgaatacctaacagtcgagcgatgaagaaggtgaggaaaagaaggagaagaagaagaagatcgttgaaggagaggaagataagaaaggactagtggagaagatcaaggagaagctcccaggacaccacgacaagacagcagaggatgatgtaccagtttccactaccatcccggtaccagtgtcggagagtgtggtggagcatgaccatcccgaggaagagaagaaaggattagttgagaagatcaaggagaagcttcctggtcaccacgacgagaaagcagaggattcaccagctgtcacgtccacgccgttggttgtaacggagcatccggtggagcctacgacggagcttccagtggaacatccggaggagaagaaggggattttggaaaagatcaaagagaagcttccaggttatcatgccaagaccactgaagaggaagtgaagaaagaaaaagagtctgatgattaagcaaaatggttaaagaatgaataatgatgtgggagtgggacattcgctgtgttttgtgatcattatctttctcttttaagttgttattgtggctttcgttgattgcatttgatcctttattttgtaatttcattctatcttttatataaagtttgcatatggtttatacttaaatgttttcgagtttgtgtaagttgtgtgtgtaggaggatttcatttggttatcccataacactcatcgtatactcactcttacgtttggtgattacgttattcacatgatcacctcgaattgtcaaaaaagtttcaaatgatgacatgcataagaggaagagaaagtgggcaaatactaaaaccagcagataatgtttatcacaataatacgaatatttcaatatttcgccatctggcttcttaggatttgttgacatatatatccaaacattattttcaaacaagatgaacccatcatcatcaagattaaacactgataatgaacaacgggaaaatacgttttaataaaacaatacaaataaataagacaaaaaaaagaaacccattggtttaatgttaaatcatagatgaatgttgctttaaacattgtattatgttaattctaaatgcttgattatatgatttttatgctataacagttttgttcttccatgaatttcattcatctcatcataattttttttaacctaaatttttgtctgtttgcactttgcattttataaccttccaagtacatcagaggctgtatcaaatcactactcttaaacaatagaaataacttattgggcttcacttgataacatcaaaagcccaagccttttcgaaacccttttctctagctctcactctcagcttgtttcctcttttgttcattagacaccgaaaatggcttcgtctgcgccacagggatctgttgatcctctcaccgggaaagatccggcgaaggctttaaccgctgttgcttctggattcttcgagaatgtgaagaaaaacaagcaaagcttcttccagttcgccgccatgactgggattttgcttctgagtttccgatcggtaagtcagaagtaccgaattcacgatctggaggaagacactgctgttctcaagaaggaacaagatagtttgacggatcgtatgagtaaaatcaaaagcgatcttcttcatcaagcatcgattgactcttccggcgtctttgcttctcgtctccgtctacttttcggtgaagataaaaagtgatcggagatttgattggtttgagtcaacgaggttaccattttcttactcgtgcgatgttattgtagttctaaaacacatgtctctctgtcttaagattggaaggttttggcgaatgaataagtagggcttttaaggtgatatgatttcagacaatggtgtatcgttttgacttatttgagaatctgcttagtgagatcattaactttgttgtggctgaatcggtttgatttagttttgagcaagcagttacatgtttcttctgaggcatttcatcgaacactttaattgcgtttttaaaactttgcacacacatctctcaaaagagttttgtttgaagtttgggttatgtagtgccaacagcaataaggagactttcaatgcatgaacaagaaactagattggaaggtaacatgtgactgcttgtcaattcacctcttgaaccaaagaattcaattagtaaacgttacattagtgttggtgagtaatgaattcaatgatttaatattgtttcgtagccataagttaaattgagctgagtgtgttacgtaatgattcaactcaattttataatgtgatttcattgttatctatatacagagatttttgtaaacgatggatccactgttacatataaaagcataaaatggaagagattatactattacatagtgtgcacgagacgaacatataatccatgccaacaacgtcttgaaaataacaaaaaagtaagaggggcgttccgagaatcgaactcgggacctctcgcacccaaagcgagaatcataccactagaccaaacgccctctttgctatattaactctaaaatagttcatataatattttaacatgtgcagcttcattagccttttttggcacgagaaaaaaaagtcaaaaacttaacaagctcactgcattgattgctactaatttgatagaagccgctttcctccaattattcaaaacagatgtccggcgaaaaagaacccgtcgccgtcgaatcagccggcttgcccaacggcctagtaagtcatggtaactccaagacacggcgcgtatacgaaacagctcgatctctgcataccggtgctgtgaaagatcttctctctctcggggttcgttttcttatctcttactctcacgttcttagggtttatgtatctgacatattctccgcttcaatctctttgagaattcgatttttcttctgtaatttaattaagtccgtgtgtctccactctgttaggtctgtgagagatgtattttccgattggtatccgtcgaggcttttgattccgatatttcatcagtctcgacttcaactctgcgcagctggctcaaatccggtgatgatgaaactagtgcatcggaatctagctgttccacaatctgcattgtttgtttaggtatattgcagttcgttttttccgatgtcaaaaaagagctggtgaaatcggattctagtagtgattacgttgcaaggataacggacttggtgaagcaggatcgtcatgagttcgatagctttggtcttgaagtctctgtgccatcaactatcatggagaatgaacgtgcactcttgtaagcttcttcgcttgcatcaactaaagattttttcctttttatcagttttgttttggttctgctctagtgttaatgtatctaccttaataggtcataccttaaaggaaagtacagcaccgaagtttggctgcagcgcgataaaatttctgtaaaggatgccttgaaagttctactcttggatcaacttaaagcatcgttggtgagtcggtgatttgcttgaaagtgtttctgttttggaaaattgttgagttgttgcttaggttttcacctttgcttctattgcttagtatcttatacaaatggatgttataacctgcaaaatctgtttccagatactaaaagtctttgcgtttcttctctgttttggcagggcgctgaatcagattcaagctcttttcacatccgtttgacatacactaaagcatcagacgaggctcagggtgcttctgaaacaacgcatgaaagtaagaggaggaaaacaggtatgtcgagactctacaatcacttaggactcggttgaatctttttcttgaactcctgattcataaatcatttatgacatggtgcatctataattgcttgaaatatcacctatacttgtgatgttgaaggagttcgttgatgaaagaaaatttgaccttcatttatgaaattcttccttggttacatctgaaggctctttgagttttcactcttctttgacacttcaaggcgataatatgcaattaagccgacctctttatctacgctacttccgtatctcgcatagatgtcatacttcttttaaagtgcatatattctaagttcatggtccctgtctatccctgcctggtctatgttgctccttatgacagtttatacacttcccggatcttgtgcccatctacatcattttcttacacattttattgagataatacattagatcccgcagatcaaatttcagagtttcgaaatgctatctgttaattgtattttatgtatatgcagacgcagagaatggatcaaactgtatttccgagaattcatttgaaaaggtatatgtttgcatatttaacccacatatatatatatatatatatatttgtagaactttctttgtcctggttatcattatttgactaactgaaactcatgttctcgacatttttcttatatcaccaggtgtatgaaccatgcatcttttcagttcattgcaacaggatgcctatcttttttagtgggaggtacttcaaagtaagtcactgttttcatgttcttggggcagtgtattgtatttgtaaccttcatttctgtgtaaactgtagtttggtaacaaatgaattcgcagatgaccgagcagatctttaacctcttatcgaggatcaatttcaattgatggttcgatcttatctttgcagtactccagaaatgttagtcaatcacgatggattattgatgatgaaagaatgggggaagcgtctgttgaggtagcagtctcttagtggtcatctggacttttttacactattcctatagataacattgacttcaatagatttttgtatatatttcaggagatacttggtggaaacattcttccagcatgccttggggattcctacaagttccatgctgctggcagagaagatattgatgtgagaaattacccttttcggacgttatattcatattcgataagtttatgcttataatataaaagagctgtattcaggtacgaatgttgggttcaggtagacctttcttgatcgaggttcagaattctcgccagttaccgtctgaacaatcattgaaggaagttgaagaaaagataaacaagtcagagaaaaaactagtaaggcatcattaattgaacacaaatgttgtatcaattgattatgtgtgccttgttgcaatcttacaagcagtattttggctacaggtcggagtaaaagaccttaaatgtatcggaagtcagtgttgggcaatgatgcgcgagggagaagcggagaagcaggtcagcattgttaaatcctattggaatattgaaccaacaaagacttacgttagaaatgtaataaaaattgattgaaccaaccagtgcaatgctttttttatgtactgcagaagcagtatgttgcacttgtatggatttctcgtccacttgaagagaaagacttcaactcaatttcttgcctgaaagaattggtgagtcgtttctttcttttatgattttttaagaatagggacaatcccattgtctgtcctgaaacttggttttaattttaatgcaaagtaacgttcttgttctatactatttcactgcagaaaatcttgcagaagacaccagtaagagtgcttcaccgacgaagtccactggaccgtgaaaagattatacattggttagtgataatctatcgtgagtttcacattttacttaccttgaagctttcttctgtttagtaagagtcagtgtttgtggttccaatattcaggatgaaagttgaaaagataaaaggacactctcactactttctattgcatctgtgcacccaggttgctacaacttctaactcacctcattatcattcttgaaagatgggcaagttttaaattttcaataatgcaggctggaacatacatcaaagagtttgttcatggagatcttggtcgtaccactcccaggtataataaaaggagctcccttcaatattgtagacaaaaatatacaggatctgtgcaatagcatattaacaaaagagagtttatttcattttggttgcagcatgggatcaattttagggtgcagagcggagataatacaactagatgtgactgatgtgaaaatgggcgacccatgaattgccaagtaaatgcccgatgttcttccttgtttaattttgtagccttcatttccgtttcatttttgtcataactttattagttttgtttctaaaaaatatatggattggtaataaatactttattaattatatcaaaagttattaatcaaataacactgaatttgccatgtgttttgtttctggtttctaaatgtaagacttgagtccatcaattgctgggtttcagcttgggtaatccaagactagtggccgggtttgttttcatatttctcatttgtaaaatgatcacttagatatacatgtggaatcatttttgagacttagcctagccaaaacaatataaaaagagcaaaataaatttctagtgatacaagttgaagatttgcataatattcatgcgcaaaacttgatcactttcatggaaaattaccaaaaataccagaggggttttgggtttcgatcactacattaaggctccaatttattttaatttttttttttaacttgtaactttggtgatccgtttgatactgattctgatagtttttaaccagcggtagagagtttcgaaacaaacaacctcttcatgtcctggcattcttgttatagttgttatgataaatgtagtactactttttcttaatttctatgtgttgttgccttttctaaatttctacgttcttgattttatttccacaaatgttcttgtctttttgcaatttcaatgttcttgcttttgtttttagaatgcatgaactagctagagtccggagtcgttacagaaaatacgatgtcgtgtcagtgctttttacaaacctttaacagtttttgactggatgcttgaaattgctcgagcagggttcacaaaaataaatataacctcgggcaatcaagtaataggcgaaactaaagtggaatagaaaacgatgaaaagatcaacttaaatggactattttgagtaaattctaaaccatcggtgagtttgaccttgtttattcaggaagacctattttcattggtcacattacatttagggtctgaatggtgactaaaaccgcacctaaaactgcaccgcaacagtgatataacagtatcaaaatttctacgtatacatatgtatctatgtatttttgttactatttaaaccgcactttacttctcccgcactgcaaaacgcagtcatcattcggagccttagtctaagaacagtatgtttgatataaataaatcaaaatcaaatattcaaccgtcctcatctacttttttttttggcattaatttatttgcttaatttaatcatgatctcgatgactcaaatactagaagaaattgaaagttccagggtattttttagtatctactttgatcagatgtgatccaattatattatttatcatttttttttgtaacaaagaagaaaagtaagacggttaatagatattaactcaaatattttcagtttaaagttttaagcgttagttcatatattttacaatacaaataattgaaaaacgaacactgactattaaatgaaagcaaatattcacgaggatactggttagtggctacattcaccaaaataaagtacaaacaagtacttggaagcttctctgcgactataaggctaaaggcaaacaattcgaacacttcttttctgtgtgccgccacgtagttggcaaagttcagtggagtcatattgctctgcaatcaaacaacgcgatcccacttatgatcaaataaagatattcaaagatgtttgaataataatgaaaaacatatgaaacaaacctccaagaagtcaattgggtaaaattcagagccgatgtgtggatcaacgccgcctaacaataagtcatacgaccggttcgccatgtaagaatgccctatgcaaataaaacatttatgtcctctatctttttgtataattgcagataataataatatattaaaattatgcttaaactttatagaacattttttatttattttataagcattttgtaagaaaaaaaggaaaaaaacaaaattatattctttaaatatagctctatttagatttttacttgcaaaaccattcattaaatttatataatcgaacatttcaaccatagttatcttaatgaatagcaaagctaactcatttatttaattaatcaaaacaaagttttttcttttgtattcaaagttcaaacaccttacattaaaaagttttcgatttttattttattttgtaatcaaagtcttagagtttaaagttttatttttcttaaatctaaaattttactaaactaaattcattaacaagacattttattaatttaaagagattaaagcctataatgaaagtagtgaatgctaaaagcttaacaaatgtaaatatatagaaaatgcctataattgttttttttaaaacataaaagacttaaacttttttataaaaatgcccctctactataatgccctaagccatagctaatctcttcgtgtagattctagtcgatccatgaagcatccacccatcttcgccacgaacgaatatctatcagccgcttcatcaatctgtcttatgtttagatagttaccatcttgttgaagtagatgacactttattttgaagcatttgtgaatgtttctttgactgattcatggtatcaagtagtgagagcagagcaagtgagcgagatgattcaagaagcaccaattgctgtcattgtgatcattgaactgactacttggccacagcagtgagacgacacagtcatatgactccagcaatctacagttatagaacatttcattctttccgctttgaatgttatctatttttccattttcattctcagtttttggttgattagccgtttaacaccagtttctacttgagttatatctccattacattcaacttccatatatatgtttttgatactgatgtatcattgactaagagcttcttagagctgattttggaattgaattacataaaccatgacgttgaaattagaaaagcaagtttttttttgataaagggctaattagaaaagcaagttggaaacgaacattcctgtaaatcaggacatgacccaaattaagtaaagcatgagacagtttacttggttgtatcaatgagtctcataaccgcagttaaataggggatgcgttggtcatctgaagctacaatatgatgctcccatcgtttctcaaccaatggagagtgcggtccaagtaaacgggtttcatccgcaccgtgagatcacttctcaaggaggtgtgaacggttgtgttaatgcacgaattaaacaagtacgggtgagtctctggggaaggtgaagaatcaatctctaatccacgagctgaacttgaagctgggcaatcgacgggctgaaaggcttattgcgaactgagagcgtagttgagggcgctacgaggcgatgccgtttcgagctggtggttctagtgagctggctcttctgggcgagctggctgatcttcgacgagcagacttctctcgacgagctgacttgtatcgatgagctggctcttccgggcgagctgacttgtgctatcctttctccaggtcccgaaaaacgtcccttctcccgagactttctattccttatttatacccgtccgtatagtagggtacgcaaggtgaattcccgagagtgccccccttttctacgcagctgaactcacatcctgaccaggctgggcttcggcctgctgggccggctcgagttctaaagtgatggtcgggctgggtcgttattccttgaaatgggccggttgatcactgaggcccaattgatgtatcaacagttgtcccccaatccgatgttcggttgcggacgtcggatttaacagatcagcgaaactgacgcgcctgtggcttcgtccttttcgatgcagcgcgtggatccaacgtgccttctgattcgtgcacttggtttcttgcggattcggaagctgaagcggtgcgtaggtaatcattgcgcctactcggcggcacaatgatttcctaggtcattttctcgcctctataaatgcgagaaacacgcttagttttctcaggattcttcgcagccaaaggtactttcttcttccccttctctattttgagctcgtaatttgtaatgccgtcgtcagatatttccatcagttctctctccgaccatcgtcgatctcgcaccccggacggttcttcagagcgttctggagccgaccgttttcgagccgaatctcttgatgacgatcttgtcgaggcgggatattcttcctctgggtcgtcttcgcgaacttctgttgtggccgagctacggcgccgcatttcttctcctctagttgaccgggctgaaacaggtgctgcggcgaccaccactttcaaaccccggcttacagatgaggaaattggtgatgaggatttcaaggaagccatagcttctgaggagatcgcgatcttcgaacctcgatctgcggttgggggaggttttggggacgatgttaaggagatgacagtttctgatgagattggtgtatttcctggtgtatccggccctaagcccggctcggctgactatctgggaccaaccaagacgtcggcttcttccatgagtaccgcgcttcgcttttgtaacgcaccgcgtggtttagtggctcgggtcccggaaacgcacgagcgtccttggacgactccggagggttatatgtgcgtctacgagaagtttctcactgagtgcggcttgtcgtttcccatcccgatattcttgcttggattcgtcgccaggagaaagatggcactttctcagctgaccgtcgcggcaattcgttatgctgttggattgattcgcttggccgagcagtgcggagtcgaagttcggcgttcccattatgaggaagttatcaacctcaagaggattggtagtgctcggcccggattttattacgcgcagtcagcgacgaagccaaagattattaccggggtgaagagcaaaactaatgactggtgctttgaatacttctttgtcaaagtgaccaaagagtcggtcggagatcacgagatggtggatttatctgaatggcggatgacgcccggtagtttgatttcagatgtcgaaagtattttcttttttgttgcttttctcgtttctgataggacttttccttctctttcagttcgtcgtttaaagattcttgacccgttccccgaggagctcaaagaagatcttctgaagattcgcgctgttagcccatacgtttggccgacgggcgaagagaaggaacgcttatccttacacaagccgaagaaagctagaaaaactccaggtacgcgctttcgtccgaggtgattattcgtccgtgccaccttccttatgcgttttccttctctttagcgaaaaggaagatgaagatgaataccgaagaggtcgggagttactcatctcgctacaaacgtcagaagacatcagcactgaaggaatctcaggagaaggatcaccttccgagcggggaggatcgggctgcgcgttcagttgaggaagagaggcgcactgcccgatccgagcctccgagaggtcatcaggggcgtagcgtcgtgaacccggggtcgtctgttgatcgctccaaggagactcgggagaaggagctggctacggctcggcagggaaagcagctggaaggttctgctcgctctgatgttccaccgggatgcaacactttgattgttcatcctggtcccgccaacgacccccatcgtaggcgatcctcgggggccattgaggagatccgttctgacgcaagggtttcgaagcagcccgactaccgctgggagcattactactcgggtcgtgaagttccgataacctgcgacgcggagtcttgtgcgatctttttcgcaaaatcagctacgggccgattccttttcccgaggtcaaggaattaaaggagatgaaggcctttaccgacgttgcgaggaagacgctcgatgtatgtaatgttttttttttttttttttattttggccgagatgcttccttgactttttccctcttttctcgctttgttaggctgttggctcgatgaaccgtctggcttatctgtacgagcgtcgtttccgcaacatggaagtgctgggctcgcaggatcttcgtggggagttgagtgctgagaagaagaagaacgacgagctcctgaagaagttggagtcggcgagcaaagaggccgcgcaccttaagagtgaggtagcgacgttggcttaccagcgaaccgttatgggtgaggagagggatcgttgcaccctggatctggagaaggagagggagaaaacggtcgagctggaggatcggctgaagtccgagaagaagaggcttcggtcccgtcgtgagaagtacgcggagaatcagacgagtaaagccttgattcatgttgctgacctctttcaagctcgcatgaatcgagtgaaggcccatctcgatgacaagctgaagatcaaccccaaattcctcgattacaaccaagtctgtgggaacgtcgctcttttggatgagctggttgaggctggggagatcgagatcaaatctaccgagctgatgccacgtttgattgcggatcgggatgccctcaaggccgaggtggagggctttgagatcaccgagatcgagaaggatgactttgacgtctggacccttttcgagaaggttctcgaggaggaacatttcgaaccatcggctagcggaggtcattctgagaccgaggcagaaaaagatgaggagacttcggttgaggatgctagccagcggaagccggagactcccgggccacttcctgacgacccggctgctgccccggtgccggagtgaagtcttcatcctctcctgaataatgctcttgtttttggatcgtttttctttagccacttctgttggcttttatttggatttgtgccgcttctgtcggcttttgtttcgaacctatgccactcctgttggcttttattttattaagtatttcggatcgtttttttttttttgtttcgtgcgtttcgtattgcttgcgtattgctcagctagatttgccgaagtggaataatgttcgattttgcaagttccttagatcgtcgggacgattgacatcggtcccgggcgactttggaataggtttcgcgttttgcaagcgttgagctcggcttttaaaccttcgcgagtaagctttttcccgggttgttttatcaagcccgggcgaactcggaggtgtttatcgatcagttgccgggccaaggcaatgatgtgaaagttcgctctactttaggtaagtctcgagatgaacaacagatagaattttattaatattacagctgcgccccgtcaaacgaggctgcctacgtaccctttgcagggatcaagccgatcgtagttcacatttacaaagtgatgaggtggttcaaccgcacctcggtttttttttgtttttttttttttttttttttttttttagtaatagtatctcttcaggtgcattgagttccaggtgcgaggcaccgcggtgccgctcattgttaggagttcgtagtctccgggtcggacgattttcgatacttggtatgatccttcccagttcgctcccagtttgccggcgttgatctcggctgtattttcgaaaactttccggagaacgagatctccgacgtcgaagtggcgattgtggaccttttggttatagtgtttggcggcggcgagttggtagttctgaatgcggcagagggcggcgttccgtatttcttccaggtcgtcgagtcgatcgagcatcattctgtcgttgagttcggggtttttcaccatcatggatcttcgaagactggagtatcctacctcggcaggggccatggcctccattccgtatgcgtgtgcgaatggagtttgatccgttgcacttcggggcgtcgttcggtaggaccataggacaccatccagctcgtctgcccaagctcctttcttttcgtctagtcttttcttcagaccggagagaattgtcttgtttgtggcctcggcctggccattcccctgtgggtaccgtggcgtggacttattgagtcgtattttccagctggcgcagaaattttcgaaagacagcgagatgaactgcgaaccgttatcggttatgatttcataagggagaccgtgccggcagatgatgaatttccagacaaagttttggacatcattggctcggatcgtcgcgtatgattcggcttcgacccacttcgtgaagtaatcggtcattacaaggatgaaccgtttctgtcgtgaagcaggcatcgggccgacgatgtccattgcccatcgcataaaggggtatggtgcgactccggctcgtagcagttccgtgggttgatggatggtgggcgcgtgtctttgacattgttcacacttggccgtgaaggtcttgcagtcagaaatcattgttggccagtaaaatcctaactttttgagcttaagtgcgagagctcgtcctccggagtggtttccggctgctccttcgtgagtttccttcattatttcattgatctcggttccgtggaggcagttcagcattgctccgaacgcgctgaccttaaggagatgctccttcatgagggtatacttggccgctttgattcgtagacgccgcgctgtccacttatcacttggcaatgttccatcggagaggtaatcgcgaatttctactcgccaatcggtcggatccgctgggtcgggggcgttcgagcttcggatggtatttacgatttccacggcgtcggtcgaatcgatacttggtttatcaatactttccaccgggatgattcgtcgcaagtcggagtcggaagttaacgctaaggcggcgagcgcatctgccggtgcgttgtcacctcggggaatttttgagagtttaaagttttcgaaatctttcgtcatcagttggacgatcttgagataggcgtccattttctcgttctttgcttcgtactccccactgagctgcccggcgatgagttgcgagtcggtgaatgcgtggatcgtggttatctgcatccccgcggcgaggcggagcccggcaattaggacctcgtactcggccacgttgtttgttgcgacgaatcggagacgaaaggactgttctagcacctcggcggttggggagacgaggcgaattcctatccccgatccgcgagctgaagatgaaccgtccacgtacagactccactcttcaccgcggtttccactgaccgcacgttctgctgactgtaacggtagttcgatgaggaagtcagccaggacctgtgatttcattgcggggcgtggtcgaaaatcgatgtcgtattcgcttaactccacagcccactttgtcatccgtcctgactgacttgggctgtgtagggcgactcttagaggttgatcggtcaggacggctattgtatgtgattggaagtatggtcgcagttttcgtgccgacgtgacgactgccagcgcggctttttctattaccgggtatcgtgtttcggcttcgactagtgatttgctcgtatagaagatcggcctttgctcgcctcggtcttctcgtactagtacgctacttactgcgtgatccgatactgcgatatagagatacaaagtttcgccgacttcgggctttaccaggatcggtggtgtggaaaggtagtcctttagcttttcgaaagcttcctcgctatccttatcccaatcgaattgggcccggcgcttgagcaggttgtagaatggtaggcacttgtccgttgatcgtgagatgaatcgattgagggcggcaattcgtcctgtgagcctttgcacttctcgggcgttccgcggtgatggtagttcgaggatagcgcgaatttgttttgggtttgcttctattcctcttttagtgacgacatacccaagaaactctcccgatgttactccgaaggtgcacttggttggatttagcttcattccgtatgtattgaggacgtcgaagcatttgctcagatgctcgacatggtcttcgggcttcaatgactttacgagcatgtcgtcgatgtacacctcgacggttctcccgatctggtcggctaacattttattgacgaaccgctggtatgttgccccggcgtttttaagcccgaaggacatcaccttgtaacaatacgtgccgcggtcggtaacgaatgatgtcttttcttgatcgtccttgtgcatcaggatctggttgtagcctgagaaagcgtccatgaaggagaggagaccattccctgaagttgcttcgacgagccggtcgatgtgcggtagtggataactatcctttgggcaggctttgttgaggtcggtataatcgacacagacgcgccactttccgttcttctttttgacgacgacgggatttgctagccattcagggtatttcacctcgatgatttgccccgccttaaggagtttttccacctcttcatttactgctcgtgcacgctccgggccgagtttccttcgtttctgttttaccggcttgaaagttggatctacgttaagttcgtgtgcggtgattgccgggtcgattcccttcatatcttcgatgctccatgcgaaggttttggaatttcgtttaagtagtgcaatgagttcgagccgaattgatggtgaaatctctgccccaacaccaacgcaccttgtcgggtcggactcatctatgtttaccatctcggtgcggcacaactcggactcctcgtaagacctactcggggtcttggcttccttcggcgctggagcggttaactgctataatttcttggcggttcgatttttgtgctcaatgaggaagcacgttctagcgacctgttggttacctcggagagtgaagatgccgttgtgcgttgggaacttaacgcactgatgataagtggacgggatggcttgcatttggtgaatccagggggtgccgaggataacgttgtagaccgctggtttgccaatcacgacgaacttcacccaggcgattaatcctccgacaaagattggtagtttaatcgtgcctattgtcatgacgaaatctccatcgaaaccggcgagaggttttgagactggcttaatctgacgatccgttatgttcatcgcggttaaaacatctttgaaaatcaagtctaccgagctcccggtgtcaatcagaacccttgttactctgctatcgcttatgatcaactcgacaacgagcgggtcgttgtgcggggtatccaaaccttctaggtcgacgtcggtgaatgagatcggagcgctttggttcggatttcttgtcgtgcttgtggatgagggccaagctaccaccatctcggctttctttcggtattgcttaattgagcgcactgaatcgctgcaattctggagtccccccattatcacgtgaacttgtctaaccacgactggttccgcggcgatagcctttccgtttcgctgtcttttggctgccggatcgtcagccgaggtaattatcccttgttctgctggggtcggtggtttggtttgatcgttcaaatattgtcgggccgtagtttcgttacgtcgttgatttttgttatttatcgggggtcggtcgcattcgattgttattccgccgctcttatacttggccatcaggaggccctgcaggaaacggcaattctcggtcgaatgcgctctgcttttgtggtattcgcagtacatcggccctgctgctggggaatcggcgtcgcgaatatatttgttccaaggtttagcgtcgggagtttcggtgcttactaagaatgaagttggttttcggcccgcactgggattgcgatcgaggtgctgtcgcggctcgtttgagtcgtcaggtccgaccttaataaccactgcgtctttacatgcgggggttttggtcgagttgtgttttcttgccagaatgagcttctcctcttcaagttcgatgaacctggatgcccgatgcagggcgtcctctagggtgctcggagcgtgtaatgttatgtcatcccggaatctggagtcgtaccatactgcatttcgtagcgcaactattgcagcttcgtcgggcacagtgatatttgtgactaccagtttgaaacgatcaacgaaagatcgaagtgattctttagctccctgagagatggaccataggtcggcgttcgatgtttgattttcaattagaggcgcgtaatgtttgaggaaggacgaggtgagctgatggaagctgtcgatggaattgggttttagacgtgaaaaccagttgtgagctggtccggtcagatgttcgatgaatatttgacacctcccggcatcaaagttgtcgatcgtgagctcggcccggtttatggcgacgttgaacgatgttaggaactctttcgggtcgtttctaccgttgtaactttccagcttgattttttgggctcctctgatcgagacgttagttattcgtcgagtaaagggggtttgctgagtctcctccagaacgcggtcgagctcgggcgccgtgcttgttgcgcggtggatcttggagctcatttcagatatagtgcgtctgaggtcggcgacttctgcgtctcttgcgacatcgttggtgggaccggcgatacggacttgaggacgatgctcgatgctttcaaacactggcctatggactgaagttcggctggtttgtagacgattgatttcgtccatcgaatgtgcttgtgcagcggctagggtggcgaatcgtgcttccgttctggcctcctgtcgacttaagtggtcgaggatgttctggagtagtcctccgggcccgacataggttccgtcagtaacgcgtcgttcctcctggtccgtattccgacgaactggcgggttctgctcggctaggggagtttgcgagctggaacccggcagcgggggggtttctacgttggcccctgccatttgtccttccggggtagatgggagtgatggagccgggatggatgttgagatgtggatccgtcctggggctggtgccgctgccctacctcccgagctggaggcgtttgcgtcgagcgctcctgaaggtccgcctgttgtcatctccgttgtgagttcgtggtttgttggatagatatctccgagctatccccctacctggcgcgccaactgttaatgcacgaattaaacaagtacgggtgagtctctggggaaggtgaagaatcaatctctaatccacgagctgaacttgaagctgggcaatcgacgggctgaaaggcttattgcgaactgagagcgtagttgagggcgctacgaggtgatgccgtttcgagctggtggttctagtgagctggctcttctgggcgagctggctgatcttcgacgagcagacttctctcgacgagctgacttgtatcgatgagctggctcttctgggcgagctggatgatcttgacgagcagacttctctcgacgagctgacttgtatcgatgagctggctcttccgggcgaactggctgatctgggcgagctgacttgtgctatcctttctccaggtcccgaaaaacgtcccttctcccgagactttctattccttatttatacccgtccgtatagtagggtacgcaaggtgaattc

SEQ ID NO: 1140 - DNA, 143879 bp, Arabidopsis thaliana
gaattcgaacattacattgataaacagagcttttctggtagtatctgaatctggaagtgtcaaacatcttcgaaacatcattccctgattctgaagctttcttgaacatttcctgcaattgctttgttacttcagataaatctgatgaaactttttgatcctttgattctttaggagcacgcttcctatttttctctgagattctcagagtttttttctcttcttctactttaatcttctcatcgttttggctcacagtaatcttcttcttcttcaacttatcttcttcatgagaaggagtggtctctctatccttcaaatcattgacatccgtagtgtacggaagctcatagctctcgaagaaattgataaaatcccaagcgtaattactcggagccggcggtggaggaggcggcgttatggtgccggattcgtatctccgggagtagaacgagtcatgattaagatttagagattcaggttttgaaccgcttaagagatcgcaattcgtaccttcaccttcctcacaatccgaatcgaacttgggaggcaaatcggaatcagaactggtaaccgagtgagccgaggaacaggattccggagaatacgtctccggtgattcgtcagcttcggattcaacatccggcggagactcgacggcatgttggaagaatctatggagagctggaccgacggtgttcagagaaaggagataagctgagtgagcgtcggctaaggcgtagcttcgccggagcgtatcttcgagtgagctgcagcggtcacggcatagagatacggccggtaaaccgtcgagcttggagggggagcaacccataacggtcgttggagagttagtgttttttcaaaagcttggatttgttgtcatataaaagtgattacgtgattaaggttaaggtatcattaaaaacttaaaaatgatcacttaatttcacattttaccaaatttaaaacagtaaaagcgcaattacatttcaaaaggaaaaattcatagagtactgacaacttccacatatgaataaatgattatgattcgaataagagagccgtttcttttttttttttaggaagggacatgcaaccaaacttcaatttggaaactagctagtaatcatagtactataaacgttgcaattatctatttttttctattcacgattaacattgcattttttttttttttgaaacgtttgcattgatttatcgtcgttagaaatcataaaaatgaagtttgcaaggaaccatgcaattattctactctgtgaatcattgaagcatagaaagtggaaaaagacgtggtgttaaaaagttaaagctaaaaagtgaaaagttaaaataaaaaaggtttgagattcaaagtaacgtaaagtgttaaaaacaaatttataacgaaatcatgctctaaaagtacatgcacatgttgtaggtaccaaactcatattttaatccccttttttcagaactcaaaactcacgattagcttcaaacacaagtaaaatgaagttttgtcaataactcgagatataaatccatacattaccacactgatcatatctcatatcttcctacttctcactatgttatagaatgaatatgttgttttctctttaatttgtactattctagcaaataatatccagagatagaaaacatattagttttatagtttactcccatgcctatatattataccaacaaagccatctccacccatacagaaaatatcagtttctactttcaacattatattgcaattttaatgaagatatacacaaaatataatttttaatcagtagtatgttctagttgtagcaagttactgatcaccatgaatacattttccacaaaaccctactaaaaacatgattttgtttcatataactaccatgaaattcttgtctacaattaccatgataattatcaatataaatacattttcagatagagatgtgcatgaacgagcgtcttcacacgtcttaacttaaaaatcctcaactttaagagtgagagttggaactttttgggtttgcggcttttgagaagataagacgaaaaaagcgaaaacttccatatataaagaatacacgaggatctttaattagttcctaatagaagaaaaatttatcaatgtttttgggtgaaacaaaaaagaaaggaatgtttcttttttggggatggtggagatccaccttctcatattttgtcttcttatcactacttttgtaacctttcttatcataggatattcccacgcgtattaaaatcagttcaactaaacattatttccttcaagaatatacccatattaacaaaaccacgataagtttagagtcttacatgaacgcgaacagacacattgaagtttcgacaaaatcaatagaaaaagtcacttatcgttcaacctttctaagagaaatggttaataatctcgtagttaggagttttcttatatttatactctgttttacattacattgttaaccaacttattgtagattatataagagtttaactaatagtcgttgttttctggctgtgcgcggttgtggagatttttaatatgctattgtcagtttttttcatatttctttacgttggttgacaaacatttcctagtcgtcaattctaatgttacttgcattgcatggcttcgcaaaaatactcaaaaaacacatcattgttaagtaacggtcataaaatcatgaaagcatcacgtactatctgtggctttactaagacgtcgttaacaaacgtaatgataacattcttttttctggtgattgattcatgattttatgccttttttttgggtgatcaaacaacgttgtaactatgaccgggcctaatagacatctatgggactctaattccattgacccgttttgtaacatatatactagagtgagtagtgataatttatagaaatttgatatgtatatgtctctgagtagttagtgaaattgtaacataagagattgggcctgactttattaagttaggcccattaatgtctatcactaacacgaaaaccagcatctgcttcagctcgtcgtcttctctacctgaatcagtgcgtctggctcaggtgacaatgcaaggaggatcatcgggtattggatacggtttgaagtatcaggtgattcatcatcttcatattttccttaattttccttaggaagattctttaaagacggaattcattttgtttcagtctagatgtatatcggatgtgaaagccgatacggattacacaagctttctcactggaactcttagtttaaaagaagaaaatgaggtgaacccatgtcttgattttgatttcgtcttctattttagtcgggaagatactgaaagttttcgttttttgttctccaccatttgagatgcttttaaggttcatcttcttcgtttgtcatctggtggatctgagcttatatgtgagggtttgttctctcatcctaatgagatttgggaccttgcttcttgcccttttgatcaacgcattttctccaccgtcttctccactggtaaattcgcttgtcttgagttgattagcaagaatttggagctctggtctttgtattgatttatagcgtgagtgtgtcaaaaactgataatggttttatccgttaaggtgaatcgtttggagcagcgatatggcaaattcctgagttatatggtcaactgaattctccacaattggagcgtgttgcttctcttgatgctcatgttggtaagattaattggtgagtttatgatcaaacgttttcagcgttctattgctaacagttatgtaaaagtgtttaagagcttatttttttcttatcctcaatcatcttatgaagctgactctcaatttttctctctggtggaaacagtgttctttggtggccttctggaagatgtgacaagttaatcagcattgatgaacaaaatattttcttgtggagcttagactgttcgaaaaagtctgctgaggtgatttagctactagaatatagtgacaacctcattttttttttatctctcaagtatttagatcttttgtagggtatttcggttaaacaggtttggatttatataggttctatctaaggattcagctgggatgttgcattctttatctggtggagcatgggatccacatgatgtaaatgctgttgcagcaacgggtgaatcatctgttcagttctgggacttgcgtactatgaagtatggtatcactgttgctatcctctgttgctgcatgcagttaggaggttttacgcattgattttattcacacacgttataacatgctctgatgggggttttcaattttcaaattagtgttagttgcttgtggttttacctcgtcacatgactttctccatgttttttccccaacaaaggaaggttaactcaattgaacatgctcatgtacgcggtgttgattacaatcccaagagagaacatatacttgtaagactcctctcttgtaactccaaagcactgcgcagtaccctattgaatagaatggtgtgcagataaatatgctgtgcatatccgttcaggtcgttttctacatcagcattgagctgaactgaattgttatggagctcaacctttgatttaaaaatattatcataactttgctgtgatggatcaaacattcgattatgtaggtaactgcagaggatgaatctggcatacatgtctgggatctccggaaggccaaggttcctgtccaagagcttcctggtcatacacattggtatgtttgcttctgtttccctttgtaaacctttttttaaaggaaccaagaacttgatccttgaatttgtgcctttgtatgtttttttgtcaaattttacaggacttgggctgtcaggtgtaaccctgagtatgatggactgattctggtactctactctctttctcctttgttcttctgaacacaatcaaaacgttccacttggtagctatgtatgtcagtcgcagttgttttagctgaaatgtgcagttttattttcggtacatcctatggtttagcttagaaaaactaaagcctctgcttttaatttgcacgcttataatttgtgtcaattctgaatcattcaagtaaaatacagagcgctggaacagattcggttgtcaacctgtggtatgcttcagcaacatccagtgatgacaaaacctcagaaaggttatttcaaatctcctaaacatccttgcaccgatgattttcattttttgccaacactgttgtgatttcattgttaccatctttttcagtcctgtggaatccacacgacagcgtgtgaacccgttgctcaactcatacactgactatgaagacagtgtctatggtaaaatcccttacaccttatgattaccattctatcttgtgaaccgaacaaatacttaatactgtttaattaacaacacaggccttgcttggagttcacgtgagccttgggtttttgcatcattatcatatgacggaagagtaagtaaactttctctaccccatatactcagcacaagatcaacctaaacttcatttaaagagcttcggggtcattaatcttgcttgtatataaatgttaggtcatcatcgaatccgtcaagcctttccttccaagaatatagtaaaaacccagcatctcttttgctctgacccagacacgacccatcttttggtaaagttggcactattgtatttgaaacaatgtacttttgacacaatctttgtggatcctgatgtatctatctatcattcaccaagattctatcggtatcaatattcagttgctttgacctaaacagactcaacgactaagtaagaaaataaactgaaaattccttcggattggatttctatgtacagataacattgatgaggtatatgaccacaataaaaaaaaagctgactttgaactgaatcaatctgatagcatttcttctagctcaggctcttctgaaaccgataacgcatcatcataatctaacctcgtaccattatacaagcctctgtcctgtaaatcagtttggtcttcctcataatctgtctctgacgacgacaactctgcatcttcatcttctttctgctctttcttcccgaattttctcgaatccatctttcccgcttttactttagcatcagtatcttcgcatatacaagccgctggattctcatgaaactcaccttttccggctcttacctcctttggttctcccatgaatcctttctgaaatgttctcactcttgaagcaaactcctcccaagtagtattctctttgctcataaacaacttgtatagctttttcgcattcggtctaattgttggtttatgtccaaagtatctcctacataaaaccaagaaatcattcaacacaaagagctaacaaccttaaaaacagaaatgaagcagaaagaagaaagattagctatggttaatttaactaccttcgacctgctaatattctcgccatgtttccgttattgttggtaacgaaaacatcgctttcgtcacacacaaggaaatcgagtgcagccattcgtgaagaataagaagaaaatggttttaactccatttttgtagctatggtgtcttttgaatagaaatgtggaaaaagtgctttcaaaggagccaatgatttttctcctccataaacttcacctgatgcaacatatatatgaacatcacttccatatcccaaagctctaagcattaatccaacttcttctggtgtaagtggacatcttccttgtctcctttgcttttcagggttatttacctgcaatgcaaaattcgttaaatccaacaagaaaataagaagaactttgcacaagtaagatttgtatacatacatgcaaagttttccatctccttctgattgttcctaactctttcttctccttctcaccaccaccatagtaacatccagagaaggcgagcatatcaggttcaaacctaagatgtaaagcaatgaagtgtttgctccttttccgcattcttctgaccaattcgttacccatttcaagaattggatcagtaaacttaagcgcatgatagtttactctacacctcagcttctgcaaatcatctctcaacttgtttgagagtctgtaatcaaatttattcaattgaactgcctgaaacaaagagttacaagaccaaatcatatataagcatcatagagaaagaggaaataatgaaacctttagatgctaagaagcgtaaagattgagagacaaaaacaggaaaacttacatgccttttctgaagaacaggtaacacccgattgatatagcatttctcattgcattttctcggtacacgcattctgcgagggctccatgtttgccctcctttctgtggaagtttctcaatgattttgacatcttttgagagaaatgacataaaccaatcaacatcgaaaatgttcgagaagtcactggcatatataaaaagcacaaaagtatgttaatactaaataagatgcataatgttttgatttttacgagagctagtacgaacctggcatctttccagtaggatttctggtccaacttcggaataacaagcgtagcgtttagaatccttgcagcaacaacagcatctacaatctgaaagaagtaattgcgttgtgaaactcagaccaagatctaagtaacaacaaaaagatcaccataaaaccagagaaacctaaaggaacttacaccagtccgttgttggtttaaaccgccactagtggcaatcgccaagtatcgatcatttctagtaattgctttagcatctgcagtaagaaaaatcaaaatgttgtagtgtgactaataaacctcaatgacagaaacattcaagcattctaaactaaaacactctaaacaccaaaagaactttataaagttacacacttgggaacttgctgcttgcattacaacaaccataaaagaattcagcattccatgaacgccagatatcacgatccgatcttcctccacctctctgcttcggtttaaaacatacacaaacccaaattagcaaacaaatacagactttgcaacaaaaatatcaaatataagaaccctaaccggaactgtgaaaaccactggtgtgttcttcttctcatcattggctccatagttaatatgcttctgcaatcaaacaaaaacaatggcgttaagagacagagatcagaatctcatcaacaaggctattgagagagagaaagagagtgtacggagatgcggcgatcggaatcatcaggaggaggggaaagaatggagagaagagcgaagaggatgagaagagctccagagacagcgcaaatgaaaggaagaagacgacggagacggttgtagtaattgttgcgccgccgttgaaaagccattgaaggctatacacgcggcgcttttaccttcgtctctacgccagacagagagagagagattcgtgttccaatggagacaaaaccaaaagtctttctctttaagagtacacactggtttcaagagattcaaaatgaaagtattgtctgttctgttttttatttgtgattcttctctggttttcacgacatttccatcaccacaataatcattgttgattctctatcttttgcttcaatcaaagattgaatttttatatacttgagatacagaaacagagaaagattgaattttttaatattgtaaaaggaaagtgaatattgttttttggttttgagacagttcttatagatttctgggctctgaaagaaatgaggcaccgcctccagcacttcgttgttctaacagctttattttatttttaattattactccttaattaatcaaattaattgtttttactttggtgataaactatgagctggattttaagagttttgcaagatgaaagttattctatttcttgctctatttcgttttaattgttaaatttcctgttttttttgcttaattttattcttatctagacattattaagagataagtttagcattttgtgaacactaactaaattttgacagtagagcaagttgcaagctatgtgtttattctgaaatgaaatcactttagaaccattactgtctaaatttccataatggtgtaaatattactctttggctttacatttgtatcatccctatttttttcatctttatattagtaaaaagaagaatattttcaaattactttttgtctacttcagtgtttaactttttgctaaagagtgtaagtgaacaatagcgtgaactgagaaagaaagtataactcttttgtctgtcttttatacaagtttctgtttgcttggtgttgtcacaatcgatgaacataaatgttgtgagccggtttgaggaattttggattcgtattcctcctaaccaaaatcagaaaataatcaacggtttgaggtcatctacctatagtttaaacgagtcatggtccggtttagtcattaagcactcgtattgattgagaaaaaaagataattcacacgcaaatttgattagtagatttttaagtttatctttacgctttcacggaactattacaaatgattatctcttgttacttacaagtttcaccatgtgaaccttagttgtttcaagtgtcattcatcaaccatatactgtagattgaaggcttattatagtaagtgcactcatttcgttgcaatgttaacatctacttttcttaaatactatacaacgtaatttgttagactgttaggtacaacaaatttatttagtgattatttataagttctgtaattacaaatttataaatatgaaatacttttcgattcattataaacatcaattaatgttgcattcaaaattgaaaatatcaattaaccattgataatgatcatgtagaaaaatcaaactaaagagcaaattaaattatgattatgaagggttataaaaaacatacagattgaaatttaaccaacctttaaccgacccctaatgaatcgttttatatgttgtaccatgtcatgtcatgtatgtgttgaacaatacacgactttctaacaacaatagtaatacttatttagttttcttaaaataatcgaaatctaataaacaaattgcagtaaataacagcaaaaatatagataattaagagacacaatccaaagattgattcccttaagataataatatatccacttgccatcagattcaactctaatcagaatgctatagatctaatcttccggaattacaatttcatcccggttttatttatttcagaaacatacaaattggttttagtatctcattctggtttagcttagacacaaacatgatcttatagacagtaatttataagacatcttgtagagattggaagtaacaaagaaagcttaccaattcataacttgcttctgcctttctttgataagcttaccaaagccttagccttggtcctcagaacaaacttctggacttttccagtcgatgttttaggaagatcctcaaacacaatactcctcggagccatataatgtggaagccggtccctgcaatagctaataagctcctccgcactggccttagacccgtctttaagtttcacaaatgcacaagcagtctcaccccaatactcatcaggcctcgcaactacagctgcttcaagaacacaagggtgagtgaacagagtagactcgacttcaatcgagctaatgttttctcctccagagattataatgtctttcgatctgtctttcagctctatgtatccgtcagggtgtttaacacctaagtcgccactccaaaaccaacctcctttaaaagcttccttggttgcttcagggttctttaagtaaccattcatcaccgtgtttcctctgaagacaacttcacccatagtcacaccatcagctggcaaagttctcatggttacagggtctttaacttgtatttcctcgagccctaaatgattcacgccttgtcgagctttcattttcgcctgttcttctctaggcaaagagtcccactcaggcttccatgtacagattgtgcctggtccataagtttcagttaacccataggaatgaaacatagaaaaccccaactcttccatcttgaaaatcacatgagctggtggcggtgcagcaccggttataaaagacaccttcccgggaagcggtttctgctcagattcaggcgcattgatgatcatattcaatatcgtcggcgcacctcccatatgagtcaccttatgctgggaaatattatcaaatatagccttggccgtaacattcctcaaacatatattagtcccaccaatagcagtaacaccccacaataagcaccagccattgcagtgaaacatgggattagtccatagataagtaggcgaggagtgcatttcgttgagtaaaaccgcagccagagaattcaaataagcacctctgtgactataaacaacacctttggggcttgaagtggtacctgatgtgtaattaacagatatagcatcacactcatctgttggtcgtataacctcgaagtccgatttccccatcgctacaacatcttcgtattccatcatttcctcagatctcttcttccttgaaacagattgagtaagaggctctgggatcaagaccaaaatcgggaccttgtcacctttatttgagaggatttcacaagctccttcagctatttggagaaactgatgatctgcaaaaatcacttttgtccctgaatgtctaagcaagacagcaacaagtgatgaatcatgacgaatgttgagtgtacagagcaaagctccagccataggaacaccaaaatgcaattcaaccatagctggaacgtttggagccaacactgaaaccttgagaatcagaaaacgcaacaaactaagtttcgatctatgaacagaaaagatctccaaatagcatggaatcaactaattaaactagctaagaagggaaaaagggagaaatcgatgaacgagaagttctgaccacatctccggtagagattccgagctgggagagagcggaggcgattctgacgcagcggtcacgagtctggcgccacgtgtacttgacggagccataaacgatggagactctgtcagcgtagacgacagcagatctatcgaggaagctgatcggagtgagaggaacgtagttggccggagatttgatagttccctccattttcatagattttatcgccggaaaagtagtacagtagtagttttgctcgctcgtgcatcgaggaggtatataatataagttaactactctgtaatctagcctgagtttgttgtcgtattatcatatatcttttctatttgaattttgcaatcagactagtgggcgactactggtagtgacctgtcccgaccacatattatttttgctcaaacatgtcataataataattttatgttttttttttttgcacacattcatttgggatttagttcaatggacctggaagagttggtctatgatccagaagcagtcatcgagcttccagtgtcagacatgtagtgataattgtaattgattctggtcaccaaatcagccagatgagggaagtgtcccacattcttcttcgaagtcaatacctgcaagttccgatagtacatatttactaaactgagacaagaaaagagtgcaccgaagtttggatagagtggtcttactctaaggaggaaagcaatacagtcctcgaattgtttctcgatgcggtctatctccatctcccatctagccttgatagctgaaactgctccaccgctgctcagcgtctgttgtattgagtagaattctagagctaaaccgagaatcatgttgatccgacttgcgatgattgcccactgtgtacagaacccaccagatacttggttttatagctacaaatccgaatacttattatgcatatacaaatggtcaattaccagcttttcttgaaccacaaaacattgcctctgaatcgataacaagtacgtctcgtgtacatctatgacctcatctagagaccctgcttttaccatagcttcgcacagctcacgccaagcagtgtgatatacctgtttgtaaaacccagtgaagccataacatcaacttccaattttgcaacaacacttgcacatacttataactacggaaactaatacggttgtcggtaattataaccaattatccagtattagacattaccctatccattacgtattgatgaaaagcatccacaaaattgaggagcttttgttccagtaaacagtggtgcttgcggatttttgttgcagagcctttaccctataatacataaacaccaaagtcattaagtttatcaaactaaaccacatcattatgactcctcagtacattacgtatatcaaaagactactcaggctatctgagattggattcggatgtcaaatgaagcagtctaaatggaaagaaatggtttgagagatatcaaagaccttccacatcaaccttcgtgccttatcaagcacatattttgctcgcttgaccttcaacaaaaatcccatcacctgttttcatttaaacaattaacacatagaacatcacactgtttccccaaaaaaatagctggatgagaaagggttacctggttatacttcttaatggcctcgctgttcgcaataagctcaagcggccacggcaccttaaaaggaaaatagttaagatcttttacagatagatgttagcactgtaatatgtcactacgctgcaactgggtgtaagactaaatgtttttctctacaccttgtatgtgaatttgagagattcaaggcaatctatcgcataattgttaacgctgctttcacgaggtgaagaaagggattttacgtcgcccttgtcatctttgtctctgtccaaacacccttcactggaaatagataccaccaatgcatcaggactgcttaacaacatggtatcagctgaatttctaattgattcctgtaaattgtacaatttcaaatttagtttgtttgtataaacactatatacggcaacagaaaacagtgatacagaagcaaacagttaacaaacagtgaatctatttactggagactataaagatgagagaagtgtctctaagaaagaagttcattaaatttggttacctgaatgattatgttcaactcaaaatcatcatttgatgactctcccttgcccagcctatcaaatatgacagtcaaaaaatgctgcagaaggtcccctgaaaaatttataggatttgttaagattccagttacaatcctattgccaaaaaggttaaagcacataaaacatacctgaacctaacaaataaatggcacgcaacaccgcaagttcgtgcatcaatttccattcattcattagttttgaaaaaatcactttgctaatgttgtccacctacaacacgcacagctatcagaacgtaacaaaagtatgcataccgtagcaacaagtggcaatgtacagcttacatcaccgtacctgcctcctgatgttgattgtgaagcattcttgcattattacaacaggaagtagagtattccttggctctgtcctaagtatccagctgagaactcttgaaggaagtgtactattcttttggtaaggtaggaattctgacatatggagcttcgacttttttgttgatcacaaagatttcaaactccgctatcataaactattgcacatgggataaaagtgaagaaatggacataaaatgatcagtatctaagtacctggaatgacggcagcaatgtaggaaaaggaaataacgtttctagaattttggtgtcatcttgagaagaaagatattcagatctaccgaattggaatccatatttgtagtttgttccgacaaattttggtgcaacgccagatccctcaaaaacagcactcaacaaactcttatcatttagagagggtagacaatagttctctgataagttcaagacatgccaggcatttttattcctctcaagatccattttagatgctgaaacaacaaggttttcatgacaaaacaacccctgcaacaccttttcggcagcgagaacatttttttcttctttaacacaagtaacacaacatggactctggagttctgatttggcttctatagattttttctcttgcacagcaccaaccaacaacttataccacattcgctctgagtatgtgagaagatcacctgtgccattcactagcttaccacttatatatgatgctaaagtaggagaaatctcccactcatctgtctcatctttccacagatatctagatacatgatcaccatggcctatgaggccagcaagtgatagacagaatatttcagacaaggataagtctgcaatgcttctaaagctattctttccagccaggagtatgccacagccagaattcccaaaaccatttcgcccatggtactgaatcttttcacaattttctgaagacgtagaaggaatatgctgcatcagctgcagtgactttccagcagaaacaatcgacttacatatgtcttttatgaacagtgggcataacacccgattgttctgctctttgtctttgtcagaaactgaattggagtcatttccactcatccctttcttttgatttagcgaagttacatttgattttggacccagcaccctcgtcaacagatagcttttctcccaaaactctgcatcgctaaccgagaccgattggttggctgtaaagaacaactgcgaggaaacaaaagttaatcttcacctcaactaaggaattcatcatcatcaaactttcaatttgctcgccttgtaaagaatgtactttgatgttggcatcaaaaagatagaggaaaatagtttctcgcccatggaacataaataaaaccccaagaacacctacctcttcaaaaggatcatcaagagttccctcaaacaaccatgaatccaaactctctacatatggcaataaacttccagcaaagatttgcaataacatgtgaaatccttccacctggtccaaatattttcaataatccaattagagaagtgagcaacaacaaaggaaaaaaaaaaaaaaaagaacacaaaaaaacggccacaagctcaccaccttgtacaagacatacttcatctagcctcttgtaaaggtaatcaagaacgtgcacagcaatttcagctgttgaaatagccgaactcgactcaaaatacgcatgagggatcgcacctcgtacaacttggaaaaggtattcagcatctgaacacagactagcaaatagaaagaaaaaaactgaagactgctattaaatatagttcttgaaccgagaaacagcattcaatatatgaaaatgatctaggctacacacctagataaagaactagttaatcccaaaagagttggagtaacagcaacattagaatcgttgatcttcacttcctcattcaaagcaatatctctaagtctctgttccaatacccaattgtacatcagtctcaaatattcaagaacaagccaaataaataaataaaaaaactaatagggagttgtggactacttgcctcaagccaaccagaggcagagttcgaaaatgccattaaagtaggaggagatttaagagaggcattaattccactaacaatagactccacaagcttcaaacatgtagcagcatacaaaaatccagcgagaaggacatgaaggcttgactgagacaaatgagaaactcgtatctcacttttagcgcggaaagtttgttcctttcggtcccagaaaatgaagggactagagaaaccttgcaaagcttgtaagagacctttcacctaattaacctccggagaaaaagggtttaagttgctttgccgaaaagaatttgaaaagagtagtgtttgtggcattaccagatgggattcattcacgctcactgaaggaggagctagttctgagtgtgtccaaactctgtgactgcacatcattcccggaattagggtgtctaagccggcgtgatcaatacgaagcaacgactcagacatcactgtgaatttgattttcacataccaaattggttcggagggaaatcggagaagctttgatgtgggtgaatttgagagagagtgagtgagagcaagtgaagaaaggtctcaaatgggcccaaattataaaggcccgtcgcagtgacaaagattatcacattacgaacgatctaaaacataaaaccttctttggttggttggttaaggtatttatgaaatgtaagatatctcaactcaacattcaaaatcaacaatgtctataatatgaacttttgagtcttaaaagatgcgactctctgaagtcaaagtaagtgaagtttctaaacgacatgatcagagttcaactgttaagagaaatctatgaagcaatggaacaaatgaagagtataaagagagactcgtgtgttgttgagttgcttggtgtgtcttaagttgtaagcaggagatagacgaggccttttagatattccactatttcagatcctccgagtttcgaagttccaaagactctgtcaacaaaagtgatcggtacctgcagatgaagatgagcaccagagaatcaagaatatgaatggaaatatagtttagaaagaatcaaaatcacagtgaattggtataaaaagagagacctcttcaatatggtatccttttctggttgcacgaacaatcatttccatctgaaagacataccctttactcacacatgagctaatcacgtcttcaagcgccgatttcttgtatagccttccaaacaaagaggtgcggaggtcagacatgatactatcaaatgatgtcagttaaaaatatgcgcatatgttatttgaattataccggaatgatcctgttaaatcagatacaccaggccataaaagtgtttgagctagcacatttgctcctctactagtgagtttccgcataagattccacccgtgtacaccaccaccttttacatatcgtgtaccagttactatacttgcatttgtctctagttgtttcctttatgataataagaaaaaaaacaaatcagttgaagtcactataggttgtgaaactagtaagagatcaagagactcttctttttcttacttgatgaaacttggtaagtattttggctgcacagaagaaaagtgactgggttagctaaacaattaaacaggtaaacaagaaaactaaattaatggctcttacatgatgtgaaagatcagcatccatgatcacgacgaaatcacccgtagcatgcttcaaaccatgaatatatgcagttcctgagattgaccatgccaagaaaattaatttcatttcttgttaaccaaaactagaagacaatgaagatacaaattacatacccaaaccaagcttcttggctctagctcttaaaagctgcatcataaaaaagataaaaacatgatttcacctaaacagaagaacgcccaataatttacaaattaaggtcttaacacatcattgtactcacgatacggtcttcaccatacaattgctgcagttgcttgacaatttcctgtgtgccatcaggactcccatcatccacaacaattatctcaaaatcaacgtccctaaatcatacaaacaagtagcgaagcaaattctcagtaacagttaacaaagagtctacttaacaagtgcaattctatattaatttcatataagcagccataaccagaatcgatctaagattagcacatgtagcttctgactattctccgatcactaaatcaaagtttttaaaacaccatgaaactactactatatagtttgagggatcactacattggcctttactagctcatgcacagaaacaacaaatcacgaattaggatctgcaatctacagaaacatgatcggaaaatttccgagatccgtaacttgaaattggcgatcaggttcgagtattcagtaaaagaataacaaaaaacgtaattccgattctgaaatgaaagaatgaacgtgaaaagaccaaaagaaataaatattcatttaccggagatgcttgaaaatcaggtagactatgatagcgatgttgaggcgctcgttgtaggtaggaatgattatgctatacttgtacttcttctctcctttggtctccatctcgtccgccatctcttccggcgagttttggtaacggtggttccttcgtcttaacccgtgaaatcagccgtcgtctgtacaaaaataaggattaaaataatgtcaaatatagggactaaaaagcaagtttctcaaattgggcctaatataaatatgggcctatataaagcccaaaaataaatcaggaaagctttaaaagaggtaaactcgtcaatcgcatctgagtcgctcttctttccttccgccatttttttctttctaggttgcagagttaaaggagaaggttttcaattagggttttgtagagagaaagatgagccgaagtttgggaataccggtgaagcttcttcacgaggcctcaggtcatatcgtgacggtggagctaaagagcggcgagctttacagaggaagtatgattgagtgtgaggataactggaactgtcagctcgaggatattacttataccgccaaggtaatcaactgatactctgaagatctcgattcattttatatgagactgttttttgaaccataggtttcgtttcaatttcattgtttgatgttagtgctgttaaaaccctagatttggtgagctgggcaaatttgctgggaaattttagattgcttcttattttaagttctaagtgagattaagaatccttgaaattcatgctgtataaaaccctagaatgcgtgatcctgccagtgacattagataaattttgactgtagggtatagtctcctctgattggttaaacttattattgatctataggacacatcaataactgagaagaaaggttctacgtttgtgctttgtaacgttttatccaaagcctaagttgctctttaggaatacagtggtcaaatgtgaattatctgaagtatgcaggtcttaaagcgtcctcttatttgcggattattgtgccgtatgggttttgagtcaacctgtaattattgggaaaagaactacatgtagttctcaattcagaaagtcttaactctttaagtgttattcttcatagtatacataaataatctgtcaacttaatgggtttgtttgttaattgtcactgaacttttgttttgggttttccaatgctgtgttacaggatggtaaggtatcacagcttgagcatgtcttcattcgaggcagtaaagtcaggtgctgtacttgtttccttgtttatgtaattcatgggatcattcttgttaaccctagctgtttagtaattgacctgcggatatatcttgacaggtttatggtcataccagacattctcaaacatgctccaatgttcaagcggttagatgctagaatcaaggtatatatgctttttgaaccctggatgcagaatgatattaggatctctatacatatctccaacaaacatcttaccttacttgcttaatcaatgtagggaaagagctcatcactgggtgttggcagaggtagaggtgcaatgcgagggaaagtaagttcaccctctctctcttatgatttagtgctcatgaatgcaatgttaggaagttttatggaacttgttaagatgttcaaatccttgttatcccttaatggtttgtttcttctttgtcactactaatggttagattcttgaatctttgtgatattatcttaaagccggctgccgggcccgggcgtggaactggaggaaggggagcggtaccacctgtgaggagatgattgattttacgctcaacatgtaagctttgattctgggatagtctttctgtgatatccaggtgaaagccgcctttcttggttctgtcattaatgctttagagaacactgtaaaaccaaacaagagagagagatatccagatgcactactagttctgtattttgggttaccaagatgtttgaatcattgacaagttttcgttgtgatctattttcttctttgcgcattctccatttctgacagtagatgagtaaaacaaagtacattgttttcataaaggtcttaataagactaagatcagaaaacaaagttggtcatttataacattaataatataagctagaaaataatattgtacttgtattttcaacatgtaaaaccttgtctactgctattttcccaaattatccaaaaaatttccaaaatgacttgtacaatatttagtctataaaagtttagttccagagtaccagcaaacaccaaaacgacttgtagaagaatatttgatggagtgtagaggttcggttcctgagtaatattaaccaaaatgggtcatagagtttcctgagtattttacaacgattatacatgaaattagtaggatcaattcacaagttgaatataggaaagcatgatatcaaaagattctttttattctctctcaagtgaagaaagatcttaaagaccttaaaaagagaagaaccgaaccaaccattgtacatatcccatttgggcaacttgctctatctctctttctctcacactctttttgttcaaaagaaaaactcgagttatgtcatattagattcttattatagttttttcctcccttaaagcagaaacccagctggttcacttcttgcagcatgaaagaacttagatgtgttgtacttcctgtgagcttccctgttcctgccttgtgatgaaaagcaaccatctttctcgcacatgccctaggaaaaaacacaaaacccattgtcaggattccaaaatctcatgtcatcgggttttcaaaaaaattcgaaacaatcaatgtatgttcttacagtagctgttcttcgttgtagcctgtgtgaaactcacaggttttgctccattcttcaaatcccttaagtgtacactgagcagtgtagattgctgaggccgccagcttagatggaagatactctagcatctcatactccacaaggcaaagctcgatcataaagaatgataaaatctcaagctgacaccacaattgcatataccacaccgatttagatattaggcctgatggtttccggacataatgattcaagcttttttagttagggagatatataccttcttgtcagattgggcagctttgagaaatcgtttcatgaaaacatatggagttggtagagagaaattgaattgcaaggtgttggccattagcttctcctgcaatagaaaccaaaaacaggtaaattcaactatgaagcatcaaccagtggtagttaatgatcaagacaaagttgtgtattcaccatatctagcacttctcttctagagtaagctttgtcagagatcaagatgagatcatctaccactggaactgaaacttcttcatatttacatgcgagcaacaaagcagtaacaccaacaagctgaagctttttcctcacgatttgatgaaccgcaaggaatctgtcgatgacaaaaatcttcttagtttttccctaaagacaagaatgaacaaacataacttgtattgagataacaagaactcaagttacataagaagtcgttcaagtagagcatatacatgtatgatatagaaatttatacgacatggtatcaagaaacagagctttttattataaaaaattcatcatcagctattagagaggtctctagtctatatctctcattgacgtttttgaaaaacagagcagtatttttacagagttaaaataattattttgtcgattaaaaaagttaaatgtgtttttattaattacaactagatgaacacccatgcgtagcatcggtttttgttttttgaattgtcggaaaaatatgattatggttttttttttattttgatgttcaatataattattactataattcatatctatttaatataattattaatttttatgattagtttcatctataactcgaaatatcaattctactataatatgaaaatttatatatctatttttctaatatttaactatcataatcacatacaacaacaatatatgatagattgataaaatgaatgtagttatattacttatgtgttttgaaacttgtctaacttaattataacaaacaattttttattccatatatttttttgtcatctagtaaacaatcacatcatgatatgctagtaatttaagtcaacactttaattattttcttttgcatataacaatataatgtcttatgttttttttggtatgtctaatgtgtcagatgactattacgtgaaaaaaattgtttatcaatattaccaagttatcagaacgcacaaaaatatacagaaagaaggtcatatgataaaatcatattcacaaaacgtaataataaaaaaatatctaactaaaattactaaactaatatgaggtggccaactttcatatatatgatttaaatggaaaatcaaagtataaaaggaaattgatttgctagaaagaaggaaaaaaacaaaccctatagataggttcttcagcaaggtaagatagagagaacgtgagagatcgatcatggcgaattcaacaggtaaaccgacaagttcaacacaagaagatgaagaagttacatacatattagcacaattgatgcaagatgttatggatcgtgaagaggatatagatgatgaagacgatatagatgatgaggttgcgtcccttccattattactagtaagccaagctaatcaaaagcagtctaggaagagggaagaaaaaactgaaaaaaatcaacctaagagggttaagaatcagaacatcatgaaaataaatatccatgacttttcagaagaaactctgaggttaattgaggattggtacaacgctgaactcgatccacaggatatattcggcgatgatgaggtgacgaggcgattcagccgaccgataaagaagcagttgatgtcgagcgacgtcgatacagatcaaagcaggctcatgttatcgaaggagcaagtgaaggagaagatgcttccttttctagaagaatcagaggatccggtaaagggggttgatgtttcggtgtatggaccagacggggaagttcaacagatgaagttcaagatgtggaatggggataaaacacctgtcttaacttcagggtggatgcagtttgtggcagattatggtcttttgaagacttctgattttgtcactgtttggatgtttaggcacataaagactcgaaagctttgctttgctattcactacgttacattttctttaagaaattaactaatcgagtgggatgatcttgaagactactgctttcttgaatccaaattagggtgagatcttcaagaattaatacagtggtcaaatgtgaatagtctcaagtatgcaggtcttaaagcttcgtcttctttgcgaataatgtgctgtatgggttttgaatgaacctgtaattattgggaaagaactacctgtagttttttagttcagaaagtctttaactcttttaatgtgttattgttcataagtattcataaataatctgtcaacttaatgggtttgtttattaataattgtcacttaacttttgttttcggtttttcattgctatgttacaggatggtaaggtatcacagcttgagcatgtcttcattcgaggcagcaaagtcaggtgctgcaacacttcttagagaacactgtaaaaccaaacaaaggagaacaagagagatatgtccagatgcactactagttctgtattttgggttaccaagatgtttgaatcattgacaagttttcgttgtgatctattttcttctttgcgcattctccatttctgacagtagatgagtaaaacaaagtacattgttttcataaaggtcttaataagactaagatcagaaaacaaagataaattgaaggaacaagattatgaaatactagaagtaatgattatatcctccttcaataaagactgcaatactgtagactttgagttgtctaaataacgtagtctatatggtcatttataacattaatatataagctataaaagaatattgtacttgtattttcatcatgtaaaaaccttgtcaactgcaattttcccaaattacaatccaaaaaattgccatgtacttgtagaatatttgatagggtctagagattcagttccagagtaccaaaacgacatgtagaagaatatttgattcagtctagaggttcagctcccgagtaatattaaccaaactggatcatagattttcctgagtctatacaagaatcgattcacaagttgaatataggaaagcatgatatcagaagattctttttattctctctcaagtgaagaaagatctaaagaccttagaaagagaagaatacactctttttgggctacttgccatgatatctaaagatccattcttctcccattttgggcaacttgctctactatctctctttctctcacactctttttgttctaaagaaaaactcgagttaagtcatattagattcttattaatattaaatcagaaacccagctggttcagttcttgcagcatgacagaacttagatgtgttgtactttctgtgaactcctgtgagcttccctgttcctgccttgtgatggaaagcaaccatctttctcgcacatgccctagaaaaaacacaaaaacccactgtcaggataccaaaatctcatgtcatggggttttcaaaaaaatcaatgtatgttcttacagtagctgtttttcgttgtagcctgtgtgaaactcacaggttttgctccattcttcaaatcccttaagtgtacactgagcagtgtagattgctgaggccgccagcttagatggaagatactctagcatctcatactccacaaggcaaagctcgatcataaagaatgataaaatctcaagctgaaaccacaattgcatataccacaccgatttagatattaggcctgatggtttccggatataatgattcaagcttttttagttagggagatatataccttcttgtcagattgggcagctttgagaaatcgtttcatgaaaacatatggagttggtagagagaaattgaattgcaaggtgttggccattagcttctcctgcaatagaaaccaaaaacaggtaaattcaactatgaagcatcaaccagtggtagttaatgatcaagacaaagttgtgtattcaccatatctagcacttctcttctagagtaagctttgtcagagatcaagatgagatcatctaccactggaactgaaacttcttcatatttacatgcaagcaacaaagcagtaacaccaacaagctgaagctttttcctcacgatttgatgaaccgcaaggaatctgtcgatgacattgattgtgagataaagagtttcctccatcagttcaaacttgtagtgcacctggacaagataattttccagtcaatttatcttcaggcacattgagacaaaaaaagtggcattaaatagcttttgtctagatctgtctacctcaattaaccagtcaatgaggattcctctcattctctcattaagatcttgttgattgtccatatagttaggaggcacgcaactaagtttctgcagaatcataagaatgaatcaaacataagtacaagattttgaaactacaatcctttcgatgataaagaacacaaaagcaaaagttgatgtgaaacaagacaaattcacctcaaaattcttgtagaaggtatgcatatcatggatatattcaaccgcagccaaaggattattcttatcacaggcatcaatatcgatcacaggctcttcttctttgtctgcatcttccatttcaatctccttctccttttgaaagacacaaacaatatgagtaactatattaacacttccataaacaaagcaaagaatggttaggaaatatgtataccatctgttcaatctcctccagcattgcttcagtatgttgtacaaacattggctcattagagtcacctccttctttatcactttcatccacatcaatgataatcgtctctggttcttcacttgaaactgagtctggtttcttagtttcctaagagttaaagatcagaactttaaaatccggtctatatcatcattgctctaaatgaaacatacattgaacaatagggtacctcatcacggatatgtggcttatgatctgctaactgagcagcaaacttcctgaaccaacagagagtagtaaaagttaagtaatcagacaatgtgagatactcaaagtagacaagagtaaagatctatgcttacctagtaactggtcgatgcacaggtggtttattacaaatgccatctcttctgcaaagtcacagaaagaaatagggttcctataagagtctaatcaaagggagaagaaaaaaaaaacactaatcttgaatctgaggattaaagtgaacttactcagaaactgatctcttgttgacagcataagggtaagacggcgcttcagtgatgttcttgttaatagtacttagtgctcttcttgtcggtcctgttgttgccgtcgtcttgatctttcctactactcctccccctacatcaagtaaattcaaaatcaatttgggggaaaaatcaaagagaacgaaagttttgatttttaataacaaaatcgatcgatttagggtaccttggagactcattgatccgattaatccaaggctattttcatctgatctaaccattttcttcttcttcgttatctgcggaagttatttattttcattaaatctcttctcttgaagaaatcaaatttcaaaatcgaaacatcccccaacttaaaagcaggggttttcaaaattgaaactaaaaaaacagtcttgacaatcaaaaccctatagatccggtttaataatctcaatgaaagacccaatcaagaacaacaaagacctaaatctcaaatacccagaagataacgaaaacccacgaattggtttttcaaaaaaatcaccttttcacagtcaattcaaagaaccaacgcgagattaagtcgacccttgatcataaattcttatgaaacccagtgaatctcctaaaccctaatagtcttttatcccgttggatccaagttgatcaaacaaaggagagaaagagagatcttttagtaaaacccaaagattcaaccacgctctctttctctctaatggcttcggttttgaagatacttcccactctctctctatctctctttataagggtaaagaaaaaaagaaaaaaaaaagagtaagattgattttgaagattagaagagcgtctatagtgtattagttttctttaaaattaacggctagttcatctcagccgttggatcaacgccacgtgttccagatcgaaagttgtcttctattcaacggttataattgtatatcatctatgtatagatttattcaaattctttgatttttttttcttttattctattttggggaagacaactatttttattttatttttgaaaattacaccatgaaataatattcatttctataaaaacaaataaaacacttctatttaaaagaatcaaatatgtctcctttgaccaaagaccaagattcgtttatattaatctcaagttaaatgattttctttttcaagcaagaaatctcacacaaagtttagattttcttcaagtgtatcattagaatattatactacaagggcaaagaaaaaaagaaaaaataaagaataatagagattttgaagactagaagagcggatatattgtctgtataatatctttaaaattaacagctagttgcctagttcatatcagctgttggattaatgccacgtgttccaaatcgaaagttgccttatgttcaacggctatcattgtttttcatccatgtgtatgtgtacttattcaaattctttgggttttttttgttttcaataacaaatatctcggtaatatttattaggttaacatgataacaaaatatttatatcaataaatttataattatgtcatgctaagtcattttgaatcgcaataagttataacttatgtgatatatttatatttaccgtcttaactcatttattatatcatataaaaaaattaacgagttactataacgtgcaaaatatgaatttcatccaataagattattattgtcactacctctagataaagtattagttaactcggtaatttgattgttaaccaatttgaactgaatctgaacaaaaactatcattgtcgtaatcttcacaggtacagtggtatggcaataagaatagttatataatatagaggtattattgtatttgccacaaaaatagtgtaagataaacagtagaaaaaaatggacttaattttcgattcttccgagtaagaatgataatacccttcccttttttattttgggaaagacaactatttttattttattttcgaaaattacactatataatatacatttctataataacaaataaaatactattatttaaaaaatcaaatacatcacctttgaccaaaaaccaagactcgtttaagaaatcaaatacatttatattaatctcaagttaaatgattttctttttcgagtaagaaatctcacacaaagtttagaccttcttcaagtgtatcattagaatatcgtactatatttttatgggaaaaagatatatagagttgtttacatgataatggcattgatatactgcatttactatcaatcacttttaaatcaatcaagtcatttgtgtagaagtgtgaacattgcgtttctatgtagaaacacaacaatagcattttgtttccattgatatagatacattaaataaatatgatatgccattaggttaagtttgagatcattctataagttcttgtttcagatttttgttattggcatttaaattgacatgtatatcttttaggttgcataagttctcagtctcttgtaattaatatccgtttaatgaatacaactgtttttttttccattacaggttggcccaaaacttacccaccagactagagcccattagtatcttagataatagatatattaggcttggtgggcctgtggcacaaaaatgtattggacttgtaaaaattgataaactatgtataaggtcaatagttttaaatttctaataagggtaccattctaataataaccaaacaatgtttaaaaggatttgcattattagatgattagtaatttatttgatattttgaaaatctataagaaaagaaacaacacaaaaccttaaacccacagtataatgtacattaaaatctaatgaaaatgagtaatcctacaagtgaaattttattttcttgaaaatataactacgaaatttgttaatttaaatcataattagtatcatgagattcacaatttggtaaattatatactaacatcattatgaataaccaaaaaggattgaatgaacttaaagctagttaggtccccatctgagaagaaaacgaggtaccaaaagattcgactgccagaaagctttgtccttctctttgatttttcaactccattgacaaaattcgaaatccaaaaagaaagaaagaaaggataaggtgtaatcccgtttttgtcgtgttgaaccaccaaaacgaattttcattggttgggttaacaccaaaaagttactaagcaagggtaagatttctacgtggcagcctgtaagtggttctcagttgccctcgtttatgatatgataatttagtagtatagcccgtgaagtaatttgcctaaacattatcgtcaacgttcattatctatatttactttttacttttgaaatgtaaaaataaaaatttacgttgttttaattgactcacaattttaccacgataaaatcttagagcgttacgtgttatattatgtactgtatataaaaactatgtatatatgtatgatatagtattggtaaccctctatttatttagtttggacacctcaagaaaatattgggtgtgaagtagttgatatcctatgtcagtattaattaagcagtagtttctcgcatggagctatgctgttttttttttttagcagctaatactagtcctataagaaatagcagctaatactagtcgtataagaaataccgtatacgtaactgagtaaataaattacggatcatatggtatatgcacgcacgcatatagtaacaaaatgaaacatacacattcaacaaaaaaaaaaaacgaaaaaacactacaccaatctatttattatgcataagactgacaactaaacaattttactatcatatttttctatcttaaactggttgtttttataatctccgggtggttctatagttaaggtacttaatcaaaatcccaatacgttatgttcacagttaaatatagaattttggtcgttaaataccaagtatattcgaattctacggctgaaaaaactcttaagttcttcgctacaaaacaattgacaatcccgcatgcagtcatatgcaccatgacgaaacttgcgagttgcgagaatattatcacacaactctacaaatttaattatatgcatagtacaatttagctaagctacgtactactttcccaaagcttctggcattttttgacttttgtcgtcactaaacgaagagacttgaccgtggtaagacgatttcaacaactttatctgataaggggactatgatattttgtgtcaaaaaaaaacgggggctatgatattttttacatagctacaatttctttttctttttttggggtgaatctagatatcaggcttgggttcattattacttcaggtttaggattaatattggatagcatatatatcctctaatttgtaattaactcaacatttgataacacgaagatatattctgtgatttgaaattatctatcatcaaaaatggagccaataactttgaaacaacacgttttaccagtgatagtaacaccacatttggttatgtcatatgtgctccacgtgatgtggtccatgtggatacaaaataacacacacacaaaaaactgcatttgagttattttagtcattgcacttaatatatatgcggcatactggagaggattaaaagtcctaataactctaaatgtctaaattataaacaagtaaatttataactacgagagtatctccctactccacttttatctcttatagcttattggattgttgttttcgtaacagagctactacaatgtttatggaggggggcaactgcgcaatatgtcctttaaagaaatatataaaagaatgcgaaatgaattctgttaaacggagatagatgaagattgtcttctaatgattgccactttctgagaatagtatgttactgttgattgttgtacctagctctagttgtaaataataatatcaaactaagtaacaagagcaacttgttgacactaaagggaccccaagttaccctcaatcaaaaattgtggatcagttcatcatcgaagtaacgtgttaattatcgtcatatgctccacaacatcgactccccaccatacccactcaataatgtcaattcagctctctctttttgtatttttataaagaatgtatttaaattttcaacccataatttatagattcatgatcatctattaataattcattaaatacttttctgcatattgatttatttaaaagccgtacgcaagctcaaatcggataagactaaaataatatcacccagttaagttaactaacttattttattttgaatagtagtattaattacttttgttcaactactccaatactgtttatatcctttcgacggtattagttattttcatgtttcacgcatttttgtaattgcaaatacagacacctttgttgtaacacatgttgattaattttccgaaactatatacttttgaagacaaaaatttaaaacaaagaaacctcagatctacagttccacctcgtgtctgacacgagtttctatgcgataagatcgaacatgtatatcagcagactttactatagatgaactcatattagtaataagatccaaatacggaaataaacaacttggaaagtgaatggaagttttaagagaaaaatcatttctagaattattttttagatcatttctttttttggagcatccattagagttttgtttttagactttatgatttatttttcttttgttatcagcacaataattgattttcaaaagatattgtatcttttttttatctcttgagaagcacagcacaacaacgagcaatgctgacttgtcggggtcagcgattattattagtcaccgaacgaatttttcttgggttggagccaaaacctagcaaaaaaatatctaagtgggggcactacattattgttttaacaccaaggaaaagtaaacaacaatggcccatttttactgtatcgagaaattgatctcgaaaggacaaatgtacccttccacttcgggaatccattattgtgcataacacacgctgtttcactatatatactttcacataggatctcaacactctcactaaaccaaaatcctcaaaagcctatttgggggatcatcaaccttctatcatcaccatggatccttacaaggtatcttcgatcatattcttcttactttttctttgtttttgtgtggtgtatgtgtatcttaattagaattaggttcaactatatatgctcgttttctaaactattttttaattggattgatgttcttaaatcttaagggtcaaaatactttttatgctcaaaaacttacttaaattctgtgatcgcttgaacctaagttgatgatgttgatttctgttttggctggctatctttaattaaaacgtttaaccactgcgtgagaaagacacgccacatgtggtttttgttgtttttttccttagattagaagttattttgttgttgtttttttttttattattattacacacatgtgttctaaaaatcggacgttcaaatgatataatcgattgtttagacgtccgaccgtatattattttagtgatatcagccaaatcagattaagtaatcatcaacaaaatgattgatcagatctactaaacacctgagtaatcaaatctacacgtttgattaatcaaattaaataaccgatcagttagatctatacatatgataaatctttttttacaacattcggttaatcaaaccattgtcggtcgatctatcaatacaagtgtatttttttttcacatacaaaaaaattatctcaccgacgaaaaaaaaataaaaaattattatgtagatccatcgaacaaaaggcttgaatatacggaagtcacttaaaagtgtaataatcgaataaatattagtggataaaatgaaatttatctacaaccctactctccgacatgttactgtttgcgtcatcaaatctaaagcctttttggcaaataatggtcggaagactactcgtgtcgggatggaccacccggatccgatcaggaaacgggttttgatatgtttcgggttacgacaaaaaattagggctttttatcaaatcaatcagttggtagtaaaattttgtggattgttcttgtcgattccgtttgattgttgaccaaatttcttcctggattttgttgataatcgatcgtataatggtgattgcagtatcgtccttcaagcgcgtacaacgccccattctacaccacaaacggtggtgctccagtctccaacaacatctcttccctcaccatcggagaaagaggtatcgtaaccctgaatttcaagagtctatcaataagaatcggaacttgttggatttatgaaagagataaaactgagatatagagtctaagctgagatcttgttcgtgaagcgtgatgtgattatttttaacatgtgttacttcgtaatgggcaggtccggttcttcttgaggattatcatttgatcgagaaggttgctaatttcaccagagagaggatccctgagagagtggttcatgctagaggaatcagtgctaagggtttctttgaagtcacccatgacatttcaaacctcacttgtgctgattttctcagagcccctggtgttcaaactccggttattgtccgtttctccaccgttgtccacgaacgtgccagtcctgaaaccatgagggatattcgtggttttgctgtcaagttttacaccagagaggtataagaaaagattcaaagtttccatttttaatcgtcttttagcttctttagaatcaggactgatttttgtcttgttactgttatgatcagggaaactttgatcttgttgggaacaacactccggtgttcttcatccgtgatgggattcagttcccggatgttgtccacgcgttgaaacctaacccgaaaacaaacatccaagagtactggaggattctggactacatgtcccacttgcctgagagtttgctcacatggtgctggatgtttgatgatgttggtattccacaagattacaggcacatggagggtttcggtgtccacacctacactcttattgccaaatctggaaaagttctctttgtgaagttccactggaaaccaacttgtgggatcaagaatctgactgatgaagaggccaaggttgttggaggagccaatcacagccacgccactaaggatctccacgatgccattgcatctggcaactaccccgagtggaaacttttcatccagaccatggatcctgcagatgaggataagtttgactttgacccacttgatgtgaccaagatctggcctgaggatattttgcctctgcaaccggttggtcgcttggttctgaacaggaccattgacaatttcttcaatgaaactgagcagcttgcgttcaacccgggtcttgtggttcctggaatctactactcagacgacaagctgctccagtgtaggatctttgcttatggtgacactcagagacatcgccttggaccgaattatttgcagcttccagtcaatgctcccaaatgtgctcaccacaacaatcaccatgaaggttttatgaacttcatgcacagagatgaggaggtacgtcttagtacaccacttgagctaccattgttagtctttttacttggaatcaaaattctcatttggtttgtactttttacagatcaattactacccctcaaagtttgatcctgtccgctgcgctgagaaagttcccacccctacaaactcctacactggaattcgaacaaaggtccgattcctgccatgccttctctaaatcttcaaatcctaaactcaagtttattagaatattggtgctaagaaaaccttttaattgctaatgttgcagtgcgtcatcaagaaagagaacaacttcaaacaggctggagacaggtacagatcatgggcaccagacaggcaagacaggtttgttaagagatgggtggagattctatcggagccacgtctcacccacgagatccgcggcatctggatctcttactggtctcaggtcagaacaaaaaaacactcggtcaaatttctacgtcctttttaccaagtttcagcaaactaaaacattatttatctctctgtatctctcaggctgatcgatccttgggacagaaacttgcaagccgtctgaacgtgaggccaagcatctagaggccaatctccatataagctcagtctatgtgaggtacaatcaatctcatcgatctatcatcgcttggtcgttaaatccgtcaaaaagataatcacatgtgttgttgtttcttgtctatataataataatgcttgtaatcccaaaaactcatgtttccttcctttctactctcactgtctttgtaatctctttttacaataaatcaatgtttcttgaagcagtaaacaatttctaagatttatggtggtcgttatacatattattaattcaggaaaaaaaagagaagataccgtaattgaacatgtattattttaaggagaatcctgaaatggatcaacaattgtctaattatggtatagtatctggcgaaatcaaagacgatatcatccacacgtaattagtttgactattaatacgaggattatcatttggataaggattaacaaagacaaaacacatacgtgttttggtgttgagctaaaataagatattttggctctcgctataaaaaaaaaatcgacaacagtgcagacacacgccgatttgcgagatacacacagtctcacctaaaaatcgcaaaagaagaaaaattcggatcaaaattgtcttcaagcatcatggatccatacagggtacatcgattgattctctttttttgtaatctgtgattttaccttacttgatttcgtatcgatttggtgtgatttcgtgttgaatccaaagtgtatgaatgatctctctctctcggttaaaatgatgcaaaattggggtgattgttcgacttgttgaggtttttttgtgtgaatcgatttctttattatatagtggagattgggtttcgatttgcatgcgttgaagattccactggaaaattcaacatgtttttccgtctattgattgtttatttgtcaacatgctcatgctcatgctcatgttctaatacacaagtcttaaggctgacgtgatctgtcaatatcgttgtacatgttttaaggtttctttacgatttttttaaagttattttaatcactgtgttcaattgtgaatatcattgttgcttgtatcgtatttttttaattgatcatatatacttatgtggaattgttatgtatcaagtatcaatgtatcattatttgtcatagacgtttctccaatctatggaaatttggttaatttttttgtgatccagttcttctgaatttatttgttggtgtgcaggttcgtccttcaagcgctcatgattcccctttcttcactacaaactcgggtgctcctgtctggaacaacaactcttctttgactgtcggaactcgaggtccgtttctctttcttatctcttgaatacaaattataacaaatatgttgaaccagtggttgttagaaatgcccttaaagctagagtagtggaagccaaataattttataaacgtttggataataatgtcattagtgtttttgttgtggacttgcgtaaatcacatttcttccttcagttttatgccaaatctgatataattcctcaatgttgattctgtctcagttgcttggatttttagatatgttaagcgatggttttatatattgtcaggtccaatccttctggaggactatcatctgcttgagaaactcgctaactttgacagggagcggattcctgagagggttgttcatgccaggggagccagtgctaagggtttctttgaagtcactcatgacattacccaacttacttctgctgattttcttcgaggacctggtgttcagactcctgttatcgttcgtttctcaactgtcatccatgagcgtggcagtcccgagactctcagagatccccgtggttttgctgttaagttttacaccagagaggttagctttttgtcttatccttccattgtctctctattttctataaccgatatcgatgtgtttgctgatattcaaacgtttatttgcttatctatttcgtttcaccacctatatgattacttgcaaatcatatcatactatactgatgattcctcttaccctctgtttgcaaactcaggggaactttgatcttgttgggaacaacttccctgtattcttcgtccgtgatggaatgaaattccctgacatggtccatgcattgaaaccgaatcccaagtctcacattcaggagaactggaggatactggacttcttctcccaccacccagagagtttgcacatgttttcatttctctttgatgatctcggtatcccacaggactacaggcacatggaaggcgctggggtcaacacttacatgctaatcaacaaagctggaaaagctcactatgtgaaattccactggaagccgacttgtgggatcaaatgcctgtcggatgaggaagctatcagagttggaggagccaatcacagccatgccaccaaagatctctatgactcgatcgcagccgggaactatccgcagtggaatctcttcgttcaggtgatggatcctgcccatgaagacaaatttgacttcgatccgcttgatgtcacaaagatctggcctgaagatatcttgcctttacaacctgttggtcgcttggtcttgaacaaaaacatcgacaacttctttaatgagaacgaacagattgcattctgtcctgctcttgtggttccaggcatccactattcagatgataagctactccagacccggatcttctcctacgctgatagtcagagacaccgtcttggaccaaactatctgcaactacctgttaatgcccctaaatgtgctcaccacaacaatcaccatgatggttttatgaacttcatgcacagggatgaggaggtaatcttatctctcggctctagaaactcccagatacttaaattcgcaatcacatttatatgaagtgaatttgttgctttccaattccaggtcaattacttcccttcaaggttggatccagttcgccatgccgaaaaataccctacaactcctattgtctgctctggaaatcgtgagaaggtcagagtcctctacatacattaatttttgatcacaagttttatcctcataagtcatagttaaaactcaaatgtcatctttatatcacagtgcttcatcgggaaggagaacaacttcaagcaaccaggggagagataccggtcctgggattcagacaggtaaacactaaaaactcaaaaaccacattgcaaaatcaacaattacacatgaaccacaaatgtcataattcattctaatggtcttttgttttgtaccaataggcaagaacgattcgtgaagcgttttgttgaagcgctttcggagcctcgtgtcacgcacgaaatccgcagcatttggatctcttactggtctcaggcagacaaatctctgggacagaaactagcaactcgtcttaacgtgaggccaaacttctgaatgatatcatctctaaagactaagtgaaatcctataaactcaatatgctcctcttacggtttggtttctaagtaatctcgtttattgacaatgaaacgcttaaagaagggtactagttcctgtttgtaatcttcttttcaaaatattaacgattattttctaaggcaaataaataaaaagctatgactaatatagcttagtaaacaagtatcactatcatccatttggttctactttaaaaatggatttttatttgtattttaatcttctgcatctatgacgtgagcttatagttggaattttattggggtctaatgtcagacgcacgatcttgataaaaaagttttatgtctgtccatattttgataaattggcatagtcatcactcatcacgtcagaccttttaattggtcaatcgttatgatgctacatcgcattcataatttataatttacatgtaagtgggggtggagtatttgattattccgctgctagtggaaatgcaaaaagaataatgagagcagaccaattttaattatgcttatactttgttgcgcttaacttttaatcagctaatacagtctgattaatctgatgtctctcagccagtagtttcttttcttaaagagaacctcagcgcaaatcagaaattagacacatggagccacatcaaacttaatcaccaataatatccttttctcatgtatttttcagtctcatatttttttttacaacttgttaagtggtagtgtgcgaagattttagatcgaagttacgcatcttaagagattatttatccaatgaaatggtatagtgaactgtgtttgctaatggtccaggattttatacatttaaaattcataactttgcagtttaacgaaaaacaataacaaatttaacgtgttttggttgtcgttaacaagatctcggatccatttaggaaaagtcaatatcttgatgacgaaatcaagaagactttactttgattgcatgtgacggaacttaagcactatactaaacgataaaatgtaattatgtaaatatctaagttttgaggtgtataatgcaagagtataatttcgtggacctacgtctaggtctaccaacaaatgtactcaacataaataatatcgtctccgtaccccaaaaataaggtatataggttttatacctaaccaagacgtgcaaaaattatcacaattatttgacgtggaagttaatgattcggccaaccttatactaattttgttttgcaattaaggactcattttttgtgtattatattaagggatctctattatcaatgtccaactattaatcattttttatacgtttcaaagccctatgaaaagagattctatttgcccggatcataatttaaaattgtgtaatcagaatcttcttttgtatttgcaaagtttaaaaattcattggttactcaaaaaagtttgttttccttgcagttctattggtttctttctgattattggagtgtttttagttatattttatttgtttgtgaaactgattattggctgtttaggcaataaactatatacaattaaagtagtgcaagattccaatttacccgttgggacttaaatctcaaacaaaagtaatgaaagaattcatgtggatgtgaccatgatttgtgttcggcggatgtgatcaattatttaagctcaagtatcatggtatctagtttatataagtggataagatatatgaacacaattatttgtaatccacagttaattttgtatatattgtttgtttttctattatcctatgaagttcaacaaacaaatcacactccactatacatgacgggatcagtaattagttcaacgcctttataccatatgttaaatattgatgtgatttatacacatttcaacatggggttgctaaacttgaacataagatcttatgttttaaatttcagatgtctaagcgtttatctaagccatccaaaatcaccctaacttcgattttattcaaataagccactaaatttagttagagtcaaaaatctaaaatctaaattctaaccggacacttcgtacatacaaacctgatcgaagattagaagttatataaagaggtctcttccacagagaaacaaaaaaaacgaaagatagttaattttgtgatcgtctttttgtccagagttcttcacaatgaaggaaaatattacgtatgggaggagtgttgcattttgtttcatcaaaatatataaaactcccaacagcccatatgagtgacctaacgaaaactttttaatgctgactaatatatatcatcatcttcaattcattctcaaataaatatctttttattttatttagaaagcactatataattcagtcaattagagaaccaagttgaccatatttaaaactaaaagatgatatttagatcttaactacgtgtcatatatgatgaattctgaatatttttctaatttgaatattagacgaaaaagttggtcattagctttatccttggtaaaatgttaaattttgttaagtaatttttcactgattaaataaatatttcaaataaaataaataactctttacaaaaaaaactctagcatttcggtagtccactaattatacaattatataaaaatccatgtttaagttttgacctatataaaaataaaaataaaaatccatgtttaagtttggacctatataaataaaaagtaaaaatccattttgaagatcaaaatccaacttcttttatagtaggaccggaataaaacaatgtacagtgtgacacacttactactggcaaaaaaaagggataaatgaatgtgattgaaaatgtgaagtcatgagtaaatattatgtggagtgtacctaattagagaatacgttagacaaaacctaagtggaggaaacgcagtcatgcaccacttgtttcgtctttttagctttgcgcttcctgtgaacgtagattgaaacacttgcgagtataaacatattccttgttacgtataattaaatttgtatgaataaacttaatttacgttctgttctctgttatgttacgtttcgtttcgtttccgttacgtacaaaaaaaaatattttcatatgagatactagactagaacactagagtacttattcatgttatatatatcccatccgccaaaagctattttgtcctacaactaacgtgatccaaactaataatcatgaaaccctaccgaatacgaattatgtaaatttttataaaatcatcctctcactcactcgtaaatgtggatttcacatttgttcgtccaatctaactcccctcctgaaaactatcataccccttttttaaagcatcattcagtttgtcttttctcccttctcagtttgttgtaccatattataaccagaccatgaataatctcttatataacttgacttgatcacaaccaaatcttttcttaaatttgatttttttttacaagtccttttctctttttttgagcatttgaatgtttttggaatgactccaataattaaaccgcttcttttttttttgttaaaaatgtaaatattttataaaataaaataaaaacagattagatttacagtcaaaagttattgacctatacaaatgattatagcaaaaaaaaacatggaaacataataaagcataattgaaccgctttccacaacctttcttagaaaaacattttccacatcgattaaaccgttccacaaatccacaaaattcattcatttcttactatgtggttactaattagaaacgtatatgttgattgttgaaaacatattttgatgaattgttctagctcaaacaatgaaaacatccttcatttttgtgagaactcggttcgaactatcataaaacttttaaaacgaaagtatattaataatcaatggttttgcctaaccaaataaatatttcttttattcgttagcggtggaatctattcacgagcagaagatggtattggttacacaataccctccactaaatagaaacttttgtttcactgaactactttatattgtcaatttgagtagattaatatattttttctgatcaaattgagggaagaacctactcccccactcgtttatttttatttactctataacttctccaaataagcctataggctataaagagtataatagtggcctttaaagattctttaatttttcataattataaaaagattataacaacatgtaacaaaattgacaattgtaggacatgaataattattaacttatcctcaaacagcaacaaagcgtctaaaaatcgaaaacgattcgctttggtcatcaccagcataataaaatgttgaagaatcagtctccaaattcaataagcttttgaacaaattggcgaaatcagatatttggtatattttaaagatacgtacagccattatatttgattttttcaaaaactaaattaggatcttattctaccactgattgtattaaacaacaaagtatttaatctttagtcagcttagaaaaaaatcttaatattaaagaaaaaaaatgcttttactatttctttttttatcttaatatttcagtcatatagtttaaaattctggttaacaattgtcaaatgagatattccaaattctttttatttacatatagtttaaaattcttgtgaattttctatttatgtaaaaaagtcaaaatgtgattattggtgaaattctatttgctataacaaaacaaaaaaaaaaaggttttgacttttttacataaatagaaattcactgcagggagacatgttgttggtcatttgtttattccctctgtgtctgtattctctctctctggaaagtggaggaatcttctatctctcctccagtcaaaaaaacccaagcagcctggaagagagagagagagtaatgtgatactatatgaaaacaaaattcatagtaaggtctcgccatgtcccgatgcataaatgagataacgatccacaaaattttcattttaaaaatttcatctttttttgttttcatcttccgtgaagaagtagtaccacataacccccatcagacatctttaaagctttcttcttttccttgtttcttttggttttgagatttgggtttcttttcatatctgttccttctatctcagacaacaaattgcaacagaggaaatttaaaaacccacttgaggaaggaatctttgagaatctctctctgacttgtgagtttttccatctagtttctcttttaagggtttgatttttcattgtaaacgaagctgattagttcaaagttcgtttttttttgtgtttcattgagccatattgtttgaccagcttgaaggattcaaacaaaaagtttttgtttttgtgtgtctactttggattgtttcattttgtcttcatgaattagatttagacaagatttgtgcttgattcgtgttaagttttgatttgggcccttcaatttcctactttatcggttggtgaattctatacacattagtcctatcacgaccttctgtttgtttgtttttgaaaatgggtgcttcgcatttgcagatgttgcttcattgattttggagatatatccatggaagatagtttccttcaatctgagaacgtggttatggacgctgacttcatggatggattgttactagatggttgttggttagagactacagatggatctgagtttcttaacatagctccttcaacttcttctgttagcccttttgatccaacttccttcatgtggtctccaactcaagatacatcagctctttgcacatcaggagttgtatctcagatgtatggtcaggattgtgtagaaagatctagtcttgatgagtttcaatggaacaaacgatggtggattggaccaggaggtggtggttcttcggttactgagaggttggttcaagcagttgaacacattaaagattacacaacagcgagaggctcacttattcagttatgggttccggttaatagaggcggtaagcgagttttgaccacaaaggaacaaccttttagccatgatccgttgtgtcaaagacttgcaaactatagagagatctctgtgaattatcacttctctgctgagcaagatgattccaaggctttagctggtttgcctgggagggttttcttggggaagcttcctgaatggactcctgatgttaggtttttcaagagcgaggagtatccgagagtacaccatgctcaggactgcgatgtccgtggaacgctggcgattccggtgtttgaacaaggtagtaagatttgcttgggtgttattgaggttgtaatgaccactgagatggttaaactaagacctgagcttgaaagcatttgcagagcacttcaggtttgtgttcttctctaaagctttcagcttttgctatagaaatggttttctgagagtgatgaatgtgtttcctttttgcaggcagttgatcttaggagcaccgagcttccgattccaccttctctaaaggtaatcaaagaaactacatgagttccttatgttcagcttttgggtataaacaagattgtttcttctttattcagggatgtgacttatcctacaaagctgccttacctgaaatccgaaacctcttgagatgtgcttgtgagactcataaactacctttagctcagacatgggtttcttgtcaacagcaaaacaaaagcgggtgccgtcacaacgatgagaactacatccattgcgtatcaaccattgatgatgcttgctacgttggtgatccaacagttcgtgagttccatgaagcttgctctgagcatcacctcttgaaaggccaaggagttgcaggtcaagccttcttgaccaatggaccttgcttttcatctgatgtatctaactacaagaaatcagagtaccctctctctcaccatgctaatatgtacggtttacatggcgcggttgcaattcgcctgcggtgcatccacacgggctctgctgatttcgtcttagagttctttttgcctaaagactgcgatgatctggaggaacagaggaaaatgttgaatgctctttcaactattatggctcatgtgcctagaagcttaaggactgttacagacaaagaactagaagaagagagtgaagtgatagagagggaagagatagtaacgccaaagatagaaaacgcatctgaactccacggaaattccccatggaatgcctctcttgaagaaatccagcggagtaataatactagtaatcctcagaatcttggactggtatttgatggaggagacaaaccaaatgatggttttggcttaaaaagaggttttgactacaccatggattctaatgtcaatgagagcagcactttctctagtggtggtttcagtatgatggccgagaaaaagcgtacaaaagcagataaaaccatcactttggatgttcttcgacagtatttcgctgggagcttgaaagatgcagccaagaatatcggtggtaagcagcatttttttatcttctcgattcaatttatcggaaagtcctgagactgatctcttctttttgcccttttcttgtcttggaaattttcagtttgtccaacgaccttgaagagaatatgcagacagcatggtatacaaagatggccttcaagaaagataaaaaaagtgggacattctctgcagaagatccaacgagtgattgattcggttcaaggtgtttctggtcctcttcccataggctcattctatgcaaatttccccaatttagtctcacagtcacaagaaccatcacaacaagccaagaccacgcctcctcctccgccgccagtgcagcttgcaaagtcccctgtatcctcgtatagtcacagttcaaactctagccaatgttgctccagtgaaacccaactaaacagcggtgcaacaaccgatcctccttcaactgatgtaggaggtgcattgaagaagacgagcagcgaaatcgagcttcaaagctcgagtcttgacgagacaattttgactctctccagtttagaaaacatccctcaaggcaccaacttgttatcatctcaagatgatgactttctgaggattaaagttagctacggagaagagaagatcagattacggatgcggaattcgcgcaggttaagagatctattgtgggagattgggaagcggtttagcatagaggatatgagcaggtatgatctaaagtacttagacgaagacaatgaatgggttttgttgacttgcgacgaagatgtagaagagtgtgtagatgtctgcagaactacaccgagtcataccattaagcttttgcttcaggcttcttctcatcatttccctgaacgttcttcagctactgaatacagtttatggcactgaccttaaatcagagaaagaagaaagaaaaagaagcgttttaggacatgacacaaaagatagtaatacctttgtgttctgttataattgttcataattttatctttggtttttttgaaagattactaggagaggtgctttgggttttgtttttaaaaacgcaccagagacaagaagagaagaacatgtaaagatcctatcttcctgagaaattgaagttgttgtttttttcttctgaaattcctttcgaatgtggttttcaaatgtagatacacatataaaagaactttaattgtttccataattgccatatacatcaagtaaaagagactaataacgaaacatttaccaaacatatattgttttctgagaaagaaacaaaaaaaaccatttttacacaacaccaaactgaaattcttaaaagctgtttttgagtttttacaagtctcgtcgcggcgttcttgaaatctctggtgacggtgatgagacgtttcgagcttcatgagatctgctctgtgcggctaagtactctagtgccacaactatgtcacctatgaacggtcgataatgagcttcttcattaagacacattgcaataatcgcaatcgcatagtttaaacaccgtcttgggtattttcctcgtagagacggatccactaaatgtccaaacttcttctgatccttgaggtatggacgtgactgcaaagataagaaaagttttggttataactggagtaggattttaggtattacgctgtaatcgatttagtaagtttcttacccaagtaacaagattctgctcgccttgcttttgacctaaatcaatagcttttctcccagtaatcagctcaagcaacactacaccgaagcagtagatatccgatttaacagttaatttcccgctcattgcgtattcaggagcacagtaaccgtaagttcccatgacacgagtcgatacatgagttcgatcaccaactggaccgagtttcgccaatccgaaatccgagagttttggactgaactctttatctaacaatatgtttgcggatttcaaatcacggtaaatcactggcgggttagctgtgcagtgaagatactctattcctcgagctgcaccaaccgcgattttcattcgagtattccagcttaatggttcttgattagactcaagatctgaaaaatcatacaaaagagtacaacatttgaaactgaacattcttaagatagttacaacaaaacacttgaaagaacaatggagtaaaagtaaactaaccaaaaaggtgatcttctaagcttcccattggcatgtattcatagacaagaagtctttgatcaccagaagtacagtaaccgatcaatgtaacgagattgggatgatgcaataagctaagcataagaacttctactataaactctcggttcccttgaagcccatctggattcaattgcttaatagccactacctgttttcatcaaatcatatcaaattacatcaaaagctcattaaaaacagagtttctctttaaaagggcttgaggaagagagagagatctgacttgtcctgaatctaaacgtcccttataaactctgccaaaacctccttctccgagcaaattaacttcccggaagtttcttgtagctgcagctaactccttgaacgtgaagctccgagctccaccaccaggtatcggactattcactttaccatttactgttccaaattccgacagaaattattctcaaaaaatgtgttaaaaagacaccataaaagggacataatcaagaaacactcacgactcacctaagatacccgaaatcgactctgttcctgttgtatcacttccatgaactgaaaccacaaagaaaaatactataaacaaaaacgaaaacttttgaggtaaaaacaatgaaagttattgaattgtggacatgaaagtacctgatgaatcggtttggtaacgagagttgcatcgagcgttatcaatgtcgactcttatgtccttggttcgaggattcaaacaagagaaacaacaagtcatcttcttttttctttaagacttacaacaatggggatttaaagaaggaatttttagaaaatggagctggttcaagaaaccaagctccgaaaaatcccaacaccagacacaaaacctgacaaaattactaaagaaacaaaacttcaaaacctaggatttagggtctgaaactaaaaaagagattgatttcctctgtttcttctctttggataatcccagaaaacaaaagaacaaacttttttggcagagtaaagcgaaattattgaatcggccggcgatagattgcaggaagacagagagagagaaaatatatttttaaaacaaaaaaaaactgaagagttactaaaattatacaaattacatctaatcacgacaaaaaatgacaaggatcttataacaacaacaaaaaaactgaggtttaaacagtatatagaaaaaaataaaaatcacggtagagacactactttgattttaacaactgaatttttgttcttctcatttattttattttagttggagctactgaaaaatatttaagtggtagaagacgacgagtttcgttttgttcttttccaactcggtcccatttttttcaataaagaaaattaaattcttactcattctctatcttctattcaaaaatcgatatttaaaaaaatttcccacaaaattaaactcttcttcttcttctctggcatttaaaccggtttggtccccttctcttctctgataaccacgcttggtttaaattactatagtaccctctaacagtacagtgtttgtaagagaacacccatgaggccgacagtggattttgaagtcgagattttgacaaatggacggtccagattagattatcttgaccttacgtattacagtgggtcacacatactgtcctctgccttccccgcatttgactttatttaccgttttagtaaattctgtatctatcatcataagaataataatggctactttataaatcaatcaattattagctgatatgtttggaatttttcacctatctttttctatcatatctttgcttcttttccttctttttatcatcgagctgttttttttttggttttttttctcgtatttatgacattattgttgatcttgttaccattcacacatctacaatttaaagcatgttgatggaattaaaattttgaaccaaaagagagaattattatgagcgcccttttacttttgaaactcttttttttatgtgtcctccatatttttgcattgtgttaataacattattgtgaatttactgctactaatggcatatgtgtttccattaaatcttccttttagtttccatagctatttattaaaaaaaatatatatatatatatatataacacaactactattttaattttaacatgcaaccatgcattcaaaactgttattattttttttagtttttgtttgaaaaaaatatcgttttatatgtccacttttttaaaaaaacgatatgatgcattttgtctttcttgtgggattagaaatatatgtgatggtttcgtttggaatctagagtctacctttacattttcgcatgattttaatccatctacaatctcgctcttaaactaactttcttagctctattgtagtttttttttttacatacggatgatgactaacatagaactcatcaaagcctaaattctcaaagtttgctcatggaaataaaaataaaaaatttaagcttaaaacaaccatggctgacaagtgtatgaaccatgctaagagaagagagatactatcagtaaaaaacaaaaggcaacagcaatccaataagatacatggactaggtacgttacaacttacgagttggcttaggcttaacaatgttttctgcatagtctagaaaggcgtaagatttatgagacttgaaggcttccactccttggatttcaactctcgtgatagcgttcctctcggggttgtagtagagaaggtagaaagagttggagatattgcatggcgacaacacaatatcccccgtgtcactcgttccaacaaatcgtaacttggtctcctcaattatattcttccaaggaggaggcaaaacgtagatataactcgaccattgatgtttctcggcatcttctaaaacccatagttgaattcctgtatatcgtattgagccaggaccaatatttgcctggagtttagctattttacccttgtggtttacaagagttggttgaagattaactcctgagttacgtttcatgccattagctttctttatataactaaacttctcaaatttaatgtcaaagcaaactatatcaggaaacccgtctaagtcatcatgaactcggcctaggtaatacaaaacaccattgatgcatatcccatcatatagaggccgaggataaccactagcttcataatccacaacatcaggataatgtgccatgtcacatttgatcttcctccatgagagttcttttccagttccgaatgtgagaacttgatgctcgccaaagactccaaactttgatttggtcatacacaatactttgaactctttgttgatcggatcatacccaaaatagcttgtgattatagttctattcgttttcactcttggtaagggccaggattcgcctgtgctagggttacatatcagtggcttagaaattgttcttcccttcaaattctcgtatgactattgaatccatatatgaagccacaaacaggacggcaaatgccgcagagatgattaatagagaagctcatatgaaaattgaccgctaaaggagaagaatcacgaggctttggtgatgagaagaagaatgtttcaccgtctttggggcaggtgaacaatagcttcgggcgtgacgaagatatggtgaagaacgattcggtgaaatctgaattgttaagtgtggaagcacatagcttcgataagcaacgaaatctcgctatagacttcaccggcaatctcgtgagtatctcgataacgagatcgaacgggatcgtttctgaatttttctcctctcttttccttgaattcgaacaagatcgatcgtgtattgcgccgtgttttcatcattaactgaaaaatttcagagatcaatttgtttgtgttattgatcacgatcgaatgtgtacaacataaatacagagcctttacaacagaacccgtaaactcaggaaaatctatacatttgagaagatctaactctatctttcgatgcacaatatcagcatctgttaaagcatattcgttgttgagtaacccaagagaagaccaaacataaccggtcttaaccatcctctaatattaaccctagataaaccctagctagtctactcgacgatttaaaaaaaaacctagggcttttcagatatacaaagatggcataaaacgtaactcaggagttaatcttcaaacgacgtcgttttcagaagctggctattgaaaacgacgtcgttggtgattttatctataaataagaacatttacgtcattttgcatgcttcttttgtagctgtgatattcaagaaaagaagtaaaaactagtataaacagagcaaatcattataaaccgaaaaaagttatttacatacttataaaatcgaacctgacgaatgtacaatcggaatccaagaacgggataaatgttaatattcttacatgattattagtggtgaagagaataaaccaagggtttgagaggaaaataaatatcacgagacgtcgagacccaccaaacagagacgttcatgtaaatcccgtgatgcatgccgtgagcccctctctagacaaaattcaaattaagaccattgaagaacgatcgaacactttgatatataataaatctactacgatttaatgagatataatactttaaagattttagattttcagatttctaatgtaataatgtagaatttgatggtcaatcataagctcaaaaatattgatttgaacaaatccataccgtttatctaaatttcaagtgattccactaatcgattataccagcatatcgtaactaaataattaacaatttgtaacattttaactatcttagcaaaaaaaaatcaagagttcccatgagcgaggaacttgaaaatcgaagccgtcaaaagtcttgcaagaaataaactgacaagtcttacaaaaggtgaaatgccaaggacacaaacctaacattactttgttttatggccaagattaggacatacgaaaatatatctgaaaatttctagaaaaatgagaaaaaaatataaactatatattctacagcctgcgtgactcctgtggtttttcttttccctcttgttttctctttttacccctaaaaaaattatggaagttgcaacaatctgtacaaatagagagagacttgtcccatatattttcatgtcacaacaaataagccttgactttccacaagatttcattccagaaaatccttggctgagatagccaatggaaaatgcctcttcttcctctttcaaatatccaatactcatcttcacagctgtaatgccagatccggatgctgcgacgaggacgaaccagtctgctgattagagcccggggagtttggtgagactagcctagcgttaaggtctggcggaaaccggtggaattcttgtttggggtaaggaaacaatgagccttgttgttgcgagaccggtgtggcctcgttgcttacgtttggttgttgctgtctagcaattccgagcatctgatttgcattatggttgaatccgcggatgaggccgttgctgctctctgttttgattagcagtcctgcttggtgagaggaggaggatgggtgatcgatttctggattcaagacacgagcaggtggtggtgtggtctcttcgatggcttgagaggaagcatgtctgtttcctatgaaagcacttgaaactgaagcggttggagacaggattctgttagaatgatcatcagacgctaagtcattagaacacttttgttttcccgacgacattaatatgttttgtttctgagaatcatcctcttcaggtcctgctgggttctctccaacccaaccttgaccaaatttgattccagagggcaatacagtctcgattctcctcgatgcaattttccaggcaacaggaccaagatttgcagcatatcgtgctagactcttcgcgtaaccgtactccatgttcagcccaacctgataaataaggaaaacagaggtcagactcttgtttctctatacaaaggataatagagtttgcaacaacgtactggaatcaactgttttaactcgtcttcaagcgttgtcaaaaccgatggttcttgggtagaagtcgagaggtggttgtaggtatcgcgtctgttatcatcgacattgaaatgtttcatcccatacttgttaaccgccttcacaaccgaagctacagaaaaaataagaagatggttcatattggcaacaaaagaaagaatgtctgaaagaatgtaagaggaaaggcagagattattttacatggaaattcgctctcccagtctaccgaccaaccactctgggtttcactgttatgattgattctaactgatgattctgcttggcggaatttgtatgaaggaggagcctttcttaaattgtaagcaccagaaaacttgttagagctatctccaggaatgagagcatcagctgaaatttcagaagcagtgcggtcaatagaagatggttcaggatgtttctttggcggacggcctcttcttgcaacttttggttgctgctgttgctgttgttggctttgtggttcttcatcatcactgtcttgccttaaattctcaaaatccttttttgccaactcttgtatagcccgtgcctataagccaaattacacactattttcagaatcctggaatgaaaatatcaaaagagagaagaatagtcaagtttaaggacatacctgtcgataatatacagtgtctgctgaattgtattccattgcatttgtacatattaaaaacacatctctctgcaaaaagaacaggaggcgagaagctaatatatcagagagggaaaaaagttgttcaaacacaaatcttctcacaaataacatatattcaagcggggagacaattttgagtctaaactgatcaaaggttaattttgagttaaacagaagtgttgaaatagccttaaatctgcaccctacactacatgtatcttcactggttagcacttagcagttataaagccttacaaatcttataactgaaagaaaacgcacacaaacaacatcataaagcaatggttctccgtaacaaagtattgaattgaagatgccaagtaacaaaactttctgtagctagcaatcaaatgaggaaccaactcgaacgcatcaaaaaggaggagtagaaagacatacctcaaattgttctaaagtggaatatgctccagagtctaatttgttccgcaatgtgctaaaatccattggattcttaataatctcaaaataatcaggaagctgtaaaaaagacacagataagacaaacagaatctcgtaacattaacaagatgaaaacatcaacaaaaagagacaatcacctcctcaggatcaaccgggtcagagtaaactccataagtatccttccttcaagtgttttaaacaacgatcagaaaaaccaacatacacagtagtgaaatcacatgaacctagagatacaggaaacgagagaataacagagaacatacttttgaagtctatcgaggatgaagagtaacaactttttgtctggcaaaggagtagtgggaccagactccacgggagaccctgtccacatgtaatccaaaaattccttttaatttagaaaattcctcaacgcttttatcctcgtaccaattttatcagtttactgcctctttataaagaattaataataaaaatatatatatcaaccttgaagaatgtctgtcgctttcgaagccttttctccctgcaatagtattaaccaacagatcatcatcatcaactccaaagtatatccattaataatgtaaagctttcatagattcacagagaaaacaaagtacacatgtgttcatgttttatcttcatgtttaagcagtaaagcaaagataaaattggaacttgttttcagtatcttatatttcagaggtaagttaacaattttaattagcagacaaaatcaatattatattaaagcgataaacacacacaaaagaattttcttaagctgaagacaaaaaaagggaaaatttaatttacacagagagaaaaagcagaattatgaattctcattcccaccaattaaaaacgagtaatgactcagtcaaactcaatcctcccactcactcaaatcagagaagaagaagataacagacgcgcgaaattatttgaaacctaatttctgataatcaaaattcaatttgggattggatcggaaaaagggattgaatttgctaccgtatgataatcagatccggaggcggcggcggagaggttgcgtctattaaaggacggttctggagtttggtcgagattcagatcggattgagaattaggagaatgtcgatgagagtgagagttcaatccatgtaaaagcttatgtttcttctctcgccgctcgtcatcgtcgttgtcttcaccttcgtctttgatccaaggggaatcgccgtcgtttgaattagggttccggcgtttggatcggtgattgagagaattagggtttttcgagccggatctattgttgttgttgtggtggtggtcatcgtcgtcttgatggttgttcttgtgttgttgttgttgctgttgtaattgttgttgttgttgtttgatagctcgtttttgaaggtctaatagagatggccttcctttcttcttcttcttcgtcattgtatctgctacctcacccatttttttctctctcctcttctcttctttctctctctaatctctttctctctctctctctcctctcttccccctttctctttctcctcctaaacaggcgttttggttttgtgttttcttacgttttttttcttcagaaaaaaataaaaaataaaaactctacatgtgtgtgattgtgaactcgcacgtgctgagaatttcgtgctttttctgatgattactgaacaagtttgggctaatagttaaatgggccgtaataggcccaactatgagtcacgtctcaaaacgacagcgtttcttaaacatatatgaacgagttctgtttgtaaatttctcactttattccgtaacgtttggtcgtcaggtcagcagtcgtagtcatgcctggagaatcgaatatcatcgagtggccagcaagtagagtcaggtaagcatttatcggtttcttcaatcccacaagaactggccatcaagctccgttgttcctcacaatgatccttcccttcttttctatgtggaatattactatattagtatggagtaagaacccatatggtaccctttttaggttttggtatgaaagtgatcaagttttgtgtatgaatgcaaatcttcaacgtgcgtcacaagaattctcttttgttttggtatgttaagtcataaatgattccacatgtatatacttagtgtctatttgataaaacagggtcacatataacctctaggctggaattaccaaagctaattaagaccaaatactagtttgattttagtcttcattaaacttgtgtgccactagaaaccacttttgtatattctaagaatagtacaaacagagaatagaatcgactacaagatcacaattcacaagtgattcattcaacaaaaaatgaatgggggctgtggcattcatatgtggacctcatcatctccagcgtgttttctttaacgtcttgatttcaattttactccgattagtaaaagtgtttcctaattggttccacatacacatgacttctcctccatgactcaattagcaaaaaggctagagcaaaagtggaaaaatgttgaaatgttgaaactctgtatctgccatcttacttacaatagcacattgagctactagacgtcacttttgtggtttgacatgcatgaatccgtaaaagtaaatagaaatacatagacacggcttctggtggttagtgaatggaggagaaagtatgatgatggtgacagaaaaacagcaaaagttatatccaaatttggataaagaatctctcaagcgcgtggggtaggtgggagaagaagaagaagaagcaaaggaaaaagcagagcagagagactcatctctcggctataaaaacagagcagggggtcacaacacagaatcactacaacagaaatacacagagcaagatattcaaaaacttataaattctttcaaaacaaaaatggggatcgtagcattcgaatgggcagagggaaaaaccaaccaactcacgctgctgatgaaccgagacaattgggaaaacaggcaagtttaacattttcattctacgttccattaggtttgaattttgttcatcagacattgttgttgaatactttttgatgtttactttttctttctatgagtgattgatagggtcataagtggggcatcttggagtcgaaacggtcagattttgagtggtcggtgcaaagctaacaacggaacctggtttggtattactaaaggtggccgagtcgcttttctcgtgaatacatcgttgttgttggaccgtgttaagtcatacagcggctcggagttgtatcccgttcgtttcttggaggtttggtttgttagcatttcttcttttcatttatatataaactctttcgatctctgtgatcacgggattgcttttgattacagggcaacatgagtccagagcagtttgccaacgaagtgaaagtgcatgaaaaggagactaatgaaaggcatgcctatagtcttgtcgttgcagacatgacttcgagttcaatggttcatatcctgaaaccctcggatactaagtctgatgtcgtgatagagactgttccgtttggtgtgcatacactttcttcttacgaaggtctcgattctacagattctgccagggtaatttaatgttcaagtgtcttgtaatagagtagagatgttacaaccattttgcaaatattttcgtctagattcttctttttatttctaaaatcaaactctctgtttttttttttgtttttggtatatattatgcaggatttactcctgagacgcttgtttacccagatggttggtaatttgggaaacgttcaacaacgacagatggaggagattgctgggaggtttatgtatgatgctcaagcaggaagagacgcggtgttttaccatagtagagatgagcatcctaatggaaaagtaagaaagttattatcttctgtttttatgatcctcaccaaatcctataattaatctccttttttttcccatttcgattcagcttggaacgcaacgctttggaacaacaagtacgacagcattggttgtgaaacgcactagagaagtgatgctctttgagaagtacatggagcagaatggtgcatggaacacgaacaacttcgctttcaacatccagtagagttacaaagaaacattgcgcagcatccgaatattattatctctaatttagtaaataatctcgttgatgctgtaaatagatctctctaatttatttacattgttaagattcagggaaacctatttccttggtcacacactacatatatctccagctgtctatgaacattctgcttgatatacataaatcaagaaatagttgattttctaagactttatcctatgccaacttaaagttcatttatatattttccatctattaaattcttgagctatttttccaacttaatatggtgataacaccgagccatagtttgcagagtgaatgcatacagttgggctaacttctagtctctttggaaatcctgattaagcaatttcaagcaattcgtcaagaaccgttgttaccttctcaaaagcgttgacaccacattgtattttctatagtgactctagactctagctagcacttctggaatagtataaaagtgattaagaaatgaacgataacattgaaatcaagaaaaagcaagaacattaattatggatattaatcaacaaaaaaacaagaacgtaggagtttagaaaagacaagaacgtatagaaattaagaaaaagcagacgcacttacatttatcataaccattgaaatcaagaaaagtcaaaactcctagagaaattaagcagactagtccgtgttcttagtttcacatgtccatatatggcgaaagtgatcaagtttttggtattaatatcatgcaaatctttaacttgtgacacacgaaatctctgttctcttgtttgttgggtatgctaagtcttcatgattacacatgtacacataaataatcattataaaagaaatttaaaactgatcacatagctactagtctcggattaccaaagctaaaaccaaataataggtgggtctgagtctttaacttgtgtgccactagaaaccaatattgtatatttttagtatagtacaaatatttctaaagttttccacgtttacatgagtcctccacgtaaaaacaaaagcgtaatcaccaactaagcaaacactagacaatcatcactaagaaaaaaacgagcgtgactaaaaccgatatgaacatataacaaaagaaagttcctagctgtcatctccatcgtgttttctttaacgtcttcatatcaattttactcagattagtaaacgtattttctaaatggttccacatagacatgagtcctccttactcagaaaaaacctatagagcaaagtggaacaatttagagaatgttgaaactctctgtttcttccacattttacttagaatggcaagtttatgctacgtagaagccaatttttttagtttgagatacaagaatctgtaaaagtaaatagaaacatatagacacggcttctggtggttagtgaatggaggagagagtatgaatgatggtgacagaaaacagcaaaagctatatccaaatttggataaagaagctcttaagcgcgttggggtatttgcgttggaagaagttaacaagtaaaggaaaaagcagagcagagtgaatcatctctccgctataaaaacagagacggggtcacaagtcacaactccaatcacagcaatatcagaaacagattccaatagtaacaaatttaaactaatccgactagagaagaatggacgacagagacacagtggcgtttcaatggagcggtgacgcattggtgctcctcgtgaacacacacggcaatgaaaataggcaagtctaatttattcgaccttttgggtttagtttgtgcatcaaaatcgttatattatctaattctctgtgtaattattagcacacgcgaccctatggtttggtcggaagctggtggtttaagctgtacgcaagagtaccggggcaaggtcaaggtatggtttggttataaagaaggccgagttgtttttctttccaatagccatgagcatgatattcaccctgacctgatgcccagtttcttcgaggtatatataattagcgtgtttcgaaattctaatacatatataaatgttagaaaagtttctttctctgttaaattatttttggatgtcaagggatttgcttcggttatgcagtgcgcaaagactccacgtcgatttgtagaggactttacccaagaggaagttgaagcctttgggcctaacttgcaactacgtacttgtagcagatataaatacaggatcactggtttatgtctcgaaagatgaaagaagactacgtgtaaatgatgttggtcatggtgttcataccatttctgtatacggatttgatgcctgcattctcagggtattatagtttaaaaaaaaaacttgttaggaacaatctattgaaggcaaatattttctgaaaaatcaaaccctctttttggtcttatatgcaggatgatatgctgaaagtaaaatttaatgagatgattgctagacatgcaaaactgccgccaattaagaacattgttgaggatcttatgatgaagtctccattttttatcgacagtgtcgatggtgctgtaagaaaattaaacctgcatgcattgatgttttcgggctcaatcctctcataccattttactttctattattttttcgttctatttagggcaagaaggtgaggtatcgaacagtacgtacattgggaatggacataaaagccaacagaccacaagggcggttctatgagaggcatttgaatgataatggtgaatgggtaggctaggtgcgacaagtgaaccgtgtgatgctgatgactagattatataaatctcctattgttatcaataagttattatctaattgaacctccagttataaatcatatattgtcgaatccttgatcatttatacgattaaattaataaatatatggttggttatgacttaactttccattgtatctcattctattcactccaatgtacgggttatacctttcgacaagtactgaaccgtgatgttggtgactaatacaaacctcctatcattattattatttatcataagttatctagttgacgcttttataaataaagatttgtcgaatcagggaaacctattttcctgaggttaattatactcgtaaacgaatatataaatggttggtttttctaaaccttcttatgaatttcgttttgtatcgtcttcattttattaatttagtccaatggattgcgttaacttttcttactttctcttccactttactttaacaccttgtattcatatatttctcaatcgagtaacttcacgcattcgtcaaaaccagtttaattaagttactttgtcgatcgtcaaaagcacttggaccacatcgcattatatctcaaacatgctaatagcgtatctaatcttagtttacagaatttcaccatagacttattccatccaacaaagaatctgtatacactttattaaaaatttcttttgaaaaaataatctttccattaatgcaacattattgtgaatattaatccactttgatagcatttcacatttaactttaatccaatgttatttcattataaatttttttaaaagtttacatatagatatatttagaaattaaaaaaaaatctatcattctttgttgagattaataactaatttgacaatctaaaaaaaactataaatatatagtatttctatatcttcatgatttcatcaaagataatttattatgtataaatttaaattatctttcaaaatccatcattttttgggtcatctaattgatacatcaaatccatcaaaatttaataaataaaattggtgagattttccttgcattgatcattccatatttatttttttcaagttagaatttgtcctctctatataacaacatcatctgtaaacaagtgaaacaaacaaatatattcgtatcaacgacaagcaaaaacagacgtagggggaagttctcacgttgatataactatgatcctcctggatgatttacctttggatcttctcgacatgattctcttcagatcagaaccccaagctatggcaatgatacgatgtacaaacaaatctttcaaatcgtatttaactgacccaagatttggacctcagtatccttcgtgggtcagacccactttgattaacatttggagctctaacaaatctctcatcttctgccaacctttggtctattcatgtgattatatgtcactaggaaacaaagcagagttcattaacgatcgatgttacattttcggctcatgctccggccttctcctactatacattggtcacttcttcatcgtaaatcccttgacaaagaaatttcgaatcgtggatcactctgggtcgaagcttctgcctcacatagttggtggtgtcgaaaaggctgatccttatgaccccgatggtccccttgttcgtacagagagagcgatgtgcgtcggtttcgtggtagatcaatgttgaatcaccaagatattcaagatcgtctgcatacttgagatggaaacaaagtacagatttgaaatcagcgacggagattcttggaggttatcgaaaacgaccctcacgaccagctccaaaagtggtctcaagaagcggatgaaacctgtttacgtagatggcaatcttcactggttgagaaacgactggagcatcatagcgttcaatcccgagacagagcaagcacgactgattccttgtagcttccatccaacaccggatacgaaggtgcttttcgcagcaaacgatgagaccaatctcctgacattgatatcagggacgaaaaaagcaatctcagtttacacactactcgggtatcacaagtggacactcgcaagccagttcaagaacgtatcaatggaggaatcagatcttgaatgttggaacgtggttgcatatgacggcaagtgtctagtggtgagggagaaaatgatacgttctagtgacattgagcttcatgtgtacgacatggaagctgacagttggggagtttttgagacggccaaatgttggtcccaagacttctacaagtttaagccctcctttttctctattgaggatgacgagcagacaaaggtgcttgtaccttctgatgaccaacgcctttcctatctaactacaattatggaaatgatacaaccaggtaaactatctcattgtttgattattttgagtcaatttattattcttaatcatcctactcccttgctcatctctttctaactgattccttgaaccagtaaaagagactcacaaagatgactagtcaaacaatcttcagaacgacttacccatccggtcattatccttagctttgcggggtagatggattaagcatttcatccaaacattattgatgcattttctaaagatcatgttccaaggcattatgattaacttcatatataataaaatcaatcattactaatgtttaaactacacatcaaattctactacacttaatcacagtaacgtcttacataatcaaatctcattaataaaaatcccaatcaggagcagagagtgtgagaaagagagcatcagcagaccagtagttatcaacaagcgaacttacctgtgaagttcagagatcaagtgtatcccatcatttgctctccctctctctttgcaccataagttatctaatcctaactcagaaaagactgtaatcaattcaagcaataacactacacaaacggcaaaaaaccttaatctaatcgaacaaacatataaagactacaaagcaaagcaagaggatccatggacgataaaaagatcaaaatgttatccttagttatggcggcgatgcaggagctcctcatatataccacagcaatttcacccaaaccgaacattttaaaatcagaagccctagcaaaattaataaatccaaaccgaaccggatggccgacgcagcaaaccgaaccggatccttgaagggattgaatgcgaataattatttccgtaattactgctatgattttaaattaattatttaggaccaaaaataagggcaatgagtcatatcgcttgccgctgaattctcacgctgagaagaagcacaagagaaaacacataaccaaaggcctagaatcaaaacttgagatgacaacggccaatgatgtgaaaccacaaggattgatgacctggcaaaatatatttgaaatcccgcctaaacccctcagtttttacatttcgtgcgaaatttcaatttttttgcaatatcctttattgattgaccgaagatattttacaagcctttctccactaagcccttctctcttcttctcttggcctctcacttgaatctcccacaaagcgatcaatcacaaattccttcttctctctctctcttttcgtccctaaggtaatttttcttcgtttttcttctttgattttgctgtttgaatctcgtttttgtgttacgatctgttttggtgatagtttttggctattcatatcgaattctacgtttcgaaatttgaatatcatgttctggatgattgcgatttatgcttgactggcttagtttctgtagcatctatctcgaattttgtatttgtatcgatctgtttagatgatgaattttcaattatcgcttctatgtatagaattgaatgttctgcatcttgctatatatgtagtatacttgattagtttcgtcgctgaccttgtgatatgtttgcagaatcaattatgaaaggagctaaatcaaagactgaaaccaggagctccaagtaagtctcagctagatctatttgtgaactttggttagatccatgtcgttgttcgtttctgaagagtttttgttactgaatttttgtggtgataggctctctgtgaccaagaagccggctaaaggagcagggcgtggcaaagctgctgctaaggaccccaacaaaccaaagaggccagccagtgctttcttcgttttcatgtaatcctcgcctcaaattctttggttcagtagtttccatggatacaacttttattgccgtacaaaagttttttcatctggttactgccaatcatttttttaaggtgagattgacagagaatcgtttgtctgctaacgttaagtcaaaaagtatctgataatagtccaacgaatcttttagtattctttgtgaattattctcactattgaactgattatagatggttcctttattctgtgtgttaatacttgtgttgactttttgtgatgtgtagggaagatttccgtgagactttcaagaaggaaaaccccaagaacaagtctgtagctactgtgagtgttatttgtgatcatattaaaacttgttattgatgttgttccttaatctttggatttgtgaagttgtactgatggtcaattacttcaatggattacaggttggaaaagctgctggagacaagtggaagtccttgtctgattctgtacgttctctttttctgaacagtttgaccagaatttagttatgatttagaatgccacgtttctttatgtaactatgaatttcctgatgatgtgtggggttttacaacatttcaggagaaagctccttatgttgctaaggctgagaaacgcaaggttgaatatgagaagaacattaaagcttacaacaagaaactggtataacaagtgtcaatcatatgtcaattttaaagagaatgatagttattgagtttgtttgaccaatcatgatacggttgttgttacaggaggaaggtccaaaagaagatgaggaatctgacaagtcagtgtcagaggtcaatgacgaggatgatgctgaggatggtagtgaagaggttagtggtctgagtttttaatgttaacgtcatagcatatataaagagctttgattttaactcttgttactttggtgtgtaattaaattgcaggaggaggacgatgactaagaagctgaatgttggtagcattagtatagatggctgcaaaaatctctctgtttttatctttacttgaaatgttaacggggctgattaaaatgggtctttctttttatctttttatatttccacaatctctcactaaagccctctgaatggagaaagtgaattgtagaatgtttagatggtgaaagagagacttgcagctctgtactctttgctttataaaacgatttagttttcttttctcagtttattatattgttgaattgatgatgatgttagctaaatttctttatactttgtaaaagaaatggtccctctagttttgatgcgttatccacaaaggttgtactctatatttcatgctcacagactgattttcttcgtaataagggtgagataggttgatgtgggttaaccactaaatcgctcttaataaatgtgtttcacaaactgtgatcaagctaaattgactaatattacgcaagttagtaaatataataagggcatgttgacttaatactcttcagaaagagtaataagtaatccatctctaatcttccatgaacgtgttgatgagatcaatttcctcttcattttgcctgaaaaggaattaaacataagattacagaaatcatgtgaattgattatttaatcatatacagatctgtaaagtattaataatattttaggaaggagaagattcgagtatgattcctcgctttcaaatttgacctaaccgatctcttaaataaaatatagtacaaagtaaaaaataagtacaaatttacgaaacacacaagaaaacacataagcgagagagagagatcaaaggataaaaaggcgcgagaatgtgaaaagccagtgaagagaaaccactcggatcgatgacgtggccaaattatatttgaaatcccgcctaaacccctaaagaattttgacaactcgtgggaaattgaaatatctttttaatttcttctcataagatattttaacatcccccacttaaccctctcatctctcggcctctcactcgaatctccttcacaaagcgtacaaatcacaaacacgtagttattctctctttactctctctatttctctctcttcaaaccctacgaagatcttcttcttcttcttcaaggtaattttcctccgattttcctcgattttttccagtttccgtctctaattcctcttgattctctgcgttgcgatctctagatttgatcattttgtctccataattgtttttcctccgcttagaaccgaatattctcttttctgctgtgtttttctatgtttaatttcctatttctacttttgtttctgcagaatcgatcatgaaaggagctaaatctaaggctgaaaccaggagcacaaagtgagttaattcacatagatcgatttttatttttttgtttgctagttagttcctagatctctggatttcagatccgaattcaaaaatcgttgtcgttttcttacttattgttttgtggtgatggatgatataggctctctgtgactaagaagcctgctaagggagccaaaggtgctgctaaagatccaaacaaacctaagaggccttccagtgccttcttcgttttcatgtaatccttcgaatcttcacttttatctctgtttagtacttgtggtttgtttctatggaataactttattctggtaaaaagtttttgagtattgactttgtacgaatctgttcaaaagcgaaaatagtaccattttctgttcagaactgatttgtatatattgatgttattgttcacacctaaatgtactggaacgttgactgcattatttataagctgattcttctatttaagttatttgtgctataacttgcgttgatttatgatttgtagggaagatttccgtgtgacgtacaaggaggagcaccctaagaacaagtctgttgctgctgtgagttgtgatttgatgcttttccataacttatttgatgtgtttttgtttttttggccgtagcttttgtgtttgaagttgttgctgacaatgagtttcaatggattataggttggcaaagctggtggtgaaaagtggaaatccttgtctgactctgtacgttttctaagcttagttagccaaagttgtgtgtattaagtcaattgtttcaagcgttttattaacctgtgggtgttataataatgcaggagaaggctccttatgtggctaaggctgacaagcgcaaggttgagtatgagaagaacatgaaagcctacaacaagaaattggtaattgtttatttgcatatagaaggctatgttatgtttatattaaccacgttattgagttgtctactctctttatactagtcagtagtcacactattcaaggctttcttaatttgtttactatatattgaagtttgagttatgtttattctaaacaatgatgatacaagcaactggtaatttggttaatgggggtgcttgaataatggtggtgtgttgtggtttcaggaggaaggccctaaggaagatgaggaatctgacaagtcagtttcagaggttaacgatgaggatgatgctgaggatggcagtgaagaggtaagttattttacacctctgcaatctaaatatctgtagtatgaatcagtaaagctttgtattaactctgttatacatgtgatgtaggaggaagacgatgattaagaagttgaagttgtggtagcgtaatatagaaggctgcaaggaatctctcggatgtttttatctcctctcttaaaatgttaattcgggtggttaaagtggttttttttttttttctttttctttttcttactgatgtttcgttttagtaaactattacctatctcccactgattctacgggtaatggaaaaagtgaatgtagaatgtttagatggtgaaatgagagatttgtagctctatataatgaatgatttagtttttaattcctctacgttttaatgctctttagactctttgtttctagttgatatgaggatttatacccctgaaaaaaatattagtgtaaaccatgtttttacttaaatcatattggggttgtgagtcctattgcataatcacgctcttaatcaatgtgttccacaaagagtaaaccatgttttcactttttatttagttatttgactttagacacaggttggtaaaattgttttgaggctatacttgaattttccaaattaccaacgccatgatcatttggttctcttttcatcttttgaaaaaaaaaaatggtttgcatcagcttaattaagagtttctctttggattgtattacttcgtttgatttaagaaataagtaaaaaatttgatcatttttgacaaaagtgaagattttagtgaaaatctgcgtattagcagcagaatagtctcacttatgttataaatttttagtcaacatctttatatcaaagaacctttttggtcaaattcgtacattttcttcttaatcaacttagaaaaagaaagaaagcatgctcttctttttccatcaatagtttaatcattagtcataagtcacaacgataatattttatataatgctgtgattaagccttgcttccggctttacctaaccactatatacataaagtaagatacacagtttgtgttcctctacggatgtaacaacaatacctggttttaattaggttgtttttatatattagtgtggtgtcttattatgtcatcaacacataggattaagatcttcttagatacatattttggattagcacatttttctatttcaaatggtagatatcttgacccgtaaaactcgattaaaatgttgaaattctaacaaaaaattgtgaataccgtcgaccaaaatctatcctagtgaaaggccatagttctccaatgttttcaatatgtaaccaatgtaataaacctggtaactgtaaaaattaaattggtccaattgatcattaaacaaagacatctttccaaaaagtgtttgatttaacggtaacaaataaactaaagatccctttattcataaacaaaagaatatatatatcattcactttctcattgtcttgttcatatggtaaaaaaaaaaaaggaaaaggagaaaagcaaagaaatagaggagatggatagagagatccaaaacggtgcgtatagtgggagagtgatgactgaggagcagatggagattctccgtaagcagatcgccgtttacgccgttatttgtgaccaactcgtcctcctccacaactccctctcttcttaccatccactctcatcaggtacacttctctctgtttttgttcctgattaacaacaatcacttttctatgtatttgatttttttacaagagaccatttgatgagcttctttgtatacggtagaagaagtgtgtaagacgaaagtgtttaaacgcagcgttttttgcgatgcaaacgttgtttccattaatacacttgacccattgagactttagtgtaaaaatgtgaaaattgtgtttgcgtttggtatacaactaacgaaatccaaggctttttttttcccagtgttcgatgcataactttgaatcaaatttcataatgttttagacattcgaagacagtttacctaccgcttagatatcgatttatcattgctaaagatatttgttaatatagtttatgatttgcttagatcgaacaattcaatatattattaatgtttattttctctagacgtaagctgatttgagggttatcatgtcgtggccgatttttaagaagcttgagttattagtgctttgtggttttgataatacatattttgtacatggaagaaacttaagggtcacgtcacttatttttttataatgattgagtgtaaaaaaggagtgaggccaatggttggcggatactttgatccgatgggggcatcgtcaagttctcataggatatcgactaggcatcggtggactccgacttcaacacagcttcagatacttgagagcatttacgacgaaggaagtggaacaccgaatcgacggaggattagagagatcgcgacggagctgtctgaacatggacagatcacggagacaaatgtctacaattggtttcaaaaccggcgagctcggtccaaacgaaagcagcctcaaacgacgacagctaatggtcaggctgacgatgtggcggtgacaacggaggaaaggaggagttgtggagattcagggggattagagtcttatgagcatatactcttcccaagtcctgacttaggtaaaaagatcatttgagtttttaaacatttggttaggtttattttttatttttggtttgagtttgcatttttttttgtggtttcagggattgagcatttgttgagtatagggaaatttatggagacttaaaattcgtatagacttcgatgaagaagatctctaatctattctgttttcttttactctgttttcataaaatagaattgtgtgtgtttgtgtgtgacattaacaacaagtcttcaattttattataattttgtgttcctcaacttgatatatatgcccacatctttttcagcatcagaaagaaaagtgatgccatcttaaactcggttgatattttgaccggtaaatctcaattcaaatgacactaaagagtagaagcaattgaccataataaccgatcctagtcatgaccatagcttttttcattgtttttaaatttattgttatcacacaaaaaatcatataaaatcggatattggttacatgaccacacaattagaatatatatcaattatttatccaattgaatcccaaaattacctcaattaactagtaattgaaaaagaaaaaaaatcagacaattgatcctagtttgacatctttccataaattgtttaaagttaacggtaacaaataactaaagatttctcaaaaagaaaaatacataacaccttcacttccacattgtcttcttcatatggtaaaaaggagagaggagaaggcaaagtggtgaaagaggagatggagcaagagagcctaaacggtaggtatggtagtagagtaatgacggatgaacaaatggagactcttcgtaagcaaatcgccatttacgccgttctttgcgaccagctcgtcttcctccacaactctctctcttctgtccctcttctttcatcaggtacgtacactactccataattgtatttggaagaaacttaagggtcacgtaactgaatttgtatggtaatgattatgagaaaatacaataggaatgaatccaatgagaggtgagtattttgatccaatggtggcatcgtcaagcgctcatggaatgtcgactcggcctcgatggactcctacgacaacgcaacttcagattcttgagaacatttacaaggaaggcagtggaacaccaaatccgcggaggattaaagagatcacgatggaactgtctgaacatggacaaatcatggagaaaaatgtataccattggtttcaaaaccgacgagctcggtccaaacgaaagcaacctccgacaacgacaattacctcgagtcaggcggatgatgcggccgtgacaacaactgaggagagagggaggtgtggagatgattctggagggtttgagtcttatgagcatatactgttcccgagtcctgatttaggtaacctcttactatatgatatttatgtgtctatgcatcgtattttggtttaattgagtcagagatgaaaaaatgtggtgaactttttgtggtttcagggattgagcatttgttgaatagggacaagtttatagactgagtgaaacaaagatgatgaactctccaacctctctgtttttatttggttttctcaataaattgatatcatcgtatatgattgtgtgagggagaccttgaacaagtttttttttactgtagaatttgtttttcacaaacttctggtaaaacatgtatagaaaccttgaccttatacgaatatgtgtatatacacgtaactaactattcaagaactactcgagttaacaagggattgccactacatggacataaattaagttctgaacgaagctgggccatgagcaaagttccttggttcacattggtttaggcaacttggtgctggtttggctttcttgacttatccctcgttatgaatcagaccggttcagcttgttgatgcatcctttgtctaggccttcttgctcgttggcaaatttcgtttaggtagtctcaactgcacagaattaagattgtagatcagactaactgtgtaaacagaaaccggaatgcatgttattattgcctttacagacctttgattttgtagtcctccagcctcctgattcttgctgctgatttggggagtatgcaaatctgtctattgactttaacacatcactcttatccacagctgcattagtctcagcaagaggttcctacaatacccattaggttattattatttttgcacagataccacaagctttgtcctgaaagagtcaaaacaaattcgcttctatttcaaaataatttgcagctccatttgttccaaactgaaacctcaaattgcttctaaagacttaagggtatgcaagaataccttgtgctttaacgttgaatccttgcttgcagcttcattggtgacttctagatgatcagcaaagaacaaaatctgcaaagtaaaattagatcttgatattagcgagcgctcaagacaataaaccgaatcacaaatgagagacttgagcactctaaggaatcaccactaagtcagcttactttgctcaaaaactggacatttgatgaatcagtagccatgacttgcactccgagacatgtgtttgggatgctgcagaaagggcaatagatagtattgaaaacacatccatcttgctcgcaccaaataccctgaccttttaagccttcaaattttctgcagagtctctgattaaccattgagcaatctgtcatgataattgaaacacttgttgacatttctgcagctccagttcttgacgtttttttcagaagagacagcaaatactttttcgatgacgaagtcaacaagcaattgacatatgagtgattctcaggtagacctaatggacttctgcagagcgaacaagatagctgcactttctgattcacttctggaaaagaatatatgttgtagttttgggatcttggttcggtaaacccaaactcaattcttcttgttaaactcgtatgatccgagggtctagtactaggcctaggagcatcactgttttcgacttcaaggtcaatgacaggagagctggtaaactttcttcgcttcaaagcttgagaattaacgctcatgttgaaagatgactctgcttctagagtcaaactacgggtgccaccaaatgaatatctctcagaagttgctactacagacgactcggttccaagaggagattttctgaaatttggagtagatatatgctgctttaataattgatcaggagaccccggagatctcagacctactgttgctggactagagctttcattcatcgagcaagaacatggactggctactgaaataccattgatcataccagatgtttcctggacaaaagatgtttctggagcttcatcacagttggtcaccgatgatacctcacagtaactgcacataaaagctgttaggttttatcaaggatctgcataatataaacttccattctgcggtatttcaataagaggtccatataacatgctagttgaagctaacactaacaaacgggctactttaggacaattatcaagcattagatatctattaagaaaacacgtctgatttatttacccaagatcaggttggacaccgcactcaaggtcaataacttctctacagcattcagcttcctctttaacttgaacaaatgtctgcgccgaatgccccatggatctcaaatcttcagctatttttggtttcacatctctgtgatacccaaaggctttgctttcgtacataaaatgatattttggattcgaatttgtgtagtcctccacctacacacaaattcattatcaataagaaaatgaattcctaagagaacaccacaacgcagaataaatagtttgcttttaaaatctacttttggttccacttgactagatttgttctgaatctgattttccttccttctgaattctttgctttgtttttccgaggaaaagttcttctcaacagaatcctcctgggaccctaacatcttactgtcaacttgctcctgcatgcaattttcagagaattttaatgatatgtaataaagttttaaggaagggaatgagattgttttgaaccttgacactgttgaaaaaagatctcaagccttccatagatgcttcaaaattatcatacactttgatagactgccttagccattttgaaatagacgctctgttcctttgttctttgtatcgctcatctggacaccaaaacaagacaacctcagagctatcataactgaattgaacaaaaagttttaatcaagttgagtagtgaaatcttataattacctaagaatatgatggcaccataatcaaacctatgccggatacatcgtcctgtaaataaatataccatgacagaataacctgttacagtattaaaattgactggaagaaccaagtgacagaatgcaagttatcacattgcacctgcagcttgatttagcgcacgataggcctgttggcaataccattcactccctccaagaagacttttagatgacttgtaggtatcattatattttttcttcagtccgacttgaatatcatgtctagcaagaaagtaattaattagaaaactgtcctcccctaagatagatttggaacaaagctgaaagattttagaggaattcttacaagtttggaaatggaatgccaacaattatctgtatgtaaacttcaaggttttaacagtccattcataagacagttggagcagtataaatcctatttatcaaaatatccaagacaatgcagctaaaaaggataccactgccctggcgttgtcatcagcaaagtcaatcccttctgaaacctgtaagagcatagactttaaactcaaacctcaagtcattaaatttttcaaacatgctatattctgtgaaagataaaggtacccatgtcatgcttatagggtccaatgacacccaatatcttgagattggattgctttgtttaatagaaaccaagacaagagcaaaaaaaacaaacctttcctctacacactgcaagaaatgcagctcccttcttggaatcatcttgagtctcagttttaataggccctgctttcttagctcttctatttcttccaattattttattcttcccgcgtatagaatcataatatcccttcagaacagaatcaaattcgtcctgggcgcctcctcttggttctgcaaccatggacacttatttgagatttttgacaagaaaaaagaaaaagcatctcaatagaatttgttgcaacagttactcaccaacaaaaaggtcctttttcaagcagagccgagaccactgctcagtttcacgccaacgcatgcagagtttttccatcaacttatagcttggaaagaatacaagagagccacctggtacaatagtgcagatttcttccaatgatttccccagagcatccttcaaagaaaagtagagcattgcattcacgatacacaaaaataatgcatcacagtacaagatgaacacatttagaagcaaaaagagcttgacccagtgactaaaaatgaccggtacctggaatgaatatgcatcagctgttttataacttgcatttagaggataattactaggaccattggagattgcacccgcccacacctggaacaaagatattgttaaatcatacattcaattctcgaaactgttgctaagtggagagctttagtcagaacctgcatattaggatcaataacatgtggagcctctaaagaagtgccaaactgcatcccaagttcagatgagaaagaattcattggtgacaaagtcctatatttcacaaccaagaaactcaaaacttaattattactcaaagagatggctcaagaaacaataaaaattaagctaaccattaccaatgggttaaggaggggagtaaaatgctatgcacatatagaatgcgaagcacaaaaaccaaatgtgtggtcaaacttaacaaaaaagagatgtgtatgatcattttacactgaagacgttgtggttttaaacaagacttatataacaggccgttattacttgcaaatatcagatggaaaaaggtgtaggtgactttgtacaggatgacataactctttgcagaagcaatcgtaagcaacaggatactacagcttacccagatgttaaaatgacggataatgatatatcagctaagtctttgaaaacaacagcaggattcatgcaccacaagctgaaagtatgcgtccaggtaccagaaggatctcctgcagccaagtagagcaacaatgaacaccttttgtttttacagacgggttaaattttcacacattcggctaaaaaggtttatcaaaaatcagttctacctcttttagtagaacgttgcaaacccagttggtaatctaagatgtgacttccatttcttgaaaagaagtacgttagtgaagagaacaactctgcatgaattattgtgcaataagctctcatcctcgaaatgattttacagggaacaatgcttaaaaaagttagggagacgcaaaagaccttctagtgtcaagacagatatcccgctcaaataaagcatatctgattccatttctgcctcctttgatgttctgatagcctagaacagtaatcacaattgcacattcaagcatcatataaggcctgtgggcctagccagagaacattgaaggaatgactgacctttgtaaagcattccaataagatcgggaagcattcacgagtgatattagattcctcaagctctcttaaagctttgtctccagtccagctgcaatcatatcattgtagaactgaagtgatgcttggttactgttttacaaacatggtttccctacttaacttgacatgttttggggaaaatagtaataccaatggcaggagcattatttctggtaacactagattgtctggtaatcactacatatacaatgcagattatgcttacaggcaagtgcgcaaaaaaatttggtgggttatcacgaggtctatatctaaccacatttcagacaccaatgctacatagagtaacaatgtattcagctgttaagagttatccaaagaagaccagtcctcatggagaataagaaaaccaagaatataaatacagtaaaaaatttggaagtaatgcagatgtttaagataagagtatcaatttacctagagaaataatgctgaaaatcacgttttgctaatgagtccttttttcttccaatccagcttatcagtccctaaacacatagaacacccaataataaaaagttatcagcaaagatacacctgaaattatcttgcagttaaaatgacttacctctactacttcacacaagggttgataaatcattggctgcgccacgctcatctgttctagttcattctgtaattctgcataacacttaaaccacattagtaaaggacacgaggtgaacaagaccatgaatatctgcaaggatagtttgaatggtacatactgaaaagagtgtcttcttccaaattaatgctacctgcttcacgagcaatgtcttccatattgctgtggacagtgaaagatttagtagacggccttatcatcaacatcaaaagcatgctaaaaaaactacattcaaccagcaaatgctaagcgtaaatatatcaaaactaagaagggttctgaaacttactgtgcttcatcaaaaatgataatcgctcctttcagatctacttcaactcctgctcgaatgacaggattaactatataggaataagggcaaaacaccaattgtgcgttctcagccattgaccaggaagcaaaatatgggcagcctacaagaaaatcattagagaataagaaacagaaaaacaaaatcaattaaaagtacagctttacaaaccaactctaacctctaacattttttccaacttttacaagatcttcaatatcatgaacctcattgtgacctctgggctgaagtgatggatgagatgtgattttattgacgttcctgcaaagttaaggaacacagttacatggtttgacgagctaacaacaaaagggtgaaaaacaaagaacttatattatcaggaaaaactcacttgaattcagaacattgtatgtttgccttatcttttaagagtaaccgactagaaaaagaatacaagttagtatagaggataaggcgtagctgaaaagaatagtaagatggtaagaatgtggttgaaacataccattcatcatctacattgtctttcccaagtacatgacgattcgtgcagtaatgttttcttgaagccttgcacaatgaagacggacccgtgagatatgaaatctgatcttgattaaccataaaataagcaagtccacacaagagagcaaagtcaattaaacataccaatacagccatggggactctgtaaccagttttcctatactcacgaatcacttgagtaatctgagaatgagttcgtcttaaatgaaccaaaacaaacaatcaatcagtaagaagaaaaccatcactttttattcacaacatttccaaattgctcatgttaaagcttacgaagcatagtatatggtaggaattttggttctcttcttagttgcagtttcagctttctccacatttgtagatgcaggagtatctattcacagatttaccactattcagagataaacccaaatcataattgcaatatcgttaagagtcaatgacgaacctgagggttgcgtttccggtatgaatccacctccatgattcaatggatcggtggctgcttcaggggcagctttcgaatgagacaaatttccttttagaagccgggatttatagttctgttgccaagcgagaactgagcagagcaatgacagagatttgcccgtgccagtgggagactcgagcaacgcgtggcagtgaccgtctctctgggcacgatcgagcgtagatatgacccggctcatgaacgcaagctgggttccatacggttgataagggaattcaacttgaaggcctccgatttggtagacatttttagggtttttggagtttagggtttgtttcacttcttcctttgaatccgatttgctggttgaggaaaccatcttcgtcgagagtcggtgactgaagaaaaatgagaactacgagaagtggattggagcaattcgcgttgttgataaatgggcgggaaaattcgaccccttttcgagtttctcttcttttggcgcccgccattgttactgtggtaagctgggacattaaaacgacgtacacttctgattatttaagagagaacggcaatacttccgtgttcattgaaatattggaccataattggatgcccattttttattgttcaattgtcttctctccactttcattgtattatgcaatctttttgtcaaaacatattacacataggtaagagttttcaagctattaacacatgatgttgtagtttggaatgcaaaaaaaataataatatgaataattctctcattagtttattttttctttacaaaacacctatataattttctaaatattatataaatataagaaaaagtttaaattttgatccaaaaatgaaaaaatgaaaaagtttaaataaaatttagaaatctaaggccacattttaataagtttgctttataaccgggatgtgtgttattgtctttatatgattatattttcacaaaatgaaaaattgattcaagattgtattatgccacatgacataagatgctagattttgtggaatttcctgtcaagctttgtcctgaaacaattaaaataaagtcagttctatttcaaaatctttcgcatctccatttattccaaactgaaacctcaaattgcttccaaagacttaataagtcgaccatgactacaactgaatttaacatatatcaaatcagtaacacgacataaccaacaaatattggccttagctgtcctccaacgtgttttctttaacgtctacatttcaattttactcggattagtaaaagtactttctaactggttccatatacaaatgactcaaccttactcaatcaacactagctagagccaatagaatcggactaccaaagctaattaagacgaaagagtagttggatttgagttataaacttgtgtgctactagtaaaccacttgttgtattttcttagtatagtaaaaacaattctgaatggttccacatagacaagagtcctctttactccttactcaatcagcaaaaggttttacatgcatgaatccgtaaaagtaaatagatacacatagacacggcttctggtggttagtgaatggaggagagagtatgtatgatggtgacagaaaacagcaaaagctataatatccaaatttggataaagaagctcttaaacgcgttggaatacttatgttggaagaagctgacaagcaaaggaaaaagcagagcacagtgaatcatctctcggctataaaaacagagagggggttacaactcaaaatcacaacaagaacaacacagagcaagagattcaatagcaaaaaacttttacaaaattctctcaagaaaatggggatcgtagcattccaatggggagagggagaaaacatactgacgctgctgcagaacagagagaactggcaatcaaggcaagtttaaaattctttcgacgttttaggttataatttgtgcatcagacattgttgatgaacctgtattttgtatgggtgattaataggtcaataggaaaggcggcttgggaatgggatgaaagccaggtattgagtggtcgttgcgcagagaccgatgggacgtggttaggtatttctattcgaggccgagtcgcttttcttgtggaggcagggcccgttaacagagacagaatcatcggcgccgagtgtcgtactcttgatttcttaaaggttcgattaatgatttctttttgttgattttttggttaaactatctggattctcacgggattgcgttgattacagagcaacttgagtccagaggactttgcagattcattggctttagattccggacgtaacacggggatagcctatcatctaattgtggccgacatagtttcaaactcaatgttttatatctacaaaccgtctttgtctgaagatggcatggtctatacagagcctgttggtcctggtgttcataccctatcttcagctggactcgattccgaagttggacacagggtaatttagtacaagaatcttgtaacagagtatttatttgcaaatcttttcatatggaaatgtatagcttaaaagccccctttttttttttggtctcatgcaggacttacgtctgaaacgctatttttctgagcggattaacagagaactaccagaaccaatctcggggcttgctgaggaggttatgtatgatacagtcgaagctataaacggagacccactgagctctatctttgtcgtcgacactttggtaagaaactcaaaacattataattgagccaccttttttatgatcatcacctagcctgcgttatattattataatctctcttcttcttttttacctttttgattcagattgaaaacgaacactatggaacaagatgtacgacagcattggttgtgagacgcaccatgcaagtgaggttctttgagaggtacagggcgagatttaatgatgactggaacgtgcacgacttccggttcaccatctagttacaaggagcattccgcagcatccgaatattattatctatactaaacaatcttgttgatgctgtaattaattaatagatcataatcttctcggttcagggaaacctattaccttggtcacagtatttatctctggtctatgaaacaaataaataaaaagtagttggttttctggaactttcctatgtcgacatttcacttgatattttccatctattcagttcttgagttattttttcgtagttggaaaccctgattgagcaattttcaagcaaagtcgtcaagaacccttgtcgtattttctttagtacttgctaaaaatttaaaacataatgtggtaatgaacaagaacaatgaaatcatgaacatatatagagagattaagaaacatcaagaacgtaggaacatatagaaaataagaaaaagcaagcacactagacatttataatctataacaagaaatccaagacatgaagagtttgttcatttcaagactcttagcggttgattaaagactactaaattccaaatcgaattacttttcataaattatcagaatttttatcaaacaaatcaccaaagttataaacaattagctatatatatcctttttagttttttggtatgctagctcttactttcacatgtccatgataaaagtgatcaagttttgcgtatgaatattatgattatcttcaacttgtgtcacaagaaatctccttttctcttttaatttgctaagctaagtcttaaatgattttacatgtacacataactgatcattatgtacgagaaaatcaaaacagatcacctagctactagtatcggattaccaaatctaagaccaaataacatgtggagctgaatcttaaacttgtgtgccactagaaaccacttttgtatattaatttttagtatggtacaaatatttcttaagtgttctccttaatcagcaaaaagctagcgcacaagttgaacagtcaagaaaataatgaaactccgtttcttccattttacttactatagaaaattgtgctaatagaagccacttttttgtggtttaacatacatgaatctgtaaaagtaataaatatacacggctcctggtggttacacgatggaggagagagtaagattttttaccctttgacaaaaaaaaaaacactctttaccagaaaagtgtaaaaagctaaaaaaatttaaacttgaaggaaaaaagtcttcaaagtaatcgtgaatttcctaggaggtttaaaataacgtgtcgtgtttcccatattggagagattggaagtgttgttgtcccagtccaattacgaatgtaatcaactttataaatcaatttggttaatttcattaaagataattaaaattataaaattctattttcaaatacatcaaaattgcaaataaattattttattcctattaaaataaattgataatcttcttataacatggtgggagtgtgcttgaatggatacttatttcttttcataatacactttcaattaaagataattagtatcattggatattgaattttgttttccaaacattattgaacattagtaaaatattaaattatatgtgatatcttatcttgaatttggttactttcattgaatacaatttaaacttttaaatcctatcttaaaagtacataaattttttgcaataatttaaattatttctattaaattaaattgatgatttaaatcttcttataatatggtgtgagagagagagtgtgtgtccttgaattgatagttatttcttttcataatacactttcaataaataaataaataaaagtaaaaaaaaaaaacattattgaatattacagtatttgtgatatcatatcttatatttggataatttcattaaatatatattttttaaaaaattagattatatttttaaaaaatctacaatcttttgataatatgggaagagtgtccttgaattgaagtttatttctttatacaataatacactttgttgcctatataacaagaagctggtaagcaaatcacagaatccaatcaacaggcaaaacaggattagggagatctcactaggatctgattatgaatgacttaccctttcatcttcttgacaacattctcttcagattggaccccaaatctctggggataatgcgatgcactaatagatctatcaattcgcatatatccaacgatccgaattttgtaagtggatactcttccgaatattcttctcgggttggctccagtctttttcacgttgggatcagcttgggcgacaatttcatcatctgccaccatttttcttattcatgcgattctacttcagtgaaagaaagatcagtgttggaatttctgtcttgttacattttaggctcatgctccggccttctcttactattcatcgatggcctcttcctcgcaaatcccctcacaaagaggtttcgacctttgaatcactctggctcaaagcttctgtctcccatatttggtcgtaatagtcaaatcacctcacgtgatgacggtatagaagattacaaagctcgtaaggagagaaggatgcgtgttggtttcgtggtaagtcccaccaaaggtttcaagatcgtatgcatactcgagatggaaacggtgtacgggttcgagatcagtgacggagattcatggaggttatcggaaacaaccatcaccactagctcaaaaagcctactcacgacatggatgaaacctgtttacttggacggcactcttcactggctgagaaacgacgggagtatcatagctttcgatcctgagacagagcaggcacgcttcgttccttccgtattccatcgtggaggaccgggtacgaagctgattttcacggaagatagtaagaagaatcgcctgaccttaatatcggggacgaaggaaacaatttcagtttacacactagtcaacaattccaaatgggacctcaccaggcagatcgcaaacgtatatgtgaacgaaatagatcttctatgctggcagttgattgtgtgcgacggcaagtgtcttgtagttgtggagaacactcatagtggctacggcgtggttcatgtgtacgacttggaagctaacagttggaaagtttcagggtcgaatgaatttatgggcatgagtatcggagacttctataagtttacaccctccttggtctttgtcgagggagatgagcaggagattatagcttctactgaaaaacgcataatctctgctctcactgcggtgatgggactcactgatagaacctaagtaaacaatatctatctcatgccttttttttttttttttatgttgggtcaatagagcaaagtgtcccgatttgtaccagcgtttgtttgccatatgcaatctttagaagtctaaaatcagttgtaacaaatgtaccaaaagctgatgagattatatcaaggcatttgtatgataaagattgtgtataatagatatcataagttatacacaatcgagacatatatatcataaagatttgcccaaaaaaataatatatatatcataaagattttaaattaagaaaatataagttattgttgtgtaaaaaaacgcaagagactcctacagtaccaaataggtaatgattatgatgttttaacaaaatgaaatggatcccagattgtactatgccacatcatataagatactagatttgtggaatttcctgtcaagctttgtcctgaaagaattaaaataatttcacttctatttcatcaaaatctttacatttccatttattctacaacctgaaacctcgagttgcttctaggacttaatgttatgcaagagtagataccttgtgcgttaaccttgtttccttgcttgcagcatcattcgtgacttctagatgatcagcaaagaacaaaatttgggacattaaaacgacgtacagttctgattgtttaagaaagaacggcaatacttccgtattcattaagatattggaccataattgggtttattaaagcccatttgtgtggaggccatcagataattgagattgtgtcatgatttttcaatcgtcttttctccactttcattgtattctgcaatctttttttcaaaacataatttcataggtaagagttttcaagctttaacacatgatgttgtagtttaaatgcaacaaaagaatataaaattattaatttatttattttatttaccaaaacacctatatatttttctaaacaatataaaaatataaataaatgaaaaagtttaaataaaatatagaaattctaaggccacattgtctttatatgattatgttttcacaaaatgaaaaatttatccaagactgtactatgccacatcatataagatgctagattttgtggaatttcctcaagccaatagaatcggactaccaaagctaattaagaccaaagagtagttggatttgagttttaaacttgtgtgctactaagtaaaccagttcttgtattttcttagtgtagtaaaaacaattctgaatggttccacttagacaagagtcctccttactcaatcagaaaaaaggctatagagaaaaagtggaacaatttgagaaatgttgaaacaatgtgtcttccatattacttagtatagcaagtttatgctactagaagccactatttttttgtggttttacatgcatgaatccgtaaaagtaaatagatacacatagacacggcttctggtggttagtgaatggaggagggagtatgttgatggtgacagaaaacagcaaaagctatatccaaatttggataaagaagctcttaaacgcgttggaatacttatgttggaagaagctgacaagcaaaggaaaaagcagagcacagtgaatcatctctcggctataaaaacagagagggagtcacaacaagcacaacagagagcaagagattcaaagagtaacaaaactatttatattctttcaaaaacaaaatggggatcgtagcattccaatggggagagggagaaaacacactgacgctgctgcagaacagagagaactggcaattaaggcaagtttaaaattctttcgacgttttaggttataatttgtgcatcagacattgttgatgaacctttttctgtatcggcgattgataggtcaataagaaaggcggaatgggttaaaactgaaactgaccagatattaagtggtcgttgcccagagaccgatgggacgtggttaggtatttctactcgaggccgagtcgcttttcttgtggaggcagggactattaacagagacagattcaacggcgccgagagtcgtactcttgagttcttagaggtttgattaatacttttttctttcgttgatttttcgttcaaaattatctggattctcacgggattgcgttgattacagagcaacgagagtccagaggactttgcaaagtcatcggctgcagattacatacgtaacaagaacacagccgcctttcatctaattgtggccgacatagcttcaaactcaatgctttatatctccaaaccgcgtttctctgactatggcattgtctatacagagcctgttggtcctggtgttcacacactatcttcagctggactcgattccgacgttggatacagggtaattaatttagtacaagaatcttgtaacagagtttttccctatttgcaaatcttttcatatagaaatgtatagcttaataaaagcaaacccttcttttttggtctcatgcaggacttacgtatgagacactctttttgtgagatgattaacagagaacgactaccaccaataagggacattgctgagattatgtatgatccagtcaaagcttacgaaagcgtgctactgagctctatttttttcgtcgacatgaaggtaagaaactcaaaacattataattgagccaccttttttttttatgatcgttacctgcattatattattgtaacctctcttcttcctttttaacattttaaatttcagattggatacgaacactatggaacaagaattacgacagcattggttgtgaaacgcaccaaggaagtgttgttctttgagaggtacagggagatatttaatgatgattgggacgaccacgacttcgcgttcaccatcatctagttacaaggagcattccccagcatccaaatattattatctatactaaataatcttgttgatgctgtaattaatacatcataatcttgccggttcaaggaaacttagatgtccttggccacattatatctagctctaaattaagaacaagactaggggtgaacccctttattcacctcattttgcattaatcaataaaaatataccatatcaaatcctaattaaattacataataaattaaaactataattataaatccaaaccgatatataatctcgtttaattacaaaatctaaaccctaattctcttttgtaaacccaaaccaccatttaaactcatttagtcgtaaaaaaactaaaccctaattgtattttgtaaacccaaaccgacatttaacctcgtttaattataaaatctaaaccctaatcgtactttctaaacccaaaccgatatttaaccttgttttctaataaactcaaaccgatacataatttcgttttagtggcaaattagattttataattaaattaaattctttattattattaggtatcacattttaattggctaaaataaaagaggtgaatataagagcaaccccaaccttgtatcttagttaatctttagctataaaagtgattaaatttaatgaaaccaacaaaccttagctaagataaacatcttaattaagatgttttcttaaaactaagaagagtatatgtgttgtgttttgagtggatagacattgttttggaatagtttgaattgttgttttttaagaatccaatagttcttaaccattggaaaaaaactagttaagcttcttcctaacttttcttaacttagtaaaaacaactttttattttaaaataaggttaagattcaaaattaagaaccaattggttctaaatcattggagttgctctaagggttcacatctaggggtgaacccaagtttttttcctaaataaataaaaactagttggttttcttaaaatttcctatgtcaattgttcactttatatttttcatctactcagttcttgagttatttttccatattttctcttttaactttactttcacgttaagtcatgtattaatttgatattcctgtgagaacaccgagctatagtttgcactttgcagaatgaacaagtactgacaccacgtcgtacgtggtaatgaacaagagcaatggaatcaagaaaaattaaagcgagaacataatggatattaagaaaatttaagaacatatatatagaaagtaaggaaaagcaagcacactagatatatatcagaacaagtataacaagaaagcccggacatgaagagattgttcatttcgtaactctttacggttgatgaaagattactcttttccaaaatgaattactttcatatattatcagaattattataaccaaatcacacagttataaataatttgaaataaacttagtcttaatttgaagccactaaaaaaccctttgctatcctcttcagattttgggatgctagctcttaatttcacatgtccatgataaaaatgatcaagttgagcgtatgaatattacttaacttgtgtcacaagaaatcgcttctctttttaatttggtaagcgaagtcttaaatgatttcacatttacagatcaactaattaacctagttattattgtagaacgcataatctctcatctcactgcggttatggaaataattgatagaacctgagtaaacgatatctatctcatgcttttttatttatgttggatcaatagagcaaagtttcccgatctgtaccactgtttctttcccatatgcaatctttagaggtctgaaatcagttgtaacttgtaacagagatgtaccaaaagctgatgagattatatctttaggcatttgtataaaaaaagactgtataatatatatcataaagattttaaattaagaaaaatattaagttattacaaactgaaacctcgagttgcttctaggacttaatgttatgcaagagtagataccttgtgcgttaaccttgtttccttgcttgcagcatcattcgtgacttctagatgatcagcaaagaacaaaatctgcaaaacaagtaaaactagatcttaatatcaagacaatgcactctcatgaatcagtcactaactaaagtgaagcttactttgctcataaactggacgtttgatgaatcagtagccatgacttgcattccaaggcaggtgtttgggacactacagaaagggcagaagatagttttgaaaacacatccatcttgctggcaccaaataccctgaccatttgagctttcagaatttgtgcagagtctctgattaaccaatgagcaatctgtcatgataactgaaacacttgttggcatttctgcagaacctgttcctgatgtttctttcagaagagacagcaaataggttttggacgacgaagtcaacatgcatatgggatatgagttgttctcagggtgacttaatgtacttctgcagagtgaacatgatatcctcatcactctctgatccacttctggaaacccaaattcaattcttctagtgaaactcgtgtgatcctcgggtctattgtcaggagcattactgttttcttcttcaaggtcaatgatgattggagatgtagtaaactttcttctcttcaaaacatgtgaattaacactcatgttcaaaggtgactctgcttctagagtcatattacgcatatcaccaatggaatatctctcaggagttacagacgattcagctccaagaggagatcttctgaaatttgcattagatacatgccgttttaagaattgatcaggagacttcagagatctcagacctgtttctaggctagagctttcatacttcgagctagaacatggtctggctgttgcaataccattgatcataccagagacaaaagatgtttctggatcttcatcacagttggtcaccgatgactcctcacaatacctgtacatgacagcttttaagtttaggacaattatactttgggagatgttgtgatcgaatcttatatactttgagagatatggtttgataagcttacccaggctcaggttggacctcgcagtcaaggtcaatgactcctttgcagcattcagcttcccttttaacttgaatgaatgtgtgagcaggtattgtttgctttggttccacatgactagatttgttctgagtctgattctcctttcttacgaattcatttctttggttttcagaggacaagttctgctcatgagactctaacatcttgctgtcaactctctcctgcatgaaattctcaaagaatattaatggttctgtatgtaataaagttccaagtaaaggaatgagattgttttgaaccttgacactgctgaaaaaatatcttagtccttccatagaagcttcaaaattatcatacactttgatagatgccttagccactttgaaatagacgctctgttccttggttgtcggtaacctcagagctacaataactgaatttaaaacaaaacgtttcgatagatattgaagtcttataaaattacctaagaatatgatggcaccataatcaaacctatgacggatacatcgtcctgctgcttgatttaaagcacgatacgcctgttggcaataccactcactccctccaagaaggtttttagatgatttgttggtatcattatattttctctttagctcgactagaatatcgcccctggcaagaaagtgattcgttagaaaaactgttaccctccaaagacgatttcgaacgaagctgaaagattcttacaagtttggaagtggaatgccaacaattatctgtacgtaatcatcaaggtttaacagttccatccataaaccaatttgagtagtataaatcaaaaatatcctttagtttctatagcagcagaggacttaaaaaaaggataccactgccctggcgttgtcatcagaaaaatccatcccttctgaaacctgagaggaacatgtagaatttgaacacaaaccatgtcatgctctgatgctcataaggtccctttaaataaacatcaataatagaaactaagacaaaaaaaacaacaacaaacctttcctctacatactgcaagaaatgcagatcctctcttggaatcatcttgagcctcagttataacagaccctgctttcttaacgctgctatttcttccaatcaatctgttctttccgcttatcgaatcatagtattccttgagaacagtttcgaaatcgtccttggatcctcctcttggttctgcaaccaagaataagaatgcatcagtttaggatttgttgcaacagtttttacatgatcacagaagttagatgttacttaccgataaaaaggtctgttttcaagcagagccgagaccattgtccagtttcatgccaacgtgtgcaaagtttttccatcaacttatagcttggaaagaatacaagagagccacctggtacaatagtgcagatttcttccaatgatttccctagagcgtcctttcaaagcaaaggagaagcattgcgttttacaacagacgaaaatattgaatcacaatacaaataacaaatttacaggcaaaaggagcttgaacaagtacctggaatgcatatgcctcagctgttctataacttgcgtttagaggatagttaccaggaacagtggagattgcaccagcccacacctggaacaatattgttaaatcatacattcagttcttgaaagtgttgctaagtggagagcctttagtcggaacctgcatattaggatcaatcacatgtggagcctctaaacaagtaccaaactgcatcccaagttcagatgagaaagaattcatcggtgacaaagtcctaaccaagaaggagatggctcaagaaacatttagcaaatcactctttgcagaagcaatagtaagcaacaagatactactgcttacccagatgttaaaatgatggataaagacagatcagctaagtctttgaaaacaacagacggattcatgcaccataaactgaaagtattcgtccacccattatctcctgcattccattaaagtaacaatgaacacattttcggataaatatctataaagcattcacttgtacggctgtacctctcttagcagaacgttgtaaacccatttcataatctaggacgtgacttccatttcttgaaaagaagtatgtaagtgtagcaaacaactctacatgaaaattttgcaataagctctcatcttcaaaattacataacaaaggatcaatgcttaaaaaagttagtgagacgcaaaaaaaaaccttctagtgtggagacagatatcccactcaaataaggcttatccgggtcaatttctgctgcttctgattttgtgatcgccttgaccagtaagcaaaacgtcacattcaagcatagtaaaaaggtatgcggcgtagccagataacacagaagaaatgacttacttggttaaaacatgcctttaagtttgggaagttttctcgagtgatattgaattcctttagctctttcaaagctctatctccagtccagctgtcacattgataaacagcagagaaaaaaaaaaaactatgaagtatattgcatatacatagagttggttgaaaagtttcaacttacttagagaaatagtggtcaacatcacgttttgcgagtgaatccttctttcttccaatccagcttatcaatccctaaatacatagaacaatacttcaatattaaaaagtagacagcaaaagctacctcttaatattttatcttgcagataaatgactcacctctactacttcatacaaggaatcatatatctctggctcaacctcactcatctgttctagttcattcttcaattctgcataacacataagtcacattagtaaagtatatttcagtgaactaaacttgtgtttgagtattacatactgaaaataatgtcttcttccaagttaatgcttcctgcttcacgagcaatgtcttccatattactgtggacagtgaaagattttagtagacggccttaaccatcaacatcatcaaagcatactaagaaagttctgaagcttactgtgcttcatcaaagattataatcgctccttgtagatttactccgcctcggatgacaggatcaattatataggaataagggcaaaaaaccaattgtgcaacctccaacattttccaggaagcaaaatatggacagcctaaaaagaaaatagtttgagataaagaaactgaaataatacaatcacttaataaaccaaatcctaacctgtaacagtttttccaatttttacaaggtcttcaatatcatgaaccccattgtgaccggtctgctgaagtgatgggtaagctaagatccgaccgacgccactggaagttaaagaaaacaattaaatggttcgcaggaggtaacaaaaaaatgaggaaacataaagaacttagactattagggaaaagttacttgaactcggcacattttatgtttttcttatcttttaggagcaaccgactagaaaaataaatagatgttagtatagataggttatgctatagttgaaaatgatagtgagatggtatgaatatggatgcaaatttaccatttttcgtctacattctctttcccctgtacatgactattggtgcagtaacgtttccttgaaccctaacacaatgaaagatgtaccaaaaagaaacaatgttaatgagtagctgcaactaatacataaataaaacaagatcctccgatcaagttttgacataccaatacagtcatgggaactctgtaaccggtttttcgatactcacgaatgacttgagtgatctgagcatgagttcgtctataaaacaaaaacaaacaatcaatcaataacaataagaaaaacataaacattatttggaacattttttcaaaactaatgtaatgcttacgaagcatagtatatggtgggaatctgaggttcatgtggctccacattactagatccagcaatatctgttcagaaatataaccaatatttaacaactactagaactaattaatctccccaaccaatcatagacgcaatttcattagtgtcatgacaaacctgagggctgcgttttcgaatgagacaaatttccattaggaaaccgagatttgtagctcttttgccaagcgagaacggagcagagcaaagacagagatttgcctgtacccgtgggagactcgagcaatgcgtgggagtgaccatctctctgggcacgatcaagcgtagatatgacccggctcatgaacgcaagctgtgttccgtagggttggtaagggaattcaacttgaaggcctccgatttggtagacattcttagggtttttggagtttagggtttgtttcacttcttccttcgaatccgatttacttcttgtggaagccatcttccgttatctagatcggtggattcggtgacggaagaaaaaacaatatgtaagtaggggaattgagtttcgagaatttcgtgttgttgaaattaagtgggcgggaaaactttaccttctttcgccgttgtttacagcttgtctggcaagctaagatctcaaaaacgacgtacagtactgatctgctaagaaagaacggcaatactttcgctccattgacgattgtgcagaagtgggcttataaaagcccatttattaatttttgtcttttgaaaaagttaattaggcctataaaggcccatttaccagcaaagcgaaagagaaaaaaaaaacaatcgttaagacgattcgatcttttgctgtgtcagtcatttatacgattttttttttgttaattattcatcatttcatctgttcgaatcgggcaattttcgtctggagaaatctggagataggattttgatcgatttctaagctctaatctcagttttttgggtagctccggtgatccttgagatggcgggtcagaatcctaacatggatcaattcgaggcctacttcaaaagagcagatttagacggagatggtcggatcagtggtgccgaagctgttggattttttcaaggatctggtttgtctaagcaggttctcgcccaggtgaacatttcttcttggatctctctgctttctgattgtttctcgctagaaagatctgatttcgttttctacgcagctgatttgggtttccaaaatgccgtgattttgattgttccatttgaattgcattctatttctgagattttgaattgcctatgaacttaataagaattcacggggtcagatttgagtacatttgtgtggaaataagctttaaatctttggtgtaccagtaattatgtatttgaatctggaaaaaatatctggcatacagtttccttgaaggggttctatttagcggtgtttgctatataaaattgtttactgatcagttgtgttttgcatttgtagatatggtcgctttctgatcggtcacacagtggtttccttgatcggcaaaacttttataattctctgagacttgtaacagttgcacagagcaagagagatctgacacctgagattgttaatgcagcactgaatactcctgcagcagccaaaataccacctcccaaaattaatctttcagctatccctgcaccccgacctaatcctgctgctacaacggtcggtccagtttccgggtttggaggaccaggggctccaaatgcgattgtcaatcagaattattttccacctcagcaaaaccagcaaatgagaccaaatcaaggaatatctgggctgacttcacttagaccagcggctggtccagaatatagaccaagtgccttatcaggtcaattccaaccagttcctgttggtagtgttacgcatcctcctcagcctgttcccactagtgtatctggtcctggtagttcaacgttcaatcttaatagtttgtatgctggagctggaaacaccagcggatattcgtcaggctttggagggggcagcttagcagcaccttctcctggcttaaaacaagagtcacacattgatccaaaggcgcttgttgtatctggaaatggaggtgacatgttttcctctttccagcaaaaacaagaacccactctgagtaattcttcaattagttcagccattgtccctacttctgctggaatccaacctccaacaaagcctaatgctctcgattccctacagagtactttctcaatgctaccttcaggaaatcagcttcagcagccaaggccagcagcaagctcacagcctgcagtgtcctcacaaggtccatcctccggtttgccacctggaagtgcagttggatctggccattctactcctgctggaaataatcagcctccgtggccaaaaatgaaaccatccgatgttcagaaatacacaaaggtatttatggaagttgatagtgacaaggatggaaaaatcactggtgagcaggcgaggaatctatttttaagctggaggttacccaggggtaaggattttcaatctcgcagtctactttacataaagaacataatttttctgttaatatatgaaatgaactgttacctccgttgtaattagatgcaattctggattgaagaatccttttagaactttttttcgtctcctttcttcatgggacagaccatgtgctgttatgttaaatatatttgctaccctcctgagggttatgttcctttaataacatatgcaactgataaagctatgaagtgcttatgctaacattttccttttacttggttcccagaggtattgaagcatgtgtgggaattatctgatcaggataatgatactatgctttctctgagggagttctgcatttcattgtatttgatggagcggtatagagaaggccgtcctctcccgaccgcacttcctagcagcatcatgtttgatgaaacactgctatctatctcaggcgcacccagtcatggctatgcaaatgctggatggggatctggtcaaggtattgcccagatttgatgcattttagtgatgatcttttccctttccctggtacttcactttaagtcaaatttccgtattggaaggttttgtacagcaaccagggatgggtgcgcggccaatcactccaacgactggtatgagaccaccagttcctgcaccaggccctcaacctggcagtggtataccacctaatcagccaaggaatcaagcgccagttttggatgctccttttgctaatcacctaggtaatggatattctgcaagctcaaatcttccagaagcagcagctgatgaggaaaaggtgatcaggatatttaagcttagatgagttgcatttccatatgcgtttccttggaggcttgtgaaacaaaaatttctaatctgtgtaggttgatgaaaagcagaatgcctatatggactccagggagaaacttgattactaccggacgaaaatgcaggatattgtgagtattactcttgttatttgagaagtgagaaattactttgatctgtctcagtttgctatatttaaaaataattaacttttgttgatgtaaactttgatatatttgtattcattaataccttaacgaaattgttagctcttttgaaagagggaatcttgatttttctctgaaacgtttgaaagattgtgtgtaagattaagaccaatctactggaatctgaccatctagattaagctgcagaacttgaatgttatctaggtaatggtcttataagtttgagattgttggtctcctgaagttctgatcttttcctataggaacgtatttcctgtttgaggctttgctatttagatctagttcttcagcttgatctattatcttatttagattatatttacaatctgtgtgtcagagagtaaggttcttgtgctgagatccaattctcaccatcccactttttcattcatctttctctcaggtcttgtacaaaagcaggtgtgacaatagattaaatgagatctccgaaagggcttctgctgacaagcgtgaggtgcttttcacatagaaaatcacttttctcatttccttagaagcaattctgtcttatccagaacaatttctgctgcaggctgaaacattggcaaagaagtatgaggagaagtataagcaagttgcagaaatagggtcaaaattaactattgaagaggccaggttccgtgagattgaggtatgactaattcaagtggcaacacctatgtacactccagccgtatatttttttttctccagttcttctatgtgcattttcccttactaggcttatctaaacttcatcattgtttttttctttttctttttctctggatcatgttgtgcgtcttgtcctctcctcttattctatggcccaatgctcccttctttcacctttgctggtgaaggggctttgaataattttgtaacacatcttacggaaatttgttacttattgaacttttgctttgctaacccatccaggggcggaagatggagttgagtcaagcaattgtgaacatggagcaaggtggtagtgctgatggtctccttcaggtacatgctattctatatgcttacgagatgccttaactgtcgagtatctgctgtacatgcctgatttgatgctgtactgggcacatttaggtccgggctgacagaatacaatcagatcttgaggaattgatgaaggctttaactgaacgatgcaagaaacacgggttggaggttaactcgaaggcccttgtagaccttccagctggtatatgattccgttgccttgtgacttcttgctttcgttgtagatgattgcaaataacatgtattttgtaaacaaacaacttatgtggaatttgctatgttgtgacttacaggctggcaacctggaattcaagaaggtgcagctctttgggatgaggaatgggataagtttgaagatgaaggtacaatgttttttcctatctttctcttactaatacacttagatatatatagttaagcacataacaaggacattgactgataatgttcccactgttaggttttggcaatgagatcacttttgacaaatcaaaagagcaaaactcgtctggtgagaaggaaaatggtacggtggatgatggtagtgggccacctgattcgccgacccatgtagaggacaactatggccctttttcagaaacctcagaccgccaccatgagagtgaatatgggacaactcacagtgaagatagaagtcctagagacagtcctgtctctaggaatgctactgaggtcccatctccagattattctcagggaaagaattctgaattctttgatgactcgaattgggcaagtgcatttgacactaacgatgatgtggattcagtctggggatttgatgcatcaaaaagccaggttagtaaagaaacatagtgtctctcgctttaacacatcaatccatctatcaaaatactaaatcaaatctttcagttgtgacgaatagacattgaactgatcttttaatttctacaagattttgaaaatccgtattaagttcatgcttttcagatttgcgatgttacatttaccttctgtatgctgaatcatttagttatctattcagagtcttaaccaagcttagcattttcaatatcaacattggcaggatggagattactttggatcaggtgacgattttggtggaaacacagcaagagcagattctccaagttcaagaagctttggcgcccagagaaagagccaatttgcatttgatgattcagtccccagcactccactctcaagattcgggaactctccacctcggttcagcgatgcatcagctagagataataactttgatagcttctccaggttcgactccttcaacaccagtgaagcaggcgccgggttttcttcgcagcccgagagactgtctcggtttgattccatcaacagctccaaagactttggtggagctgccttctctaggttcgattcaattaacagttccagagacgtcactggagctgagaaattttcgaggtttgattccatcaacagtagcaaagactttggtggtccctcgctatcaagattcgactctatgaatagtacaaaggatttcagtggtagccatggatactcgtttgatgatgcagacccgtttggttccacaggtccctttaaagtctcttcggatgaaagccctacgaaaaggtcagataactggaactccttctagcctcggttactatcgttcccttttataatcctttttcctcgcttgatgaactgtgcttgtttcataattataattttttcaccaaattctggttttggatgagacactagcgttagtctatttgtaatttgtaaagtttgtctctgtattggtttcctactgtatctctgttatgttatgaattcatttgctttatatgaaagaaatatttgaggatttcgtcgtggataagagattaaaggacaatgaaatgattttatttttctccatttttactgtttctcttctccaaaatgttttattattttgatatatccttagctcgaggtcttgtaagaacttctggtaacatttaaccaaatcaaaacagatacacttgaaggtggtagctacaaaattgaaaatcgagctaatgcattggtacattctaaccctctgactcgaagaagatatgattttcgcagcatcaaactgctatgatcaatgtaacatcagtctttgaggttggctccattctgtttccgttgaatccactgagcacatttcaggatcagttgttaccaaggaacttcacttctctgtgatccgctcaaaggcagatatcatcgatgcacgcatgttggctatttccaccagagtttcaagagctgtccaaagacgagagaaaaaagagtttcagttgtaaactggaatcttcctttgagtatacttgtggtgatgaggatgttacctgtttcaaatgattgttgagcgccacgcagcttaggagagactagacctccaaatactgacagagattttgcccgttctttctttatctggagctcaacacattcgaattagtaaaaccatcgtcctacattttgaaaacaagtagagtttctgcagacggttaaatgattgctcacctcttcatcagctgctaaaacggtttcatccttggctgatggtttctcttctatcgaattacataaagcaagagatgatgaaacaccgacaaacaaagggcagagaataaccaacagatgagtctttttttaccagaaactcctcgatgtcgtagctgtgggctgagaggtgagcctatctccgaatctgtatcagtagagaagtctttgcctttcctgctaccgcccttggaagcccacttggacaaagcaaaatgaggtactgatcccaaagattcaactacaagagtccatagacatacactgtatataagttgcttccccgcaaaaaaaacataaattcatagcatataaacgtaaaccattgaactatcaaacgcccaaagcataagccaaacttaccatcttggtcagtcacttgcaatgttgaagaagcgggatgatacttaagatctaagagagtgctgttgatgcgtaaagttcccatagaatgtcgagcactagctagatcaaaccatccctgcaaaaataacacatttcagttccataccaaataagttaattaaggcagcagactctcactctcatcatatcagtgatatgaatccacaaaaaagtttctcctcatggctactatagctagataatcaacgaaaacgtttcccacgcaatcctttttaatcccagattcaattcaattcaacacagaatatctcaagtcatctatacatcagaacataagaatcattcccataagatcccattttagctcaatacaccaaatatcattccaattacctctcgaagcttagaattcacagaatccataagcgttaaatatccatccaacgaatctagaaactgcaaaacattctcatctcctcccccttttcccagctcagttttcacttctgattctttattcacatccactgattcatctccttcctcgtaaatctccgccatcgaaatttagctccaacacacgcgaatcaacaaatcgaagcttacacgaggaagacaacgtaaagcgatcgaaacagagacagatcaatttctcgagtaaacgaggctattttcgtaatatttcaattagtaaaggcccaatagcccaagtagaagacaacgtaaagcgatcgaaacaaagacggatcaaacgaggctattttcgtaatatccaattaataaaggcccattaataccaatagcccaagtcgaaagattacctctttcgggtcaaaccggttatgtttatgggtgggtgggtagagcaagtcgagtgtgtgtgaacacagcgccaggctgtttgtctcagtttgtcaagttggcgtttggtggctccacgtctctctctatctctctctctcacatgacttttcgattttagtcaacctttcgtgcttttctcttaaaaattcgattttttcttcaacccatcttcttctctgttatttcctctcgcttttacctgtctctctcgttctcgcacggggatagaatcaactctgctcgagattttagtaggaggcaagctcgattgcttgcaattagatccatggatgaagaagaactcacactttctcgcgcgtttttagctcaaggagatttttgaagaagtggtcgttttcgaattgtcaacttcagaagaagaatcaactttggttttttcttttcccttctctgtatagctttgaggaggcgcttcttcaactggaacaggctggtgtgcttttttttttatctcttttggtatttttgaaatgcttcatgagacgttgtttctcttctttatctttttgacgaatattgctaaatttggtaatcttgctatataagggttcatgggagtgatgattttgggacactgttacttttcgtattttaggttatagttatgattgaaagtttgaattttgtttccttggctgtgaaagaatccgggaaccaaactgtggtactatccctttttgtgtttccaaaactttctcattcatttactatcaaatttcgacactttcttaccagactctcttgcattgatgtatccaagtgggttttcatctaggatcctatgtttcataacaatgaggtatttgcttgtacatttgcagtgagtttgaaggattaagatggttggaagctcggatggtgaccagtcagatgatagctctcattttgagcgaggagtagatcatatctatgaagcattcatctgcccattgacaaaggaggttatgcatgatcctgtcactttagagaatggtcgaacattcgagcgtgaagccattgagaaatggttcaaggagtgtcgggacagtgggagacctccttcttgccctttgacatctcaggagctgactagcactgatgtaagcgccagcatagctctgcgtaacactatcgaagagtggagatccaggaatgatgctgccaagcttgacattgctcgtcagtcactgtttttagggaatgctgagacagatattttgcaagctttgatgcatgtgcgacagatttgcaggaccatccgatcaaataggcatggtgtacgcaactctcagcttatccatatgatcatcgacatgttaaaaagtactagccatagagtgcggtataaggctctacaaactctgcaagttgtcgttgaaggagatgatgagagcaaggttgaatctgatttcttttcatctctgctgaatatttagtgtagcattttaatgggaaattgagcgggtgctaattaaattttcagcatcttgcaggcgatagtagctgaaggggacactgtgcgtacactagttaagttcttatcacatgagccatcaaaggggagggaggcagctgtttccttgctgtttgagctctctaaatcagaagctttgtgcgagaagattggttccattcatggagcactaatattattggttggtctgacaagcagcaactcagaaaatgtttcaattgttgagaaagctgatagaaccttggaaaatatggagaggtcagaggaaattgttaggcagatggcttcatatggtagactccagcctcttctaggcaaactccttgaaggtgaaagaatttcttttctttgtttggttttaatataacaattacgctctctacttcatttgcataaaacaagttatcatcttccttcagttggtaaaattcttccttcagttgttcggatgcatcacagtgttatggtattctgccttagaatttgtttgctctaggaattttacatgttcgcttgtaagaagagtcaattttcttctacccagatggtcaaatctttcattattttcctctgttatatggcaaatttcttgtatgaataatgacaccacatgtgaaatctgcaggttcacctgaaacaaaactctctatggcttcctttctcggggagcttcccttaaataacgatgtgaaggttcttgtggctcagactgtgggttcttctcttgtcgatcttatgagaagtggtgacatgccccaacgggaagctgccttgaaagctcttaacaaaatctcatcgttcgaagggagtgctaaggtcttgatcagcaaaggaattctccccccacttatcaaagatctgttttatgtggggccaaacaaccttccaattcggttgaaagaagtctctgccactattcttgctaacatagtgaacatcgggtatgactttgacaaagccactcttgtttcagagaacagagtggagaatctgctccatctaattagcaacacaggtccagcgatccagtgcaagctgttggaggttcttgttggactcaccagttgcccaaaaacagttccaaaagttgtttatgcaattaaaacctccggtgcaatcatcagtttggttcagtttatagaggtccgagagaatgatgatttgcggttggcttccataaagcttcttcataacctttccccattcatgagtgaagaactagctaaggccttatgtggcactgctggacaactcggaagccttgttgctatcatttcagaaaagacaccaatcactgaagaacaggctgctgctgctgggctcttagctgaattgccagatagggatttgggtcttactcaggaaatgttagaagttggtgcttttgaaaaaatcatatccaaagtgtttggaatccgccaaggggatatcaagggaatgaggtttgtgaatccttttctggaaggacttgtgcgtatacttgctaggattacttttgttttcaacaaagaggctcgggccattaacttttgccgtgagcacgatgttgcgtcactcttccttcatctgctccaatccaacgggcaagataacatacagatggtgtccgccatggctttagagaatctttcactagagtctataaagctgacacggatgcctgatccgcctcctgtgaactactgtggctcgatcttttcgtgtgtgagaaaaccacacgttgtaaacgggctgtgcaagatccaccagggaatatgttcattaagagaaacattttgccttgtcgaaggaggagctgtggagaaattagtggctctattagaccatgaaaatgtgaaagtggttgaggccgcacttgcagctctatcgagcttactagaagacgggttagatgtagagaaaggggtcaagatactcgatgaagcggatgggatacggcatatactaaacgttctgagggagaaccgaacagagaggctgacaaggagagcggtttggatggtggaaaggatcttgcggattgaagacatagcaagagaggtggcagaggaacagagcctgagcgctgcacttgtggacgctttccaaaacgctgattttagaacgagacagatcgctgagaacgcgttgaaacacattgataagatcccaaacttctcaagtatattcccaaacatcgcatagggaaaatctctttgaaactgtccagtgagttatagtgattttaaaactgtggtttttgttttgatgggattacttgttaataggcatccagtttttttctgggtatatattgtaaattccgattcttatttgtttataaatcctacgttggaaatcgaaatcatttgattggcctcagattaaaaaggcttatgtgtgttgcggagggagttgtgcttacttttgcatcaaatatatattgagttcatagattaaaccaatttgtaaaacgttttaagcttcacacaaactgatttgagatttgggaagaacaaaaacaactctttcttcgcaccctttaaataaactaatttagttaataaaagacaaagtacgattaaccagacccataatagccattacagatgagatgacttcagatctggtaacggtctcggtctcggtcttggtcatgggcataggcataggcataggcataggcataggcatagccatggcgatgggcataggcataggcatggccatgggcataggcatgtgcatgtgcatgtgcatgtgcatgggcataggcatgggcatgggcatgggcataggcatgggcatgagcacatgtacatgttcttgatccagtaatccaatcacagaagaccacgacggcttaaacagaaaaaagtctcgatcagcatcgcaccacgttggaatcgaacccaaaactctccacttgttagctctcaagtcgtatctgtgaatcactgagccaaccagactcatcatcctcaccagtaaacacttgccgtcgtacgcctgcacgttccagtacaacaacggtaaactttggtgcaccacctcgttcttgatccacctcacgaggatccattgaccatcagtctcgagggcataaacggaaatcactgcatcagtagccgatatcaatgtcaggcggttatcgccggtacagagcaagagcttccccggtttccggttaaattggctttgaatcagtcgtgctttctctgtttcgggattgaacgctacgatgctcccgtcttttctcagccagtgaagatctccgttcacgtaaacaggtttcgaattcttaccctttttgagattacttgcgcggcaagtaatggtggttttcgataagctccatgattctccggtgttgatcctgaattgatacgtcgtttcgtatggatttgaaacctctagctgctcggatatgaaaacgattttgaatctctgagtggctcgatcgatctgatcaaccgcgaacccaatccacgtttcgtttccccatatagagtaatgcaggaaccggaacttctttgtgagaggattagcgacgcagaggataccattaatggataataggacaaggccggaacaagaaccgagaatattacacaagttcttcaagggtgtcatgtttttgaataacctagaaatggcataagggtagaaacagaggaatttagagccaactttggagatatgaagcaaactggacccgatccgagaaaagtattcgaatttaaaatttgggtcgtcggatatatgcgtgttgatagatttatttgtgcatcgcatcttccccagagatttgggatctaagttgaagagaatctcatcgaggagatgcaaaggtaatctcttcatgctgatctcagtgaggatttagggtttatgtttttatttttgttcctttggatctgcgttgaggtttatgttaagcgatctatttgaccagatttttcgtttaacatctccagatttttagttactcccaaattatccccattattagaaaaattaattgacttctttttcgtttattttctttgggagataaggttaatcagtttaaaatacaggtcaaggataaaagatttatttcacaatataatttggttcatgggtaatacatacagagcaaaattcataccattgctccacactaaacaacacaaaaaccaaagttaaaaactttcaacaaaatctctaatcaatccaaaattacacaacttcagatacctaataatctaaaaccaatacacagaaatctcaatttaacaacaaaattgcaaacccaattcttcaaatctcatcaaacaccaaatcgtttaacgcgatctacaaaatcgattaaagccaaaacgatattctaatacagaaatctaacatgtgcattgacagtgatcgcagtatggttccgatgaattaatcacattttcctcaacaatgtagcagaatcagagaactctttgtcccatggctaaaaagagtacaccacagtccacacaggcatacgacggatatcataatctttgaacatcaatagacttcttgaccttacgtgcaaggtcttggctgatcagatgagaggcaaaactccagagcagatgtgtgagcacttcaacatcaagaacgattacacacctgaggaagaggcggaagttcgcaatgaaaacaagtgggtgttcgagtgattggattggagtggatcggtgtttaggacaacttaatctcttgtctatgcaaacttcatggaagtggtatttacatgacaattctctcagctctgtttcatcttcatagtcacatagacaaatacaccatttctaaaacagagaaagattcatttatttttttagagtgtatgtcaagtaacttgtaactcatttttcaaaatttaaagtttttagatccttacgttttagaacccaccattggacagcctaaaaattaaaaacattcaaagtgtctaaattttgaattttttattattaaaattataaaattatgtttagatttcaatttgggatccaaccattagtccataacaacatttctaattaatatttgtttggtcaacaacatgcaatatacgcaatatgttcagtcacttaactaacttgtaaaccacaaagccaaactcagtaatatttttgacccaagagacaaaacaaacaacagaaactctacatatacagttttgttacattacaatgtggtgatccaaaactgactaagatggtccgaaggaaaaagagaaatgacaatggttactgcgtactatgcttttttaatatacatagaaccacttattcacatgagtactatgttttcaatcggagtttcaaattgcaaattccgtctcatatgacttttccaatcgttgatttctctctaaacatatgggaattatccatcgttcttctcaggaaccgatgcaattcttcagatttctacttgtgcgactagcccgtccatcacaatctatgagcaaactttcctgaccctatcacttcactcggcggcccagtcgcacgcaagattcgatcaatacatgaagttacacatgtctatagacttcacgccgcatcatccttgaattcctcttttaggttattacttctatcgaggtttgattttaatccaaaaacaacattacctagtcgttttcaagcttggattcagttaaatcctcaacaattacgcagctggaaccttttaaacataattcttcctttttctatttaactttttttactagcttataggctacattgtatagtagtatactatacctctctgtctatccatccagattatccttccctatccgagtccttctaacccgcgcactaaccatcagttcattcatgcattatccatattccttggttccattaagaacaaccaatcaccgatagccttcatcaacaatctaaccaagaaaagaatgatactaagcaagatactctactaatagactaagaaaacgagaatcattagaagaataagaaaatacaatgactcgaatgcttttaacattctcatcgaagaagacaggtgccacttcaacacgaaaaaataatagatagtgcacttaacaatcgagttcaagatattaaggaaatctactttcacttaatagaattacttagtggccaagcgttgcaaaattttaacaaaagagagaagattgacagcatcatctcaaaaagggtgatcgagataaattcaaagtctaacatttaaatgttacgaatttcatgcaactctttaacaagtatgcaccgtttcgatatctttagttctaccttcgatatcaaatctaatgcattcagtcaatgaggcctacttttttcagatcgtcttcttaacatatgcatactgtcttggtccgctggaccaatgctgatgttctcaagcacaactgtcgaagctcttttatagatttagatttcatctccgagaccgactttgatagctaaatctcgtacgttccttcatattccttccttttatcttttccatatattttcgtgattttctctggacgttctgatgttcggttcggatatttttaaatttcagattaggatccgattcaaattcgagtttatccgaaatatccaaataccaaaaaaaaaattgtatctaaatctacgtaaactcctccaaaatatctataaaatttgaatattttcaattctatggttagctagtcgtcgaatttgcttgagcagcaagtaagtaagtaactgtggtttttgacaatctccatgaatctccttcgttaatctcaaatcggtacattgtttaatttggatttcgattagtttcacaatcgtttatgcagaaaatcttgaatttttgagatgttggatcaatctgattaactgcgaaacctatatacacctttttcccctaatgaacaacttcacgtttagttacctttgggaaaagatttgacctaaagtgatccaagaatcgaaacttcttcgtgaagtgatttgcgacgcagagaccttgaccaaaaagtaagacaaggccagagcaagagcctagaacctgaaactccaactttagggtttcttaggctctcggtgacgttgacccgaagaaagggaggtaacagaccaatttgcagccatctctagcgatgtaaagcaaattggatacgacccgacacaagtgttcagattgaaaacacagatcgtcggatatgtgcgagttgattgatagattcgtgcatcacatcatcgcaagagatatttgagatccaatctgaagagaatgtcgttgacgagatgtgagatttgcttcgtcttttgaggtgattactactttgtgatttggtgcttgtgatactgtttaagaacatttgtagtatatataggctcaaaaactattatatcagcaaattctatatagattcaattttatgaaggtatagactattgtgatagcacttgaattctataatttcggtttattgactggtgggatagaaattatttgtattcagaatatacaaaaaaaaaaatcgcagaaaatgtaaaaacctacaataaaataaaaaaaaacatacagattggtctcatggttacaacaaaaaacaaaaacatgaaaaaataacattcagaacattgacatggacaaaatataggtgatttcagtaatgttttcggagtcaatgaagctataagagattttgaagattctcacaaataaaacctcaaggaagaagaaacatgttatcaaagaccaaatttagaaaaccatgcgattggaagtctttcactagtggtccgagaatactgagtcgtcaactgcgtagaacactaagctctctaccaacgactccacccgcgaacttgactcttcttcttctttaatttgttgattttctcaatgccaccggctcttagcacaaggtgagatttcatcagtcagtttcataattttctttagagtcgagatatgtttatcatcacgaaccattgtaatcatcctgacgttgtaatcatcacgaaccgttgtaatcatcctgacgtcgaccttcttattcagttctatcgtagaagagaaaggcgacggtgtaaagttgtaaaagctatgactacaatcgcaccacgatggaaccgaacctaagaccccccacttgttagctctcaagtcgtacccatgaacaactccgttgtatatatccttgtacatttcccacaacactaaatacttgccatcgtatgccgcaacgttccagtacctaattttcttattttccgacactccgtttttgatttgcttcactaatgcccacttaggatcaatgagagcattctcgagggcataaacgttaatcaagtcctccgtcgctgatatgaatgcaagttccttctctgtggcggagaacaagaacttgttcgccaccgcgcatagttctaggggaaacttgattggaatcagccgtgcttgctctgtttctggattgaacgataaaatgcttccgtcctttctcaaccagtgaacagatccgtcaaagtaaacaggtttcttatccataatgaggacacttgcgctgcaagtaatggttgttgccgacaatctccaacacgaatctcctgtgagaatctcgaactgatacatggtttcgtcgggatccgaagtctcagtttcgttcatgcagacaactttgaatctctgagttatttgatcaaccgcaagaccaaggcgattcattttttccgatggaaggtcaaaatttagaattccccatctgtcaacacgactaagaaacattgatttagagtaattcaggaatcgatacctctttgtgagcggattcgcgacacagagaccatcgatgaagagtaggaggaggccagaacaagagccgagaatccttgtcgtgatatctaagaaatcgtggtgcctggatgaactagaatcgccgaaagggttgcagaagaggtttttggagccgaagctggagatgtgaagcaaaccggatctgaccccagacaagtacttggatttaaaatacggatcttcagatatatgggagttgaaagatcttctcgtgcatttcatcataaccagagatatgggatccaatctgaataagatcttttcgaagagaggcagaggtaagcccaatgtctccatgatcgacttaggggagaaaaagggagagggagagagtgatacaggaaatgattagggttttgcctactctttgatgagatatttttgtttttctaacatcttcgaatcgacaaggcccgatcaatactcaaatggacttaaccgcttgactaaaagcccatctcgagtttttttatgtgattattcgctgtatatgtgtatttatcgacgtaattaattatttttaactaaaataaatctaataatgtaaagtttgaacgtttgtttttgaaaaaatggaatatctcgaatgaataatattttttcctctttttacaaaatggctatgttttctgaatctatatatagtgattacaaaatgactatgttttctgaatctatatatagtgagaaatccttagtattaacaattgtcccgtagactcatgatatactattacttaataatagttgtaaacaataaaatataaatatcttataaatagatacaatttacaaacttttgtatatactaatttttaaaaataaattattttacggtgtaccgaatgactaaaatctagtacaagggtataaatgtagtatctcttggaaaaaggaaatactacaaactgaaaacgttataaagtcattcattaacattaaaaagaatactctaaatctataaattcttcctattggcaaaatgtagcgatcccgcaagagtgagcaaactccaaaaacatgtccttagttcggattcagactctcgcttgcataaaggcggaattgctagtaatcaccggtcatccgtacggaggtgaattcgttatcggtccttgtacacattgccagtcacatcatgcccgaagtcattaccttaaccgcacggaaggggtgacatgagtgatgagatacatgtatatattatgaagaaatgattggaattcaaaaatagattagatatataatgagttatgcatgtatatatcatttaggtaggaattctttgaggaatatgttaacaattataaactgcaaaaaatgtaaaaacctacaatgaagtaaaatattacagatttgtcccatatggctagaaagaagaatagaaaacatgggagaaaaaaaaaacatgaagtgataagcgattgaggatttccctagatgaaacatcaaggaagaagatgcatgttatcaaagaccgaaccatagaaaaccatagagattggaagcttttcaccagtgttccgacaatactgagccgtaacgacgtagagcagaaagccctctactacaccagatctacccgcagacctaacggttctttttcttttgttgattttctccatgcctaagaaccttctcttcttgctaaaacgcatcacgtctaggcacttggaagaactaggctcatccacggtcatcttcagtttcgtttcttcttcagtcatcaatctttttccttttttcttgaacagtctcttagcataaggtgagatttcctcaatcaggctcataagtttccttagagtggagatatatttacaatcatcaccatgcaccatattcatcgtctcaacgtcgaccttttgtttcagttctatcgcagaggagaaagacggtttaaagaggtaaaagacttgataaccatcgcaccactctggaatccaacctatgacttcccacttgttagctctcaagtcgtacccaaaaacatctccgtcgcaagctaccttgttcatttgccacaacaccaaacacttaccgttgtatgccgcaacgttccagcacctcattgtctttttgtgcaacactccgttctggatttccttcactaagacccacttaggatcgataagaatatcctcgagggaataaacgttaatcgattcctccgtcgctgatatcaatgctagttccttctctgtggcctcgaacaagaacttgttcgccaccgcgcttagttctaggggaaacttgattggaatcagccgtgcttgctctgtttctggattaaatgctaaaatgctcccgtcctttctcaaccagtgaatacatccgtcaaagtaaaccggtttcttatcagccaggggaacacttgggctgcaagtaatagttgtttccgacaatttccaacaggaatctcctgtggtaatctcgaattgatacacatggtttggtctggattcgaagacgttgtatctttcatgcagacaactttgaatccctgacttgttctatcaatttgatcaaccgcaaaaccaatgcgattcattttatgacttcgtaggttaaagcttagctctcccctttttttaacacgaccaagaaagattgatttagagtgatcaaggaatcgatacctcttagtgagcggattcgcgacgcagagataatccatgaagagtaagagaaggccagagcaagagcagagaaacctagtcttgatatctaaggaatatgtgtatctgaatggcatagaatcgccgaaagggttgcagaagagagatttggatccatagtaggagttgtgtagcaaaccgaatccgaccagagacaagtaattggatttgaaatacggatcttcagatatatgcgagttgatagatcttctcgtgcatttcatcatagctagggatttgggatccaattttaataaaatcttttcgaagacatgcagaggtaagttctccatgatcgaacaaggggagaaaaagaaaagagagaggaagagatattacggtttctgcatagttctttgatgtgattattcgctgtaatttgttacttctagtgtatatgtatttatcgacgtaattaataatttttagtcacaaaaatccaataaagaaaagtttgaacgtttgtttcggaaactaatattattcttttccttgtttaactaaatgactacgttctccaaatctctgagtataaatgcagtatctcttccaaaaaggaaatactacaaaccgaaaacgtttacgttttgtaagtcattcattataacattttaaaacaaattcttcctattgactgatgagatctaatctacatttttaagttttaactcattataatatctattctatttttgaatttcaaacatttcttcataatacatgtatctcatcagtcaataggaagaatttatagattaagttataaccgttaacatcttaactaaccagctagttccgtgctaaacggtaggaagatcaaaggatcttaaacttttccggcaaatatgtttactaataacaagaatgatcattaatctgcttctccacctaatctctatgtctttctaatggactgttttgtttgcgccagtttgttctaaatctcttgtaaacctcaagttcctttttggtaatataattaacatcttctccaaaaaaaaaaagagtataaaaaaaagtagtagattaaaagaagggaaagggaaaacataactcttaaacttctattacattaaccaaaagccacaatacgaattttgtctacttgactcgtcttcttttgttgattctctccacgtctaggaacttggaagaattaggctcatccatcatcatattcgattccgtttcttcttcaatcatcaatctttttccaagtatctttccctttttcttgaacaagctctgagcatatggtgagattccactaatcagtctcataactttgcttagagaggagacacgtttatcatcatcatcatcatcattaaccatcgtcatcatgtcgacgtcctccttctcatctagttccatcgaagaggatgccgtcaaagacggtttggactgacaaaggtctcgtttaccatcgtaccaccgtggaatccaacccatgactccccacttggtagctttaaagtcgtatccatgaatcactccgtcgtcgttacagtccttcttacatacagttttgaaataaggatcgtcggatatatgcgagttgatagatcgatccgtgcattgcatcattgccagagattttggatctaatttgaagagaatctcttcaaggatatgaaaaggtaatccatccatgattgatctaattaataagaaaaagagacaaaacaagattagggctttttgctccgttccgtgatggtgactattccagaagttttggtgatgttatagtagatatgatgtatttatagacgtagattatttgcctttaacatattaaaaaggaaagatttgtttatgacattttttactttttcagtattccatatgctttgtgagaccaacaccaaaacctaaaggaatttattgtcagcaaaaagggtacaaaggtcattttataacaaaggtgaattaaaatatgaaggaattcacaaactaaaacgcaacgtttggtgaatggctttaggggtaaaacagtcattacgctcaaagcattgagaaattaggatatggatatgtgaacacctgaacagagttctatgcttcttcttcatcaatggcttccattagtagcttacacagatgggcatctaatcaacactctcgtcttcctcgaatcacttctatttctgaggctgaccaatctcgacccattaaccaagtcgtcgccttttcggttcctatatccagaagagacgcgagtattattcttctcagctcgattccattgacaagcttcttcgttctaacaccgagctcttccgaagctagagagagacgtagcagaaaagttatccctctcgaggaatattccactggccgttaagtccctcgctctcttcttagctatcggttcgtcttccgcacaaatttcacaattagtgtttggaattaggtttctttgttattgcacatgattactctcttgtttaattgggttttgagagtttctgattcgacgaaattctgaattgggggacataaaaggatttgcttgacttgtatgagaagtttctgggtttgtaaaaacataaactttagcttgttattaacacaatgtttgtgttactctgttcttgcagctgaagggttgaaattctatgacattgaggaaggcaaaggtccagtagcaacagagggatcaactgctcaggtctctctagctaatgattcacattttaatttctctatatcgaaatcgagttctcgcttttacaatgtaatggtgtctgtattttccacatttaggtgcattttgattgccgttacagaagcatcactgcaatttctacccgagaatccaagcttttagctggaaaccgtagtattgctcaggttacttcaccatctatcccttttgattagattctgcataatttttagtttgatggtggcttacttctttctggagcagccttacgagttcaaggtgggatctacgccaggaaaggaaaggaagcgtgaattcgttgataatccaaatgggttattctctgcacaggctgcaccaaaacctcctccagcaatgtatttcattaccgaaggaatgaaagtcggaggcaaggttagaaacattactgcattttcgctctcttcttcttacaacatgtagttacatataagtagttttgacctatgttgttcttgcagagaacggtgattgttcctcctgaagctggttatggtcagaaaggaatgaatgagataccggtgagaacctactacaaattgtatatgaggaaagctccgttttttgctgaaaactaattacaaaatgtagtataatgcttgtttcgggtttaagagataataaaatcatgtatgttgttgcagcctggagctacttttgagttaaacatagagctgcttcgggtgactcctccaccagaagagaagtgaacgctaataagagaagtttgaagcttcaagcattgtcccaacatttgtgtaaagatgacaaaggagaaaagagagaaagatgtaaattttggagtttttagtttgtgtctggttggttatacaccaaactctggtacagttaaataaccggtatatttgttggactaaaatttgttaaaagtatataattcttacgtggcagcttctagttggctacaatatcttaaaaccaaatcaaatcaaaacttgaaatgatttgaaatcatagaaccgagaaaaccaaaccgaatgtcaaaccataacaaatttggttttagttcaaccgataataaaccaaaatgtctacagctacctactaggtgagaatttggttgctggctctgcttgtgagctttggtagcgatatctccggtagcttcttttcccgagaaaatctagtgagaaaaatggagacttctctgagatatgctactaattccaggtctctgaaaattcatgccaaggagaagtttccggtgaactccaaaactcgcctgcaggtgaatttcttcaaattattggctgttatggtggattttagcactattcttcaatttgattgcgatatattcttttgattttcttccttaggattatttaatgcacaaagcctcttacttatttataggctaatggttttcagggtttatggaaattgtaattaggatgttattttctatgtacacaggctttagagtcttttagtctttagcagaaagagctgtgtaggcttaaagaagaatcgatagctttttggaagattatacttaacttgttttttggctacactctatccccttgtcgagattatggagcagggaatgtttgtgttcttactttcttttgttggttttacatttgtgattagcttcatggagagctagatacaggagctggagtgccaagttacttctgtgcaatgataagatacttttttcatgaggttttgatcttgaatttgtgcttgagctctttgaaccttttaccagaccattttattgattaccatgaatttgtgtataggcttcaacaaaccttggagttggtttgcattatgataaacgcgaaaagcttcggtgtcttgtacgtgggaaaaagaagtttcctgtgataactgatgaggttgtaacctttaatatcaaaggaagatgtgattttgaccaggacttagttcaggtttgcctcttttgtttttcatcacttgtgtttctttgatggtttttaaaactttagaatggactgaaattttgtgattttgccacagaggaacgcaaaaggagctgctgaatttgattggaacatatggaagtttcagaaagatcaggatttacgcctcagaattggctacgaaatgtttgagaaggtacgctttagcttaccgtttaacaaagagaacaacaatggttcttattggatcattgaacactatgtgttggctttctctgttacaggtaccttatatgcagattagagaaaacaattggacttttaacacgaacttgaaaggaaaatggaatgtgaggtatgatctgtaatgagtaaacaagaacagaaacagagaatagtaagatcacattttcatatttgtatcatgttgagaaatgtattactgatagaaaaaaactcgctttgatttaaccagttgagagcaaattcagagatcttctgttatcatcagtcacttttactcttgcaagcatctaagaactaattagcttttgtctcctaggctcagatagctattatttccttgtctaaagatagaatccgtatctaactaggtttgactttatgcgtggtcttaaaccccatttgggttcctttagagacctccttttctttgtgatactgttatagataaccggaaaatacataccaaaccaatctgaagcaaaccctcacttgtatgtgccaatttggatgcaattggtgtgatagttcacaaaccaaacatcagaagtccggtcatctcagatcggcatacattagtttggtctgtgttacggttctggttgactttgagatcgtgatgctactaatatgagccttgaacatcaccatcagtatcaaatcaacaatttagtcccacatacacatgtgaaggaagatcttgttctataaagatttgcttctggtggtcatgaatcaaagatcttgcataaaaccccacaacgaccaagaatcaaccattaattttcaatatcaacagtaaatcgaataaacattgacaaaaatgcacatatttttggttagttgttggtggttttagctaactaaacaccacgtgacatctatgcatattaagtcccaaacaacgtttagtagaggcggctttaaattccaacataatagggtctctattatcttttttttataattatttaatctctggataatttcattaacaaacaataatttgacttagattgtgaaatactcgaagaccaatttgaaaagttagacaattgacactggaaattgctaaagtcattgtcgtaaaaccgcgaatgtggcttagagcaatttcgtgcccacaaattggttgaatttggtcaattgcaatacattttcctcgaggctgcatactttttcaaactcgcaataaattaattagtggaggaacgaagtttcctcatcgctttgactatttatacgctagtcatgctagatgattatagacttacacataattatttagtatattgtctgaaaaagggtttgtatagtgacatgttttagatgtgatcttcgtattagttgtcccaaatttaataaatttaacgagaaaaatagagcatgtggggagaagaagaagtgggcggtgcgaaatcagaaagtggagagtgcactgaggagagaaagagtcaaacagaaaattaatactcgtttttaatttttctccgacttactatatttggaaactcctaatttacacgctttctcttcgtttacttatcttagggaagattatatataatatgttaattagtttatgtataccttaaccttaagcttaattttggcccccaaaaaaaaacttaagcttaatcgttaactagtggagttatcaaaaagtactcattataaagcgtcgtttagaatttattcatgtttataaattttgtttttaatgtgaatcattaacaaaattttagtttcatttctaatagtttagcttattgattagaagataaaattataaaggtatttacaaaaactacataatagaaattcacatactattttagtgtgaaatatttttaagcaacggttataaatgaaattgatggagtaattgttaatatcacgtttaaggggtttccattgacactctttcataacaaaattaaaaactatataattaagttctcaataatcatgaaaacaaacacttatatatgaatggtatcttctatgttttgaacaccatatgaatggtatctaaactagaaacctttgaaagaaatattgacaagtgtttctccactgtcttcaccaaatcgtggagtcttacacctgttagtgaagttagttatgtatcatcatcggacagaaagggttttaagaccattacaagtaagtaaagtaacacgaggccgaccatatattcggccgattctggttactattctccacaaagttaatatatctctagctagaagactagaagaattatacaaattcagctctactcatacaaaacatgaaacattaactttggtctaatatatcacatttaccgaaataaaattagaaacatatcagatttagattaaactatagtctttataaacactatgtaatagattgtatttgtttagatttttgggggttgaatgcactacgtaataaacttcctttaagtatagtgtcgtatggcagtttgcacacaagcaagcaatctgctgattgacatgtggcatcattctgatcgatgacgaaaatgtttgttttcctacaaagcaatgtatctcaaaaacaaacctccatatatactttatttctcctttgggcaattcggctatcaaaggtaagatagtagttacacgtaagaaatcgcttacaaaacttgagattaccaattcatacattaaaagttgtctttattaaataacttaataatatagtatattttggtggtttacgaatattaatcacctagcaataacgaataagaatcatattttttccacaagagcagtcgtcattaagttctctcctaccaaaatcatcagttgaacagatacttaaaactatcgaatcattagtttaacctaatgaaaaatccgtttaaagaattaattgattaaattataaaccaataaacatcgaaaagtttatttgagtgcaaattgtaggatctgactttggacggttcgagttaaattggcatctgcaatgctctttctttaccaaggcatctttgatcttcactaagactctacctttttatgcttgtttatattttttcatagccttttgcaatttacaaccatccatggagttttatttattttacctttttggtcaagagaacattcacctttgcactttgaatggaccatgtgaccaaaaaaaaaacctacattcggtcataatacataaaaataggtgatttttttccttcttattatagtgatataagctaaagttattccatcgtttaacctaaatttgatttacaaatgtgagaaaaatatcctacttagctagttttggtgttgattacttacctgaattatttttacagttattttagccatattttgttacgtgaaagtatgtgtcttcgagtcaaaaggcaactattggttaactgacacaagaacgaatcttcggttgtagttcccaacatcccaagttacattatatgtataacacacgcccacggtttttcggttacttatttgataccaacaataaaaatggtcaagccatataccaacaataaaaatggtcaagccatacactgacaatcattaagtactactatcataattttcgtttatttcattcactgacaatcaaagttattttcacaaacaattaccatgcagtcaaaccaataaaaagttgagtttatttcattaattttctaaataatcttaaatataataactggccatgaatgaaaattaaaattttttgagtaatctacataagattgtgacaaagacattaaatacacataaataattggttttcattttcaatgagtctggaccgaaagtaacaagtgtattagtgtaacgtcaatattattattaaacaaaaaacaaaccgtgttgtaaaatgactaaagtaaccttaaccgacaacgatagttttaagaccaaaccagtagaactctcctccttctataaatctctgcttctcgttgcctctccaaaaccctctcaaactcaaatcaaccttcttccatttttcaaattacaaacatacacaacaacaacaaaacctcttactcactccaatggctcgccttctctttcgtcttctcgtagaatccaacactccgtctccggcgattgataactccaccgccgcgttgaattctgatctcgtcgtcatcctcgctgctctcctctgcgccttgatttgcgttctcggcttaatcgccgtttctcgatgtgtctggctccgtcgtctcgcagccggaaacagaacagtctccggatctcaaactcaatctcctcaacctccggtggcagcggcgaacaaaggcctgaagaagaaagtccttcaatctctcccgaagcttacgttctcgccagagtcacctgagtcggagaaattcgcagagtgcgcgatctgtctagctgaattctctgccggcgacgagctccgagttttaccgcagtgtggtcacgggttccacgtggcttgcattgacacgtggctaggatctcactcgtcttgcccttcttgccgtcagatcttggttgttgccaggtgtcacaagtgtggaggtttacccggtagctctagctccggacttgaatccgaacccgaaatcgagatccgaatcaagcaaggcgaagatgaccccaactccttcttgccataatcattttagtttcccatttatttattagaaaactctataatttaatgcagatcattttagtgggatagtgtttagtctcttgatgtacatggtttattgtaatttgtaaatgttgtatgaattggaaaatttaacgatttgtgtatttgaaccttttattactttgtgtttatcaaaaacaattgctgaagttacctctgtttcatgaagattgatttttaactttatatgcattatatactatatcattacatcatttatatagtaagtgtctcaataactttacgtttgtttaaattcatgatttttttgtgtgaaacaatacaaataaatacaacgacacgtcgaaacttgatttagaatataatatagtataattttcaggaaatacatgtagtgattaatggacactatccatcgatatcacattataggaaactcaagttagtcaattgttgttttataatcaacaattagtcactagcattgagccattaactactatattaatttggttcataaattatgtatttaattataaatataaactaaactggagtgcacactagtggacattcataatattaaatcatttgaataaatttaaattaatttaaagaaaatggaagcactaaaagactatataatcaggtgattacatgattattataatatagctaattatggtatattccctagtataagggaaatgaaatctggccagtgagtgtgatacaaatggtatgtaatgtgttggctcagttttcatcgtataattttgtaaagcaaatggtcgtgtttcttcaacttctttttttttagtaaaatatcaaccatcgctcgtattttacctctctttatatctatctagttgttaatcataatttaaaatgagttaaaattgaatgtggaaacatcataaaactaataatattataaggattgtataatataattgaaagagtccagatgactgcaacaaattcgctttgtcttgtgttctagcttttgagatttgacctaacaaatagatggcgatatcatgtgtatatatttaaagtataagctctttgtaaaaatatttaaagtataagtgattgttttaattaagaagggaattatagatttctaatagtttagtttgtcaacaattgggtgatttagctagttctatagaacctaattaaaatgaatattaattattcgtttcttaggggagccgttgaattaaatacgacggatggtccacccatcacaagcatttccactacggaatgtgcgtccttgtgcttagtgcggctaaccatattatacatgggatatttataattttaattaatccattttttaaacctacaaaaaattatgaaccattaacctgaagttcaacgagaacttatcaccattaacctaaagtacaaactatagtggcctgttaaagaaaaatatattatattgaacatttatgcatagcaatagttaaaaaatttgggttaaggattaaaaacttcaaacgatacacccaaatcagataacatctcataaggtaattaaatttaacattaccaattttgttaaagttggttctctcaatcgattgatttatggttttggcaaaaaaagagaaaatgagcttcgagagtataagagcatcttcatcagtagtctatcacatagtttcttattaactaaaaaatataaaataataataaagtaggagaaagataggagagaaattgagaatagtttatctacagagaaactttacagtaatgattgagagactatgtgtatatgtgtgtatttataattggacagaagctaaatcataataaaatatcattattttttttttttgagaaacttgaagtatctcaccaatggagatggcatttccattggaaatatctcaatgagatacccaaaaagaaaaaaaaattaaaaaaaaaatggtatgagagaggtgaggaaaagtagaaagaaggagagttaagtttaactattctcatccaattggacatgtgttatcatattattagtttaactattaaataataattaatatatctgttttgattaaaatatatatttttttttttttttgagaaacttttcttatttttactgatggagatggtctaatacccgcatgttgaaaacattttgcaagagtaattgggtttactttaagggcgctgaatacgtacgtgagaggctcgtgtgaggttgctggaggccgtaagaataaagtgtaaaagagtactttttcgtttacttggttataaagttcggtttatgtataaaactataaaactagagcttcacgatcattacaaatgttttatcatttaggatattaaaaatgttaatctgttacgatcatcaaaaaatactgaaattttgaaaactagctagcttgtaagaaatctttcttcaagaaaaagaagtagaaaccagaaagtgaagagagtgctttatgttttgtccaaggactataaattcgcagactaaaatgatgagagttgtaaagtttgccaatgaggctggagattcccatatttattatgttcagcactattttgtgcattactgattgtttctgtttattacgtaaatgattaataccactttttaaaaatgggtgttgcaaaataaacctttgcaaaataaatattacactgtaccattgtatacattgttaattctttcaaacaaagtattagtgtttacacgtcaaacacactttgaaaactacaacattcattttgttttgttaaagtattttctgcatgcaaacgcaatttccaaacaagatttttttggcctgtctacgtatactattcctaaaaacatcttatgaaaaacctaaaaaaaggttttaatatttttatgtgagcgcatatgctaaatataaacatagataaattacacacaaaaccaaaatggcaaaggcaaagaatccatcaaaccctgtagtttatatacttagtgtcgaccttttagcacgactagaaagttccatttctagtggggtggattcgattatttagccttttatatatacagtttcattgatcctttctggtttattaaagtttttttttccgaatatttatagtggtgaagaaaagaaaaaagaatttgactgaggaatgaataaaatagttgggtcttttgttggattctcttaacggcccaagtggccacttcccttcctttgttggattctcttaacggcctcgaggaaaaaaaagttggggaattccgaataatgtttcgggattttttgaacccgacgtgaatcgaacacgcaaccttctgatctggagtcagacgcgctaccattgcgccacgaatccccttgcttatctgttacatttaatattctttataccaaaatacattggttggttgaataaaacattggaatttgctggtccatttccattagcatgagaaatggcatccattgattctctccaattccattctctctgcaatctccaggtaaaaatcgaacccatctcttcttcttcacttacacttataccggtactgctttgcttcctccttgggtgattcatttctgaaatttcgcgttttttttgttgttggttttgataccctagtcgtcgattggaagagccaagctccagaatccttcaagtttggttattttcagacggagacccgtaaatctgaattgggttcaattcgaaactaaaggaagtttcgtgtgtaaagcgattggtgattcctcgactccagatgaagatattcagaacactcaaagtgatgataatgttgttgttgttactgctacgactcagagtgacattccccatgattccgagtattcaatttcgaggtttcgaagtatggttaccacactccctcctgttgtcttcctggtatgtttctctcttatcgcttcaagttttgatttttcctgtaaaaaactgattttgatggatttctccttcactgtgatatcaaattcttcgatggtggaatttagattactcatctattagaggctgcctaagtttgaatatatcctgagttttcttgatagttgattagtgtattgtcctgaataggaaatgttatgtgcttagttttgttaagcactctttctttatatgttcgtttggttttaagggggaatggcgaaagaaaacaagtttagataaagcttctagtggttcttctgtttattgactactattgcacatgcatttggattttcattggtttatttaatatcttctctgttttagatgaagaagtgctcagtgaacagcatttggattggggtctgcatcacggctactgttttggtcgctgcgattagggcttatgtagtcagaaagtcaagagataatcagcgtgctggctctgttgctgatcttgtgagacgtggccagctgaggtctggtgatagaagaggcatgtatgaaactcacactctttatcttctttactattgtcactctgaataacctaaactttcgaattagtgtcactatcaaacacataactggattcatgtaggtggatgtgtgtgtgtttaacttctctaaagctttgatctcaagatgttttttattttctttatcagctccaaatctcttaactacgaggacccattcaacaacccttttgtgaaacttgataaaggaagctcaacggtagagatgtgcgggaaagtttatcggctagctccagtcacacttacagagaaagaacaaactattcatcagaaaagaaggtcaagagcttaccaatggaagcgaccaacgatttttctcaaagaaggggactcgataccacctgatgttgatcccgatacagtcagatggatcccggccaatcatccgtttgccaccacagttagcgatatcgatcaagaccttgcccagaataatgtctaccagaagcaaggtgttcctttccggattcgagctgagcatgaagctatgcagaaaaagcttgaagctttacaaaatgtaagtttttttttatctctgagaactaatatttgtatttcgcgggaatcaaccgaataccgagaaattatgattgatgagtttgtttctaacaggaggagaaattgaacaatctgagtattgacagtcaaaatgccagagatttccagaggccatacaagttctcagcgaagctcgaaggcgagaatatccagaagaattctcaggagaatcatacaggcaattcatcctctgaggaaacgcacaagtcctgagacgtactaatctaattgtaaatacagttttccctcgagagtcatacttgcgttccaagaaactggagattttctttgtagtagatcacacttacctaaatctatgtttttctctatttgctttaccatcagaaccaagtcataaagacaagagaaagctttatccttaaaccttcgtaactatcggtgttggtcaaggaaagagagaaaattgagtacttattagattgattttgacaacgaaacaaaggaaaaaaaaaaaaaaaaaaagaaccaaaaacgatatgaaggtatctgaaaaacaaaacaaaaaggggatgaagagaatctttaggtacacagagcaattgacgaagaagaaagttacaagttatatatccttagaaggagcagaagcttgagcttgagctccaaaggcaaagtagtctgtgataacttccaaaggcatgcctttagtctccgggactttcatgtaaacgaagatccatgagataacgcaaaccgcagcgtaaatgctgaaaacaccaactagtccgatcgagctgaggagaacgggaagtgagtacgtgacaataatgtctccaatccaaaagaccatagcacatatggcgatgcagagaccacggactcttgttgggaagatttcagaacagaggatgtttggaatgggaccgtaacccatcacgaagaagcagaagtagagcacgacacaacctgtggagagtgctgcgttcacgactttgctgatgtggatgagctcgctgatgacaaggacgacaagtgagacaatgagaactgggattgtccagagaagtaatgacctgcaaaatgaaacagagataactttagtatcatgagaaaacaaggaaacatgttaaaatatcttataggttttgatatttaccttcttccggatacatccatgagtctcatggcaacgacaatggctgggagcatgagtaatgttgttaaaccgctgatgaggaatgacgcagagatggaacttagtccgaggctcgaaagaagaatatctacgccagcccgttcgagaatctgaggagtgtagtagagaactccattgatacctgaaaactgcatacaaaataaaactcgagataatcagagaagtgatcaaatgatagatccaagagtactcgtgtctgaacaatcaaaagttttatcttacctgctgcagtatttgaatgccgacaccaacaaccaaggcacgcttaacaccaggttcaagaagagcagaccagagtggtccagaggcagcaattttctccgggggaaccatggcggatccatgaactgatttaggaccaagaacagatctgcttacaagggcagaagcgtgaatgtagctgcctccaccatccggacctccgggaatagagatgatcgagccacggcgagattcagctccatcttctttaagataatacctcttgtattcatcgttttcgtatctatatcccatatgccaaccaccaccaattcccatgctactttcgccgttgccttgcataagcgtactgtgtcgtctcatgcttaaagtgcttccacttgtaggatgtgggatcatatccttgtccatgcttgtggtctggcgcgacattaaggggctacgcaaatcgttgtccgagtcatcatcatcacccgcaccatcatcagtcgcatagtcatcattgtctttgttgtaatggctctctatgtccttttcccaatgagccggtttaccgtgaggcgcatcggcagtagtactgaacatgcttccgaaatgagggaaaatcccactccgagtgtttccgcctgcttctggcatcttctcgtggagactgccaaaaagattgacgagcggatctttaaggatcatgctttggtttgctaagcttccgtggcgagagcgtagcccaagtgagctattttgttctgggacaggtctagcaaggtacgattgattctcgtgggttccataaagccgcatttgtccatcctcatcaacggtttcaagtgtatcatcaccttcatgatcctccaaagttactaagagatcttccattgttttttctcctcctatatctagtccttcaactagtaaagccatctcatctgcatttaatataaaaagaaccgtcaaaagtggattcaggtgatataaccaaaaaagatagcgagaagaaaccttaccggtaacatcttctctgccacataactgttgaagaactcgcttagcctcgtccattcttcctttactaaccagccaacgaggagactcgggcaaataaaacaccgtgagaaacaaataaagaagagaagggatcgagaggacaccgagcatggctctccagctaggggagtcactcagggacatagtgaaaaccatacagtatgacaaaaacattccaccagagccaagaaactgagggagagtatttaactgtcctctgatctccggaggagcggtttcagaaatgtaaacagggacaagtgtaaccgcgagcccggcaccaaacccattaagaagcctagcaaagcacagaacatagacattgggagaccacaacattatcaaaccgcagacgaaatacataactgatgataaaatgagcatggggcgtctgccgagccaatcagatatcggtcctgagcaagtcgtgatgaccgttgcaccgatcaatgacatagcaacgacaagaccttgaacagaggttggtagattcaagtctttgttgatataaaccatagctcctgcaatcaaatccaatacaacatcattgtaacatttttcaaatctcagatgataattgatcaaaacaaaacacaattgcaccaacaagagtgaaaaaagaaacaaaccagcaatggtggcattgtcccatccttgtaagaaattgccgattgtggcggcgagagcaacgagagtcgctcccttcattgctcaacaaactctagaaacaccaccaaaattcaaatcagtcagattcagtgattctccatttgaagtttcaaactttcagtcaaccatgaaacaaagaaaaatctaaatccagatctaaatcttaaccaattcacaaaaatataaaatctgataaacccagaagaatttgctcaattaaaaaccctaaacataaaaatcatcaaacagtaatcaaaaatgcagagtaactaacctataggagggaagaaagaaaaaacagaattgcttttttagtttgatcagttaagaaagctaaagagaataaaaccccaaaaagattgcttcactttctgggaaaatgaaaaaggtctcacctttagtagaattcgccggcaattacgaggaaatgagaaagctttgccttgaaatctctccgatatataaatcagggagaaaaagaggcgttgaaataggggttgatttgatttggactcgttttgaatgaattttgccaagtttagttaaattttattttcggacaggctccggcgatggaatctacaataaggacaaaaagattttgtcttctttattttttggttacaattattgcaacaaaaagtttcgttcagagcaagttcccaagagattctcaccgccgggattagtttttttacctcggagaagtgaaaactcacaacagcaagaaaattggattttacaccaatcagttcttctggcggctaaaaatatgaatgaggtggggagtgatttacgacgattattggtaatgttttcgaaactttatatagaaagttagaaactcataaaagaaaaaaaattgactagttaaaataaattaataaaatctagcttttttattttatcaatttttttcggatggaagtatctggggaaaaattagagatctgaggaaacaatatctgaatattaattaaaaaatcattgtcatgactcgtttatgagtagatttttgggaggataattatttatggggtccgttcattgcaacatggattacgactaacattttggttttttcgtttagataaaaaataatatgaaagtcagatttttcaaatttatattaagagttaagagtggtccggatgtctatcactttcgtgtaaaagttggacctttttagtcattgttttctctaaatttactagaaaaacaaagtttatttatattttgcagagatacaccttccaaaaattgattaaaaagcaacattgatagataattgaaagggtagattttctttataaactaaactattaccaaaaaaaaaagttatattagcaatttcttttacttaaaaatgagggtgcaatagttaaaaccagaaaatgaagaatcgatatcatattttgtggtttctttaataaacaatttacgtgagagaacaaaaaatcatttaaaatggaagaacactccaatatgtgtcataaaatttggcaaatttaatactagtattaatgtgttgacaaaaaaaaatagtatttatgttttactccccaaatactaagaaattatttttaaatacctttctattattattcttgcgattatcattgaaatatcaaactagttaatgttcatttaagatggaagaattggccaagaagatggacaaattaatctgatgttattgatgttaaattaactaacaatttttaattttagttaaaacgagagtttaatcgccgacactaaaaaataaatattcataaacgacaaaactaaatatcataatttatcgttgcttgaaaatttaacttgcatggaataaagaacaacgaacaatattatttaagttggtagaacccgccaagatgcgtcgttaaaaaaatagttaaattgattgtcttgatgttaaactcactaaaatactaaaaagtacaaatatgtaaaaatgagttttttcattcataaaaactaacctaatatttgtcacatttaatttatatttaaataaatcatttttagcaactaatacataaatatgctaaatttatctcaaaaaatattttgtttcaagattatattgttatcttttttaaccagcgtaaatatccagcttttttgtataacgttaaaaacagtatttataacactgtttaaaatctgatcactaatcaaattcttttttagttttttttttctatatcgcgagttggaaaccttatgaaattagtagttgttgagtactactccctctttttcactatactggatgttttagagtttaattttttttcattatataagatgttttacaaattaatgtatttgattttttacgactttttagattatgtagtttttttgtgattggttgaatttttaaaaatttaatattgaattattgttttagaaaaaaaatcttaaactatctgcttttaactcaaatatcctatatattgaaaatgaggatataatatcttatgatatctcaattagcagaagggaccaaaaagaaacagcaatgaaggtgaaaaacattaggaccggattagtgtggaacatgcaaatacagaggatccacgttataaatcaccgtcgtcgcaggttaataacgtgttcattgttatttttccgtaatcttatttgcttactcatttcatttttcgaaagtcagtatatgtcacacactttgaatcatagattggtgattggtggggataaaaatatcgtgcgaatatcttacaggaattcacatgtaatcatgtggcttaataacctcagctataaacataaaacacacacacacacaatagtggatctactataaatttgcggctaaaaaatattatagattttggaaggaaattacaaagattactatacaataataacaataaaactactatttaaaacaaaaattaaaaattaagagacagatggggtttgatgcaataggagacgaacatggcgtcaatgagagggcatgtgatttataatattagtgctttgtcactttctcacgtacctttttatgccctaccaattacttctcctctactagtattttttatattaattacaacacaatcaattttagaaaaatgcaacattgatagcatatacgtatagttttctaattctgtgacaagttgatgattttcttttctcagcacaaggctatttgagaatatataaaaatatctaacgtcctcttcatatttattaacgctggaatgagattttatgtgaaaaaagaaaactttggatagatattacatatgtacgagtacgacctagaaaaatatgacaatggtctttttcttgatagagttcgtgctcccaaatcatttgagcatttccgaccacgtggctccacctcaaacggatcttatgatatgttttattatcattttattttcattcttatatattttgttgattttttccctgcataagaaataacaatcatttatttctttttgtacaagcagtcaagtagatgtcctgtaaagttagaaccagtgagttttcaactgtaactttaacatgattcatgttttaaatgaatccactttatgaaaaatatggtgttaatttagatcatacttcgtagtggttggtgggtcatcattataaaaatcaagtttttacgtattaggttcttaaattttatatatcttattcaacaattagctgattaaaaactaagtaaaacgaagatccttatcctcctgacattgttatcagaaatcttggtggattgacaggtcaaactttgttctttacagaataaatatcttataaaaaaaaacagaaatatacttcaccgtaatctcatgttttgtgaattttatattgtctcattaagaattatgtttaaacaatttagaacagtgaacaaaagaagagctaattataatcaactaaacttcaacattcattcataccataaaaggttagtgattatgggccgcaaatccatgatttgtatattgttcaattaagattggtgatcaaaacatttttcatcagttaattacatagttggcccacttttgggctttcttattgttgaggttggcattttatcattgaggccttccttaaatgattacctctgaccgagacagaggtttctagttctgcacataattaaacaaaccatataccgcagggccggctcagaataataaaggacctagagctggaaaaaaaaattagttctcatttttgtgttttgttatatatcaaaatttttggaccctaactataatagatttacttttaaaaaaaaagaaattttgggtagaccctgtgcctcagctcctccagcacatgtgtaaagccggcctgcatatacgattagtacttggagtcaaagtaacctcatggaaagacaaaactaagcttaaagacacagactttacacaagttacagattcagactactttactctaaagcaaaaagagcgacctctatcgagtctccagcctatataaacaggctcttctcttccatttcctcttatcaagtgacaaaagaaaaacaaacgtactcaaatggctctttcttcaccttcaagaatcctctgttttgctcttgccttatccgctgcttctctctccctctctttcgcttcttcccacgattactccatcgttggatactcccccgaggatttggaatctcatgacaaactcatagaactcttcgaaaactggatctcaaattttgagaaagcttatgaaaccgttgaagagaagtttcttaggttcgaagttttcaaggataatctaaagcacatcgatgagactaacaagaaagggaaaagctactggctcgggctcaacgagtttgcggatttgagccatgaggagttcaagaaaatgtatttagggctcaagactgatatagtgagacgcgatgaagaaagatcttacgcagagttcgcttacagggacgtcgaagctgttcctaagtctgttgactggagaaagaaaggagctgtggcggaagttaagaaccagggctcttgtggtaatatcaaatcttggtctctgatctgttaatggaagttttgactcttaactaaaccatttaactttaaaaaacttgtttcgcaggaagttgttgggcgttttcgacagtagcagctgtcgaaggtataaacaagattgtgacaggaaacttgacaacattgtcagaacaagaactcatagactgtgacacgacctacaacaatggctgcaacggtggtctcatggactatgcctttgagtacattgttaagaacggaggtctacgcaaggaagaagattatccttactctatggaagaaggaacttgcgagatgcaaaaggtcccattctaatatcaactcttggtctctgatgtgttaatgaaaggtggtcccattctaattatctctgttttgaaaacaggatgaatctgaaacagtaaccattaatggacaccaagacgtacctactaatgatgagaagagtctcttgaaggcattggctcatcagcctctcagtgtcgccattgatgcatctggtagagagttccagttctatagcggcgtaagtacattataaacctataaataaagaaaatggttgttagttaattgctcttgttgatgttgaatcattttgtatttggtatatgaagggcgtgtttgatgggcggtgcggggttgatcttgaccacggtgtggctgcggttgggtatggatcaagcaagggttcagattacatcattgtgaagaattc

SEQ ID NO: 1141 - DNA, 55707 bp, Arabidopsis thaliana
ccatttatgcggctgtgtatgtgctttgacgtggcggcggaaggtgagcaacgaggaagatctaagaaagtgacaaggaagagcagttccatccactcaataaaatcttctccggctaattcttccggttgtagttcgatggtagaggaagacagagatgagaagattaaagatgttatcctctattgtaagatgaattcaccaattaatttccgctgaattttacacacaatttcatatatttttttatttttttttgtcacttattcattcactcataatgaatttgtagattcttctaaactgttgttcattttccccaaaagattccgcctataattggttactacgtttagtaccattcttgtttaagtggctcattttaactatatatctcaaatctcgacttgatcccggtttggaagtctgaatttctaggtttactaaaaaaatactagtaatgattaatataaatcacgtcatcttgtataaattggattacacagtttcagtttttagttgggttcgaatatagctttcaatttaatataagttttgtctgagtatataattaaaagataggtaatgatctatattttcttgtaagaaaattcattttagccaaaaaataaaaactccattttgattttatacgatattttatttttgtttcagttggcagtgttaagactgattcgtactatctagaaccagacttcgcaactatacttttgcgatgtaatatagtattgttctttataatttaccgcgtgagacctttaaaggttatacgcgttcactcgcatccgaagctaattgatagcaaataatgtcgctaatcgttgttcagcaaaaattataattataggctaatgtaccaaaaaaatatacataaatggaagaatctagggagactttgaaagaccaatcactttcgagcaataagtaagaaaatagatggatttcatgtcatttggagattcgagtttgaccaaaaaatagactcaaaaccaaacacaaaagactttttctcccctcatgtattactgttcccgcgtccagcaacatcgcaagtaagccctttttcagattatcatgatttaaatttgtactatgttaatctcccaaacacaaaagattattatcgaacgcttcaagactttgtagtgatgttttgattaattttgttatgtagcgattcagctaactgtaaaaaaaagctctgtttctctgagactacaaaacgtgaacccacgcgcaagaatggcgcattgagtgtgtgtcgtgagacaaaaacctctggtctctggacaaagaagccatgatattgagcttttttcgtataaatgaaaaattgagttggtcgagagtacgtgggccttatcactattatgaaatttatgacaatataacgtattttcgtggccgtagcacaattatatttctgacattttcacgtcacatagttttaaatttttttaataaccgtgatatatacccttgaacagaaaaaatcagttacaaagtggacattcctgaccactaaaactactaaatgtcagacatgtttatagtatttcaataactcgaaattcattttagattttaaaaaggccaatagatatcagttaatattgaaaacatattattaaacttctgaccacatctagttttgtgtttttattgaataaatattgtttgacaaaggcaaaatttgtgttgattatggtccacagacacagggtcatgtctggatcagaagaaccgtgttggagctctctacaaaatcatgccaagtcagctaccaattatctgacgtggcacttatgacctcttctacgcttttgacttcctctagactggaaatattcaacctttaagtccattaagatgcaaacaaaaataagtatccgatttttttttttttttcgtaatttatgtctctatcttataaacagtaacttcacctctaaatttttttttattaaagaaaaaaatacaacaacgtgagcaccacctagatgtatctatctcatcaaattatattaaccacaaacgagaataaattgaggtacgaaaactaaataataaaagttggaagtcgtagttaatagcgagtcttttctcacgactagaaaacttttaatcttgggtaaaccaaaccaaatcttggtaagaaacatactagaagaaacatacataaaaagatataataatcaatacaaacaaacaagtagccaaagtttaccactttttaagtaggtttactctccttccttcatttgacttttctctatccttctttaatacacacaaatcatatatatacaagtactcatgtaccctgccttttcccctaatcatcacataatcattgttcttcactaaattcatcatcacgcacacacatacacatatactattcatctcattaagtggattctatggataatagatcgccaagatcaagaggaatcttgggtccgagaccaataccattgaaagtccgtggagattcgcacaagatcatcaagaagccaccactagcgccgccacacccgcaaccacaaccaccacaaacccatcagcaagaaccgtcacaatcgcggccgccacctggtcccgtgattatatacacagtatctcccaggattatccatacacaccctaataacttcatgacattggtccaacgtctcacaggtaaaacctccacctccacaacatcctcctcctattcttcatctacgtcagcaccaaaagacgcgtcaacaatggttgatacatctcatgggttgatatctccggcggctcggtttgctgttacagagaaggctaatatctcaaacgaactagggacatttgttggaggcgaagggactatggatcaatattatcattatcatcatcatcatcatcatcaagaacaacaacatcaaaatcaagggttcgagcggccaagtttccaccatgctgggattttatcgccgggacctaattctctgccgtcggtatcaccggacttcttttccactattggaccaaccgatccacaaggtttttcgtcgttctttaatgactttaactctatccttcagagtagtccatcgaagattcagtctccttcttctatggaccttttcaacaatttctttgattcttgattcagttattatatctaggtgaactaatttacgagtgttaggaaaaaaaagaggatatgttttacgttttttcatcatttttttggagacactccgatgcagttagagggtttctacttatgcatttcgtgatgattgcgtcatttgtttacatcaatttggcaatttgatgatatgtgtattcttgtttggtgggcttcccacatatactttaaagtttatgttcaatgaatcttgtccctccttaactgctatgtgctcatcaacttatccaatagtgggcattagattaattctatttgtataatcttctaagttctaacttttgggtttgtaggtaaattggtttttgttagtatattaatattcttgaacctactatgcgtgtgatttgaaatccaaaaatagatcgattaaatcattcagtggactaaatgaaagtagtttcacatgtgtaattgacttttgtcgccaaaaaaagaaacaattcatgagagaaaatgaagagcttaactactgcttaaggacaaaacagtgacggtgagattaatatggaaaatactatcaaggccaataacgcattgcaagagaggtaacttatgtgctatatccttgagctttaaacagcagaagatgcaaagttattttgagtttgtctaccaatataataaacgattaccggcactttttaaggattttatggcctctttggcaccacttgattcaattagcagattgctttgttgctgatgttacaacttcctgaactttcttggccgacatcttctggagttctgttgacatctttgagtttccctcttaatatagctaacaatacgagtaagactaatgaacctttgaatcaagggaagtgagaaccatttcatagtacccgtacctttgtagcattgcttgtaacttcacggtttctttattcaacggtttataagtcttactcatattatcggctatattatggagaaagactgctctgatcaatccccttttatagatagaaacccctagataaaatagggaaacatatgatcccatcactccacaaaatcccactaatatcgactaataaatcttctatagaaataaagattctaatatatttatcaaatcctagtatatattctactaatatcttttcaagaaaattctaatcactatgctgatattccaataacatatattatcacaagattcgctaaaatattcttctcatgttaaattctcatcgctttctatgaatttgatataaccggacttctttctatcaaattaatcgttgatttttggttatactgttatattcttaaataatttatcaaaatagatattgatgtattttaatatattgacgttttctaatccaaaagttaacgatcaagagaatatggtccttttactttctagaatatacaactgaatctcaaagttcacaattgatcaggaagaaaaagaagtaaagaacaaaaaagtttgggcactaaaactgtatatgtgccagaacagagatatcaacacgttcttagctacgtgagcatagaaaaaatcaaagtttgggataatgtttttctttttgtgaaattatttcctggtttttactcaagaatcaagatcacctgataatgcctcaaattgatcccttaacaccagtgtcgatgttgagtttgatgttgaaggagtgaccaggagaggcgttgttgttggtgtagtaggcgtatttaattctgagacaagcgactccaaaacacgtcttacatcttagatgtgaggcctatacatagcatctccatccaagcatttcatcgattaatttcttcagtcttggattcgtctcgcttggaagttcaggcctttgtccctaatgaacacatgaccacaatttagtcaattatgtcacagtcagagttattttaaggatggagaaaagtcttaccccgataacacctaaggcttgtgtgtctagccgttaatctatccaaagtctcatatgaaaccttaaccgttattatagtaccaagaaaaattctgaaactgtaaacatctgatctgtcgcctatgttattcattgcctatataatacaatgtgtgttagagtctataagtgttggataaaagatacaataaacaacataaaaacgattttaagacttacttctggtagtgctgtaaatttgcacaaccttctcattttgggagtgttcatctccgatgtttgaaaagcatgaatgagagcaggcaattggggaatgatatctttccaaccccaagctatgtacatactagtaggtgacatgtatgtaaattttcttaaatttttacttacaacaaatatttatgtaaactcactacaaatttgttgaaaatgagttatcttaaatagttaaacttaaaaagtcttttttttttgtaagttaaactcattttctgccagtttttaagttaaacttattttctaccaaatttttactgagtttacataaatattagtccagacaaaattcatggcctcacttagtcgttacttgttaaattggcgccagaagaaataccgggtttataaacaaaacgggtcgggtcactcagattcggatcattcacttccgttgtcgaaagagaatgagtcagaaaactcgatgaaattgaaattgagcgaattagaattttgatctgaacagaggaacgagcaagttgctgggtagaatttttttgttcgattgggaccaagtagaactgcaatcgaatgccttattctgtaaattaggaatttttatttactaattttcgaattgtgatctctcgatttgttgtttccgtcgccgtcaatggcggatgagtactggaaccagcagagacagtatcagcttccaatttcgtcgaaccctcacgttcttcctcccaaacgtccccgttccgacttccgtaagctaaaagtttcttctttttttccgctctgtgtgtaattttcattattagacctgaaaggagctgtctttacacttggaatcaactctcaatgtagctcttatgttagtgggcattgttgtgatgatagttatatagaataatgaacagatttttcatctgttataggtctaaattttgcctctttgccatgaaaacaaaaccttttcttattttacttaaaaagatgagctatatgggagctaccattaacatatgattctcttcttaggtttcattttgtatggctcttattcagaacttcttttagtatatatgtatgtcttgaaaattgctctgtactattgtttataggagtcttgatccactttgttcaaattatgtttgcggttgaacggttctgtaaagataagtgtatgtatcccaccacattgatgtattagagtagtatagagagcttgttacttgtgtagggtagttttttacattctatcttgtatatgaacatgtacatgtacattcatattctaagttaatgagaaaataaaccttcatttcgtctctttctaaatatgatgctatgttaaagaggttttgagtgtttgaccatcattgctggaacagattatctatgctttgtagttgcagattatgtatcttgtgtacttcttttttgtgtgtcatgaggtccacaggtttatatattgccgtacctatcgatgtgtgagtttgaattgtcttatttttctctaattatatatatacaagtacttcccctaatcatcacataatcattgttcttcactaaattcatcatcacacatacacatatacatatactattcatctcataaagtggattctatggataatagatcgccaagatcaagaggaaacatgggtccgaaaccaacaccactgaaagtccgtggagattcgcacaagattatcaagaagccaccactagcgccgccacacccgcaaccacaaccaccacaaacccatcagcaagaaccgtcgcaatctcggcccccacctggtcccgtgaacatatacacagtaactcccagaattatccatacacaccctaataacttcatgacattggtccaacgtctcacaggtcaaacctctacctccacaacatcatcctcctcctcttcatccacgtcggaaccaaaagacacgtcaacaatggttgatacatctcatgggttgatatctccggcggctcggtttgctgttacagagaaggctaatatctcaaacgaactagggacatttgttggaggcgaagggactatggatcaatattatcatcatcatcatcaagaacaaccacatcaaaatcgagggttcgagcggccaagttttcaccatgctgggattttatcgccgggaccttattctctgccgtcggtatcaccggacttcttttccactattggaccaaccgatccacaaggtttttcgtcgttctttaatgactttaactctatccttcagagtagtccatcgaagattcagtctccttcttctatggaccttttcaacaatttctttgattcttgattcagttattatatctaggtgaaccaatttacgagtgttaggaaaaaagagaggatatgttttacgttttttcatcatttttttggagacactccgatgcagttagagggtttctacttatgcatttcgtgatgattgcgtcatttgtttacatcaatttggcaatttgatgatatgtgtattcttgtttggtgggcttcccacatatactttaaagtttatgttcaatgaatcttgtccctccttaactgctatgtgctcatcacatgaatctaaagttgtgtgtgtgagtttgaattgtcttatttgtccctccttcatttcgtctcttactaaatatgatgctacgttaaagaggtttgagtgtttgaccatcaatgctggaacagattatcactgatttatagttgcagattatgtatcttgtgtacttctttttcgtgtgtcatgaggtccactggtttatatattgccatacctatcaatgtgtgattttgaattgtcttatttttctctttgtagaaggtacaccatatttgattccttcaggtgatatgcacagttatttatcacaggatgaggatcgaggtatcccccattcagtaaaggatactagaagtattggatcagcttatgaccgctacctgcagagtatggtataatccttattcacgtggtctcttcttcgttttttttctcttctttcttcagtgtactgaaaccttttccctgttttgtagcaaacgttttttgtgccatctgaagaagctggtccatttaatggtgttggcatggtacgacaaggaggttccaacatgatgcctggtccgtccatgggtgagctcatggctgggtgtggtgggagtttgccttcagatttcaggccaaatggtcgggatatgggttttggtcagctggattcagttggtaggccaggccgggaaccacatcctctacctccagatgtatccaacactctgtatgttgaaggacttccttctaattgctcaagaagggaagtatcccgtatcctacctaatgactcattacaattattaatttcctcacttaagaatgtttgagctattcattgtccttaactgaagtctagatatatttcggccttttgtgggatatagagaagtaagacttgtgacccaagattcaaaacacgtaagattcactggttccaatttgaagaattgttgaaaatgaaaacactcagtcccataatttcattaatattgactttctaaggggttttatgcagaggagtggagatcctactgttctgtgttttgttgattttgaaaactctgcctgtgcagcaactgctctgagcgctttgcaaggtaaccgagattctctctactttggggattgctaatatttgttccaacacatattgagtttgttttgcattggtttcttgatattactatcttcatttcagttataaacactatgctagaacatatactgtatcaaagtttgattttgtccgatgcaagccaacactcgtccgctggtttaactgatacaactttatatttgacagactatcgaatggatgaagacgaacccgattccaagattttgcggctccaatttttcagaaacccaggtccaagaccaggacagcgtggaggaagaaggtgatcagtaggtgacatttgaggcccatcgaccaaatggtgacttattgtttcgtgcttccatgttccctcctgcaactagattctacatgaacccaaatacacttgatcatatgctcaaatccttaggagtagtttcactcaaagaaacagagatgtatggagagacaccacggagatgaagtgattcgaacctaaagtctttctctttcacttaatttttctttccatctcgtggatagatttagtgcatcatcttattactgttatctatcaaagacagaaatttttgtcacaatcttttattttctatgtgggaattatacggaaatgggacttcaatagtgtactcagggatcagtacgtagttgtatttgttcatttatatttttgggacagaatccaaaacagtggctcatataatccctagtgtgaggatttgcctatcgtaagtgtatattgttagcaattaaaaaccatgagtgcttttactttcaaagaaaagttacaatcttctagagcttgtagttgctttagcttcctcgtaatatgatacttttaaaaaagttagaactttatatcaaaaagcaaatcaatgtagaaaatttacaaaaagataagaaatcagtgacactacaaatttatttggttgaccaaacatgtcaacactgatgggatcggcgatgaagagaggtgagtatattcgatatccaaagagagcagatgctttttttcgcgtccgactttagatttttttgtttttgttttggcttttatgtgcatgcataattcaagaaacttcatgcttctggccacgttaaataagttagtaggcaatgtacaaatcaatcttttcctcttttgttttatccatcttttacgaagcagtagattgcgacttttgagacaagatgtaattttgtaataaactgatcatattgcacatgtctttgtgaattattgaaattgggtaaagccgtgaagcctttaacaaaacaaaacaaaaacaacagggtaaaaaaaagtacgtcctctataacgtcaacaaaaagtacgtcccctatctttttttctctttacgtcccctatctagaatagctatagaaaacaataatacgttactaattcatgtaagtttgtatttatacagatggaaataacattcaagagagagttatgatgaagaggaatagacgatgatgagaatttgaacccaaaaaagaagagaatgatgagaatagtaaatggtgaatcagaagtaaccttttgtcctatgtcaattaaatggtattcatgaatcgctgacgtactcgatcagactcgtatacacacatattacatatatatactgcaaaaaattgaaataaaatgaaatgaatagttaaatacattttgccccaacaaggtattgctttttagccactggtttggaaactaaaatagtgttaatcaattgagaggtggctttaaataattaatttactactatgttaaataattgagaggtggctttaaataattgattccttacaatgataataatttaatgacttatttaaatacagcattattttgaagatattcttggctcaaacaagactaatgtttaggagaccgatcgggttatgaatcatgattgaggaaatagagacaagttgttaaacaacaattagattagtacattttatacaatattgattcaagtggatctgaaagtctctgttctacattacacctaattaaaaaaaaacactatatttttttaagtacgattgtagatataaaatcaatcacagattagcgtgattccaagagatcttacactggaaaatatcctcttaactactttcttcactgtgtttgtttggacactcttgtattttagaactctcctggaaacaatgacatctacatttgtcatattgtgaaatttcatattttctaaattaattcgtagtagctggtttatcaattcaccgttacatactatgaattaatttgttatagcactatgataaataattaaaggagagtggtcatttacgaagaacaagcagttatgaaatacgtatagtagtatttaatagatttaataataggagtggtcatacgtattagtagtctttttttttttgatcaaatacgtataagtagctattataccactgttatagatattttctgctacgacgattgacgaaatgatgtttttaccccagcattttctgacgcccacaggtcacatgcagttcattcacactgtatcggacctgacttctttactagcaaaagacaaatctagctgaaattataaaaagtaaatatttgttatacttcgttgtctctttctttagtatctactagtaatatttttattttattgaaacatatgaatagcgaacaaaatttgtggtcaaatggtgataatcgtggacacagtgacatttctttagctcctactgtgaattattgcaagaaaagtagacgatggaccttggtgccgacgtgccgccgtgggttttggagctagctggggaagtatcaagtatgtttgttgatgtaagatttctcgtatgtgagggtttagtggaaacagacgtgtcttgaatcaagggagcctatagaatgttggtttagtccggttatgggaagtttgttagatttgatgacctgaattacttgtttttttgttggacttgttttacaagtacagtagttcggatcgatgagtattattacttattactttattagtatataaaggatgttagtatattaaatttctcattgactaggttttcatgaatatctttatcgtgatcaaaattaatttctacctcttttccattttcataataaatctgttttcggataattcttattaatcatttctaaaatagtggcgtttgaatttcaacattttttttttggaaatatatagagtaaataaataatgtaaacaaattaacataattataataacaagttatttttgtacggatgaatatacatagtatttttatcttgtacacatgattttttttgggataaaaacacacttgaaatttcacatgggagatatttgaacgtacgtctatatatataagtttttatcgtaataggagaagtagtgaaaacttaaatttaaggatatgtcggcagaatatttcgaagatattttctacttcttatagaattcttactaaattactacagtattaaccagtgacttttccaagtgtacatatgtcactaaatcctccatggaataagagaaaagagctaattatgttataaaataataatcattttgtatgttgatgtcaaaatatttatatcttttcaaattaaaaaatttcacatcacataaaatctaactagaaaaaaagaaaacgaagacgtatatatcagccaagccgcctgctggtcccataaatcaactataaaatcaacaaacgtttttttttgttgaagaataaaatcaacaaacttctcctaacgctttccataaagacggacaaaataataatccagatattaccgtgagatagtttgtcggtataatgaatttaagaaattgtgaaaaaattaagtcgtacaatattggttatagagggagtgtttttctgtttttcttttttctttatttttttttttttttggttttaggcttttagcagtagatttccttcttatgtttttgttgtaaaaagaataaaagagttcaacaaattaaaattaggagatgattagtgtttttgaatgggattcttcttataagtcgtgaattatttttagttgcgaattattttgatcatattattttttatagcgaaaacgtccacaaaaggctaatttaaaatctaggattctagattagttcttaaaagaaatctttttgttcaaacaagtttggtagtctcaatttaattcccacatggaagttcgaatctaacgattattggtaacatatgataggtccgtaatttcaaaaatttctgttaaagcaaaatatatattataattctgtagctctgtcccagactcccagtaattcaaatatacagtatataactcaaactccatctacaaagttttaagataaattattgaaaattttcaaaattcctaaaaagtaaatatataaacctcattattattcttcttatcttattagtatagatgctaattatttatttagcaaaaatcttaacacttcaatatatattggaattctgttaattaaaattttataaactttatttttttaccaatcatatatatttttttccgctaccaatcatattcttaaaaaaagttgtaaatccatatgaaattacagtcgaactaatcgtctgtaatagacacatattgattatagactgcatattgggacacattcggcgacccgacaaaactgtatcttacgacaaataacgtttatgtacgtgtttccaggaaatagtcacaaatatctttattattgtctagattgattatcgacgtgtagtctttctttttcatatcatctgaagtgatgagctatttttttaattttatgctgaatatttttatatagcaaaattacacgtagctagtagcttagggatcgaatatgtttagaaaaatgtatcgaacaaggaggccatgttgcttatgactcattgatctatcatgcagttacaatctaatatcgcatatttattatatacaagtctttcttttgtcgtcaatcgagtctattagactgaatatatcaatttatcaaaaaaaacaaaggtatggtaagttagtgatgatcatttcatgaattcatatactcttttttatcattctatgtaaaaaatcattgaccacacaaaaaagatgaaagttttgtagatctcgaaaactagtttagaatttgactaacgttctatttggaattctgctcgaaaagttaatttgtgtttaagaaatgctagtattcaaactacaaaggataactttttttagacatattttttttctgtttgaaaaatcatatagcagaagaattgttactatgagattaatatataacgatagatctaagaaaaataatttttttaaaaatatattcttagaaagtatctaacacgtcaaagagtggtcaaataataccccctctatatatttttcctttttgattatcacgaggttctaatctataccgtaattaatccgtatattcgtgaagataaaagttaaaaccatgcatgtaatttaacattctaaatgaaagcaaacaccaattatgtatatttctaatatatttaaaataataagcgcataaaaatctattcaatatcgtaaaatctttattggtcttatggaattgttatctagtcaaactcaaatgtataccaatatttactttaaggctatcatctttcgaagtggatcagatatgagctatattttactaaaggaatctaaatatctataattctgtaattattatcatcaaaggtaactattgtcgtgttactttattacaaatgaccaaatcggtatgacggtgattattcttgcaatttgttgacgtctcaccaacaaagtcagctttcaagaatgtgttaaaaaattatgcgaagttgttaatttgtctaagtcttaatccagctggttacttatccagttcgatgaaaatgaataaaattcaattatcgaaaatctatcttgactcttgaccaagcttcttttattgatttatttgtttattttgatagaagatgaagatgtacaatagtctataattgaaatgaagaatccagtgcaccgaaaaagaaaacaaaaaacaaataatgaacatttatcatccttatattcagtcagaaaagtccggtcgtgataattcatctaccttgttaattagttaaatcatattaacgttttcttatctcttgataattgacagcgtatgtaattaaaaaagaataatagagaggacaagaaacgtgttctaaggttaaacaaagaaaatgtgaggcaaaacaccaaatcgaagatcgaacaatcactgtcacgttggcagtgtcacctttaggagcggtattcggatgtatgacggaccaccttctctcttttgttccttccacttctaactcggccgccgtaagtcaacgcgttcatatactctttcttttttaaaaagtattctccgtaaacaaaaccctattttatttggagaaaatgtattgactagaaaattaaaaattacatatataagtgtcttttgttgaagaagaaaaatataatcgactataaaaaaaatgaagtaaatgcaaagtttcgatgaacatgttacttaattggggtttatataggtttattattagtcgatctaggttcactagatgaaaaacaatattatccggaactgaatcttctaggtaataactcaaaactatattatagagttttatgctcgataataaatttgctgtatctaatatgcattaactgcaataatgttgggatagagcatttagattaaagatgaatattttacattgaattgataagttctgtaatgaatattggatttgattacatttgtaatgaacgagtaaaagaatggatgtggtaagcatctttgaccagtacgtaggaagtaggtgagatatcgaaaataagttgtttagctatatttagctgtttctgattattgatctatatatattcacatctctatctatgaaaatatctgtggttggtccattacattgccgagaatcacttatgcattaggcagatcatgctcaaacttaagattacaaaactggaaaaaagaaagaaagaaagaatttgaacataacttttatttggttctcaaaatgaatattgcaaatgctttttctaaaagtgtcaaaggcaatgttattcgtttcccattattcataaggacttgtataaggagccaagaagaaagtatcatcggagaaaaaaggatgtatgtactttaacacaaaatgaaaagatgcatgtaaccaaaaatagaaagataaaagcggactaaaatttagtaactttgttaagtaaaatataagataaataaattccaaattaataatttggaccatgttatgacattacattcgctggttatagttcgacttacacatattaatggatcaaatatcgacaaacatctaatctataaccacaaacctatatacggctgtgtacataatttctgatatggttttgttatttctaaatttgaaagaaaaagtaaagtattaatcttgtgtgtttagagtcatgttttacatttaacgtagtcagaaatgattttctcatgtttccccttttaacttagaggccatatatatcttctttaccggaaaaagaaaaactcaagaggccatcaacatattttctcttacaacgttctacaattacaattactactttcttagcttttgggacattgtattattgttctaaagtgaattttcacacacaaaaaaaagtgagtattatcaaaagggacataacaaaaatcgcgagatttagaaaacatacgttagatctaacgttatattttgaaaaatcacgagattcgatacgttgttcgaacatggagaacatgtcaatcatcgatggctgaagaaaaaagtttaataatgagagtcggagagaccaacaaacatcacttctttctatatactaatatttatatatgtttggtgtacataattgcatgtactttttacatgacgtaagttaccattttacaacgagtgtgaaaatagtgaaactgaaaaagctatttaaagggtgtgaagggaaggcactaaatcacaaaccaaaaacaaaacaaccaatggggtctccaatggcctctttagtggcaactttgcttgtcttaacaatctctctcacctttgtatctcaatcaaccgctaactatttctattcttctcctccaccaccggttaaacattacactcctccggttaaacactactctcctccaccggtataccactccccaccaccacctaagaagcactacgaatacaaatctccacctccaccggttaagcactactcacctcctccggtttaccattccccacccccaccaaagaaacactacgtgtacaaatctcctcctcctccggtcaagcactactctcccccaccggtttatcactccccaccaccaccaaagaagcactacgtttacaaatctccccctcctccggttaagcactactctcctcctccggtttaccactctccaccaccacccaagaagcactacgtgtacaaatctccccctcctccagtcaagcactactctcccccaccggtttaccactcaccaccaccaccaaagaaacattacgtatacaagtctcctcctcctccggttaagcactactctccccctccggtttaccactcaccaccaccaccaaaaaaacattacgtttacaagtctcctcctcctccggttaagcactactctccccctccggtttaccattccccacccccacctaaaaagcattacgtctacaaatctccaccaccaccggtgaagcactactcacctcctccggtttaccattccccaccacccccaaagaaacactacgtgtacaaatctcctcctcctccggttaagcactactctcctcctccggtttaccattccccaccaccaccaaagaaacactacgtgtacaaatctcctcctcctccagttaagcactactctcctcctccggtttaccattccccacccccaccaaagaaacactacgtgtacaaatctccaccaccaccggtgaagcactactctccccctccagtttaccattccccaccaccaccaaagaaacattacgtatacaagtcccctcctcctccggttaagcactactctccccctccagtctaccattccccaccaccaccaaagaaacattacgtatacaagtcccctcctcctccggttaagcactactctcctcctccggtttaccactctccaccaccaccaaaggaaaagtacgtgtacaaatcacctcctcctcctccagtacaccactactctccaccacaccatccttacctctacaaatctcctcctcctccataccactattagatatctctatcacggtaattactctctcaatacttacatctacacaccttgttaactcaataattaaaagcctatgttgatgcatgcatgtcaataattataatgtatatttaatatacttgcaggagaacacgatgtacacaagaagacaaagacaagacgaaaccagtactggtgattgtaataagagaaacaaaagatgaaagagagaatccaagcagagaaagctttctcatcattttcaaagtattgtttgcgttttattgtaataaatttgaaacttgtgtgtgttgatcaatcaatggttcatgcatgcaatcaatagtcatatatctatgtttgtaaaattttaattacgtcttgtttctttctgatttttttcatgtgcaagtttgctttgtcccaattaataaaggagagttcttaataaaaagaagttaacaataataattctctgaatgccccatttaaataaaaaaaatacatgcagcatgcactccaatactaattcttcttctgggtccagttttaagaaatcagccactatatattttcgacaaacactatttgaagtttacatgaaacaaacagtgtttctcgtacatattagctagagagtattgatagtgtatggaactttagtgaatctcagcggtgaagaggaacatgtcaacactaacccgtctaagaatttagtacaaacttgaactggaacattagtctataatttaacctttgaaaaaataaagattggcctggggtaccaaataacaaaattagtccttttttttcaaaacgcgtagtttaatttttaaccaaatggaatatatttagaaaaacgtcagattattggtccaggaaaataatttaggaaaaaagttagaagaaaagtattacagacaaaactaaatcccacatactcttagtctaatcagaaaggttaagttgttagactagtaacagaaatggacccttaccttaacgaaattatcctttcatgagagttatattaatgcatatcactatcaagtcaactcaatttagcatctagttttctttgtaacttctgtcacaaattcaaaatagtataaaattccaatttttaaattaaaaaaaaaagtcaactcgacttttccattttacttttcttcttttgcttctgtaatgtgttattttcttccgtttgtttcttctatttgttttatttttcttggaaattttctaataaggtgacataatttttcattctctctactagagtctcaactctcgaccacttgataacctaatttttgtcagcttcgtcttactttcttttcactgttttcgcatctctttcctttttgttcatgtatctatagtttcaagtcttaattaattaagtcaataatagaaattaaaattactcttcttttttttaatatagtcattgtgatgatattgatatgtgccattttaagtcttatttttagtttggtttattttattttttagtcttatttttagtgtgccattttaatatacctcttatcccgacagtaaaatatatattattttgatggttactaatcataaaaagttaaaaatagattaatatatacggtatcaatattaatatcactttgctattttttacagacaaaaatcatatggtagggattagagatggcttctattactattagaatatagcatagcttctacttcaggtgaaaaataagaggtgtgtgtgactgcctaaaaaactactaacaatcgacgatgaatgatctcatggtccttgaaaggttgggctcaaaagtggaaactcaaaggcccattaaaactcaactttgtttgagccttttactaaccgacaacgttgtgacttgtgaccttttttcctcaggtaaaaagtaaatagtatattactaatttatctataaatttactctcttataaggtaaaccctagaaacaaaacttgagagcagcgacaagccgacaatggcggaaagtacgagcctatcagacgcactcgattacgattcaccctattatctcgagaaagataaacatctgtaccaacaacgctccactattatactcagccaagccgaagacaacttcgctatctggaaactttctttcaaacatctacttcgaatcacgaacaaattcgcgttcgtcgacggtaaacttgagaagccagacgcttcctcgccgctttataatcgatgggaacaatgcaactcattggttacgtgctggttgcggaattcgatgaccgaagaacttggtaaacgtgtaacgtttgaggaaacggctcaaaaaatatgggaaagtatccgacgtatattcgtcccaagcgttgatttgaagatctaccagactcgtcggaaaatcatggagctgagtcaagatggtgactcggtaaagaagtatttcgaaaaagtgagcaatgcttttctggagttgtcggagtatgctcctgttaaagagtgtgcgagatcactaaacgagcaaaagaggcgagagataaggaggagagttacgcttttctgatgggtttgaacaaagatctcattaagaaatcaaaaatcaagctcaagaaacctccttcatctattcacgaagcctataatatggttgaagaagcagaatggcagatgaagttgacctcgctaagactttaggcgcatgttgatgatcataaattttctttttatgctttctttagattctaatattttaagcaatgagccatttatttaaagtaagcaaagagacacacaaaaaataaacatacacgaatcatttgtgtgacgtcatgcttgtaatgtaaaaatcttgacgctcaatatttgggttttgaatggaaaatctaaggcccattgaagcccatctgatttaaaattattatagacttaaaaaagtgaaaaatcgaagtggataaatacgaagcaaagccctagaattagagaagcagagctcagagttagtcagagcagtgacgacgatggcggaaactatcatcagcttattatctcccacactcgatatcaaatcaccctattatttcaatccagattatcttcaccaattcaacatgcacaccaataccgcaatcgataaactcagcgaagctaaagacaactacgccatttggaaactgcgatttttcgatctccttcaattcacgaacaaaaccgggttcatcgacggtactctcccaaaaccagacccttcctctccatactatgagccatggaaacaatgcaacgcgattgttttgcattggctgagtaataccgtgaccgatacgcttcaaaaccatgtgttgcaagcagagactgtgcataaagcatgggaagatctcagacgtatattcgttccatgtattgattttaagatctacgagcttcgtcagagactcgcgacgctgaggcaaggtggtgactctgtggcggagtattttgggaaattgagtaaggcttggctggagttgaaggcgtatgatcctgtgcaggagtgtaagtgcggtggttgcgattgcgagagtgagaaacgagctacagaggcgagagagaaagagcagcgttacgcgtttctgatgggtttgaacaaagagtttgactatgtgaaaatgaaagtcatgcacaagaagattcctccgtctgtttaccaagcttatgagatggttgtgtattcagaagcgatgatgaagtggaaaatgggaggaagaatttaggaatttgcaggtccgtgattttaactttttatgcttttatagtgtttctttttgaagtgttttcgtgttttttgaatccatattggtacattatcaatgtcatatggaattagattcgtcaactgaaattttgcataagagctctaaatttggttatttgactactggttagtataacaactatagatgatgcacaaaatattctctcaatacataatttgatgaggcaattacaaagaagtaggattcatgttttacaaacaaaagacatgtgtgaatttgtcagagctccgatgtccaatattcttgatgctgtcataactacggctactggtatctccctgtgttgataatattcgaacaccgagcaagtgttcaatctcccttgtctcaggatactgattatgttttaattgttttgactttcaaggtctctaactctgcagctacttcgttcatccttggcctttcctgtaccctcaatcgcaaacttcatattctccttctctttttctctctaaattggtttctctcatctctccaaagcatctgcttcttaaatataagaaaacacactccattcttgagatgttctcttgacttggttccgttgacttgtccccactttctcctacattaaggtccttaaagaaaaacacattacaaagaggcaatagtttcaacatgttcgggtgagatagagacgcagatatcgtgtatgagtcattgagtccacatcggcgacaaaactctttctcgtctgcaattccatggagcctaactcttctgatgtcttttttcctacattgtactagaaaatgaagaagggttgaagaatgggtgggagagattttggggcaaaaatgatttcaccagccttgttggtgccaggagaagtcatattgaccaaagggaaaggaagctcaaatgtttgcttggaccaacatgtttcttgacattctctagtatccacaaatcaaaactagagaagcttaaagggtttctagcaatggaagctaacttccctttgtattctatcaatattgattcacactcccgaaccaaaacatccctaggcactttgataaaacttagcctctcatatctaacatgaaaacacacaatcaccattcaccggatccattcttagtctaggggcccaagcaccataatagatggaaccatagatgcaaagtcccttggttacacggtaataaggagctttggtaaactgattacgtgtttttgatgtttcttgtcctccaaaaccaagatacaggtcatgtgaagacaccaggttcaacgctttgattaatgaccaacaagatcatatcccaatgatgcgcggggtcctttaatgggtaaggtaatccctgaaactttgggctagggaggggaaatacaaggcccattaagcccaactgtttacaaaaaattgcgacttttcttattttggaaaattatttctttatttgagactaaaaaagtcaaaatcgaaagggatacaaagcaagccctaggatttggaagcagagagagactctcagagcagcgacgacaatggcggaaactatcaagagcgtatctccaacatcagaccccgattcaccgtattatctccctcccgatattcatcatccctccgatttctctatccaaaaactcagcaaagacgaagacaactacgtcgcctggaaaattcgatttcgctctttcctccgagtcacgaaaaaattcgggtttatcgacggtactctcccgaagccagaccctttctctccgctctatcagccatgggaacaatgcaacgcaatggttatgtattggctgatgaattcgatgaccgataagcttctagaatctgttatgtacgcggagactgctcataaaatgtgggaagatctcagacgtgtattcgttccttgtgttgatttgaagatttatcagcttcgtcggagactcgcgacgctcaggcaaggtggtgactctgttgaggagtattttgggaaattgagtaaagtttggatggagttgtcggagtatgctcctataccggagtgtaaatgcggtggttgcaattgcgagtgtactaaacgagctgaagaggcgagagagaaggagcagcgttacgagtttttgatggggttgaagttgaaccaaggcttcgaggctgtgacgacaaaaatcatgttccagaaacctcctccgtcacttcacgaagctttcgctatggtcaaagatgcagaatcgatgatgaagtggtacagtagatgaagaatttaggaagcaggtttatgatcataacttttctcttctttgcctatgtttttttttgggattctagtgtttcttattgagatgtgtttgaagctatatctgtatattatcaatctcatatggaattagatttttatgaactaaaatttaacacaagagttttaaatttgccaataaccagatcggttactggttagtataccaagtaaaggaaaatatgaacatgattattgatgatgtacaaacaaatctgtcaaagcattattgatgaagcaacaaggaaatgactttctttttttacaaacaaaagatatacatgtgattttgtcagagcattaatatcaacggccagcttcaatgtccaatgttgttacatttctgatgctgtcatagccaatgctgctactggtttcgccttgtgctgacaagatttgaacgccgagcaagtgttcaatctcccctgtctcacgatactgatccgaccacttatatttagttgttttaactctcaaggcctctaactctgcagctacttctttcatccttggcctttcctctcccattagccttgtacactctgcagcaattcttgcagcttcctggatctctctctggttatcctcattcatcacttgcccatcaataatttcatggaacctattattctttgtggcagaagcaaaacaactcacaagattttttgggcaatgtggtctttcgaaacacaatgccttttgacctgagagcagttccattaggacgaccccaaaactataaacatcgctcttttcgtttaacaaccctgtgttgtaatattctgggtctaggtaacctagagtgccttgcactattgttgtgagctgctctttatccatcggtatcaatcttgatgcaccaaagtcagctacttttgcagttaagtttttatccaggagaatattagcagtcttgatatctcggtggatgattggaatagaagcagaagagtgaagatatgcaagacttcctgctacttctgttgctatcctcagacggtgctcccatgtaagtgaagaatcatacaaggaaccgtgcaagtgatcgaaaagggtaccactgttaatgaactcatagaccaacaaggggacttctgtctctaaacaacaccccaagaccttgaccacgttcctatggttgatttgtgaaagcactagcacttcgttgatgaactgctctacttggctacggtttccaagccgagctttctttatagcaactatggagttgtccggcaatatccctttgtacactgttccttggcctccctgacccaggattctgctctcatggtaaccattagttgcttccttcattcctttctcagtgaagattttgacatcaacatttgatggccctgctcccgagactcgctgtatcaacatgcctccaccattttgctcgaagaatttttgtcggagctctgtgttcttccggtgcttaattttctgttgtagacagctaatcccaagcatgataaccgagaagccgatggtggttcctgatcacatcacacctaggtaattagagctagttttttaaaaggaaagtatccgaaaccagtgaggggaacataccaagaaaaatttgagtccatctaaagtattcaggcctgactttacgagtacagctattaagggaatctttgcggtaaccagatgggcagttacagttgaagctccccttcgtgttttcacaggtactatgctccgaacagttatgtctactactaatacattcattgatgtctggccaaggaaaaagagcatgtatgaagtaaacgattaaaagaagtgataaaacagaaaacaagttaaagtaccttgacaaccgtttggaaggtatggattcccctcaaaaccttctaaacatttgcagttatacccggttccaccagtagaatcgaaacatgtgctgttaccaccacacacgcccctgtattctacttgtttgcaagtcttgtctccgatagaccaatctagtactacagggaacgtagtaacatttcgcagattgttgagatcttccaaagcatggaagtcaaacataccatcttcaacgagaaaggcgtaggtgcaaggattaaacagatgcacagtaggatggttgtgaaagctatgtggttttactctgacaaaagagtatcctctagggacagggatctggcagcaaccttcaccagaacatgatccgtttttcgttgtggcagaatcacatattgatatgcatccagttgagtatttttcaactccagatgtgcggagaaatgcgtaactgttacaacctactacagtaaatctgttaagttcagagagagtgaaattacccagggtggtccgctgggcaatgtagtcagtctgttttccttgactatcgtagcaaactctggatctaactagccgaacacgaagctggccgctgagagacatgttgatgactggcatgttgccaaagaagagcttctcttgctcgttgcaagtaagattgaaactttcatctccgggatagtaacaacctggagaagtaccaaaagggtactcaactgcgacattgccacatctagtttggcactccttgcgaggttgccccttgactagctgcgtataagcaaggtagaaaacagccaccacgaacaaaccctcctgtaccttcatcttctctctttctttctctctcactcttttaactttgttcctgttttgagttttcgctaatctcctttttcttattagaaacaactgtatatgaaatgttctcttcactcattttcgcaggcccgctcccattttgtcatataatgcaagaagacgaaaattcaactacacaaccaatgtaacccatgaggcgtgaagaggacgtttgctgcatattcctgtatagtatttaaacagtgacaactataggtcttggtcttctcgtcattcttgatatttttttcgttagtggggaaaccgatttaattttgttaacagtgacacttattttcttactattcaaagattaagacagttgcaacttgcaaggaatcttcaattatgaagaccctcttaagtcaacttcagtctcggtcctctcttcttttctcgatattacaaggcaaatttactctttttcttaacagttaatttcacgctcaaaatatgaaaattgccttttaaaatgacgatataggaattgagactcctgaatcctgatcacaacatgctctgttttcttatgatgcttttattacgacttgtttttttccccacatttagacattttgagtcataaagcattatgccaccaagatcagaccctcttgcaacttcatcttctccttctctctttgtctcactaaatttgtttctctttgagttttctctcatctctccgtagcatctgcttcttaaagctaagaaaacacactccattcttgatatgttctcttgacttgcttccgttgactagtccccattttcccaataattgcaggaatctgcaatagtaaatattattttacagagccggaccaatgaaattcgggccatttaaattacgaaaacaaagtacttttgtctttaaaactatagagtaaatagaaaccaatttaaacaaaactctgaattatttatttaattgtatgttagatttataaatattttggatcacactattatttaagattaatatgtataaaactaactatttctcctattaaaaatcaatatatatatatatgtatatttaattacaataaaatttctgtgggacccttttaaaatgggagccccattagaatgtttcatcttcatgtgctatggtccgctccaatatccttctcttacttttcttgatttccaggcaaattatgtagaccaccttcacctaacccttctcttccctgcttttttatttccactgtcttttagaattagacctattggtagttaagacaaatgatagttaagattaggttttccaaaacttccacaatggcttaatcctcatagataaacgagcttctcgatgattatctgcagcatacagttcaatgaaatcttgtgcatataataccttctgagcaaaaacaaacaaaacactcaaaatatgaacaacaataaaaagaaataacacatgtcagaaaatgcaaatcatcaatggtaagataaaaaactagtttgcttgatgttgaaaagccaacgcttatatattgattcaaagaagaaaaaaacagagtctgtcaagctcttacacattaaggtccttgaagaaaaacaaggttcgggtgagatagagacgcacatatcgtgtatgagtccattatgaagaaggaaagttgaagaatgggtggtatacattttgggggaaatgatttcaccaaccttgttggtgccagggaactcatatcaaccaaagggaagggaagatcaactgtttgcttggaccaatcatgtttattgacatcctctctagtatccacaaatcaaaacgttggaaagaagcatatgcgtttcttgcaatcgacgctagcttccctaggggctttgttgggctccggagggaaactcaaggcccattaagcccaactctttatctttttttttttttttttttctctttctcattttgaaaatgatttgtttaatgttagtcaaaatcgaaagggataaaaaagggcaagccctagagttttagaagcagagctcagtgacgacaatggcggaaactatcaagagcgtatctccattatccgaccccgattcaccgtattatctccctccagatattaatcaaccctccgatttctctatcgaaaaactcagcgaagccgaagacaactacgtcatctggaaatttcgatttcgctcttttctcgaactcacgaacaaaatcggtttcattgacagtactctcccgcagccagaaccttcctcgccgctctatcatccatggaaacgatgcgaacaatagttaagtattggctgatgaatttgatgagcgaagagcttgtaaagtctgtgatgtacgcgaagactgctcatcaagcgtgggaaaatctcagacttagattcgttccttgcgtcgatttgaagatctaccagcttcgtcggaggctcgcgacgttgaggcaaggtggtgattctgttgaggagtattttgggaaactgagtaaagtttggatggagttgtcggagtatgctcctgtacctgagtgtaagtgcggtggttgcaattgcgagagtacgaaactagctaaagaagcgagagagaaggagcagcgttacgagtttttgatggggttgaacaaagagtttgaggttgtgaggataacaatcatgctcaagaaacctcctccgccactttacgaagcttacaatatggttaaaggagcagaattgacgatgaagagatacaggagatgaagaatttaggaaccaggttcatgatcataactttctctatatgttatgcatttctttttgtaaagattctagtgtttcttatctagttgtttttgataacatcaatgtcatatggaataagatttatgaactgatattggtaatctgctattttgcaaaagagtttctaagtttgcctataaccagattggctactggttagtataccaatgggaattacaaacatggttattgatgatttataaaaattctttcaaatcattattaatgaagcaaagcattattgatgaagcaacaaagaggtagttttttttttcttacaaacaaaagaaatacatgtgaatttgtaatatcagcggccagtttcaatgtccaatattgctacattcttgatgctgtcatagccaatgctgctactggtttcgccttgtgctgacaagatgtgaccaccaatcaagtgttcattctcctcagggtactgatccgaccacttatgtttggttttttcgaccctcaaggcttctagctttgcagctacttctttcatccttggcctttcctctcccattagccttgtacactctgcagcaattcttgcagcttcctggatctccttcagattatcctcgttcatcacttcgccgccaataatctcatccaacctattctcttttgtggcagtcgcaaagtaactcaccagatgttttgaggactgtggccgtttaaagcacaatgccttttgacctgagagcagttccattaggacgaccccaaaactataaacatcgctcttttcgtttaacaaccctgtgttgtaatattctgggtctaggtaacctagagtgccttgcaccatagtttcgagctcttctttatccattggtatcagccttgaagcaccaaagtcagctacttttgcagttaagtttacatccagaagaatatttgcagttttgatatcccgatggatgattggaatagaagcagaggagtgaagatatgcaagagttccagcgacttctattgctatcttcagacggtgttcccatgtaagcgaagaatcaatcatggaaccatgcaagtgatcgaaaagggtgccattggtgatgaactcatagaccaacaagggaacttcagtctctagacagcagcccaagagcttgactacgttcctatggttgatttgtgaaagcacgagcacttcattgatgaactgctctacttggctactgtctccaagtcgggctttctttatagcaactatggagttgtccggcaatatccctttgtacactgttccttggccaccctgacccaggatcctgctctcagcataaccatttgttgctttcttcatgccatcctcagtaaagattttgacatcaacatttgacggccctgctcctgagagtcgttgtgtcaacatgccgccaccattttgctcgaagaattgttctcggagcttggtgtccttcaggtgcttcattctctgttgtatacaggcaacgccaagcagaatgaccaagaagccgatggtggttactgatcacacacatcgtagattcagagagatgattataataagttgatctgggaaacatcaagtcgagaaatagtgagggaaacttaccaagaagaattgtagtccatgcaaactctttacgcttgcagctcatagtggtggtatctaagcggtaaccagattgacacttacaatagaagcctccaaccttgtttctacaggttttgggatccgaacagttatgtctatggatagtactactagtagtacactcattgacgtctggcacaaagaaaaagaacgcaagattcaacaagatatgtaatgggaaaaatattactactcagaacatgaaagaaagaagaaccttggcaaccagctgaaaggtatggattcccatcaaagccttcattgcatctgcagatatacccgtttctaggagtagaatcgagacaagtgctgttcccaccgcatatgcttgtgcttccaacttgctcgcatgtctgatttccaacagaccaatctagtaacacagggaacctcatgacatttcgcagattcagaagatcttctgtagaactgaagttgaacttatcatcttcaacgagaaaagcgtaggtgcaaggactaaagtcgtgaaaagaagtcatgtgcttgatgcgacctgatgtagtttcgaatgtatagctatccaacggggcagaaacgtcgactctgcagcaacctctaccattacattctccatcagcctctgggggagaatcgcataatgacaagcatgcagttgagtagttttgcattccaaaagtgtccagaagtgataaagcgttacagcctactgcagttaacttgttgttggcggaaagagataaattttccagtgtaaaagaactgtcctcctcagttttttttccttgctcgtcgtagcaagtagaggatcgattaagcagaacttgtagctggccgctgtgattaaagtttgccacttcaatgtcgcttaagacatgtggcctatcttccttacaggtgatactgaaactttcatttccgggatagtaacaacctgaagaaatgccaaaagggtactctattgtgatgttgccacatttattttggcaattctcaccaggttgatgttgccccttcaccagctgcgtacacgcaagggagaagaaaatagccaccaagaacaaaccctcctgcaccttcatcttctacctctcttctctctttatttctctctctctctctctctctaactctgttcctcttttgagtttttttcgctaatctccttgttcttataagaaacaactgtatacgagatgttctctctcactcattttcgcaggccccttcccattttcccagaaattgcaagaagactaaaattcaactacacaaccaacgtaaccagtgaagaggacgtttaagtacgctgctgcttattcctgtatagtatcctaacatccacgtttgcttcggttaaacagtgacaactatagtctataggtctcggtcttctcgtcttttcttgatatcttgttcgttagtgaggacaactacaggtctcggtcttctcgtcttttattgatatcttgttcgctagtgaggaaaccaatttgcttttgttaattaataatagtgagtgacacttacttgcttactattcaaagattaagacagttgatagttggaaggaatcttcaaatgtcttggtcctctgttcttttctggatatcacaaggcaaatttactctttttcttaacagatctttccacctcaaattaagcttaaactaatcttaattatatattaattagttagacgatatgaaaattgccttttaactataatgactatatgtagaaattaagactcctgaatcctgtgatcacaacatgctctgttttcttctgatgcttttattacgagttttttttccccatattataacatcacatttagacatttcgagtcacaaatcgaagtttaagagttttacatttagatgattacaaagagaagagtaatatatatatacctgagcaacaagaagatgacatacatgtcaattgatcttttactccataagaaaggaaacatacatttacctaatcttaagagttaaatatatagctcatgttaactgaataactacgataatgacgatgaaaacggattttacatgtttctccggatcgtgggacattagggcatctccattagttagagactaactaggtctatgactagaaaatactcttgttttttgtaaaactcttcttctttttattaaacgcaggtacaagacaaaaactgattcatcattgcataaattgagtagttacacgaaaaagcaaagtctaaagacatcatatcgatacattgtcagtgagctggacaaaaactcactactttcctctccctttgtctaattgaatcatatacacaagttgaagttcagtcttgggacagagtaaatcacttttgcagcatgcaaccaaaggtaaaagcattaccaaacatacaagtaaaagttaaaactgagaattgagattcctttaatatttgagtctgcactttccccaacttttatcttcatccactgaagttggttctaagataattttagtctgaatacgtgcttggtattattagtaagtcaataaacatgaattggggtaatcaaatggaagtagacaacaagtgatcatgctttgattggtgactaacctgccaataatcgtaggattgctgactaacacttactaaaaatcatatattttaacaagaaacaaattaagagatttgatgtgatatacaatatcaagcaatcttatgcaacaagaatgatgggttgtagatgagtaacgaaacatgatgactcaagctgtagatcaaatatgaagtttgcaccaaatgagtcttttatttttttagtttaccaagcaactaacaaagaatcatatggtttggtttgaggaagcggtatctacgatgaactcgaccaggtgctgaagatttcgatgatcatattcatagtatacttactctcctctgtttttgacgcctactttaaattctagtgttttttcttctcgagttgttttgtttttctttataattaagcacaatgatatattaatgtcgtatggaatcatatttatgaactctaggtagtttttctaatacctaatcagctactggttagcatataaaaatataggagaattgtgaacatgagtatatatggatgatctacaaggatatcaatgtttttgaatgtcatgttttgatattctggttatgtttataaagacaaaaggagataaacaataaagaattaaacaatatactttttaacaaacaaaatttatcagcggccagcttcaatgtcaagcaatgctacattcttgacgctgtcataaccacggctattggtatcgccttgggaagacacgatgttgctaccaagcaagtgtaaattctcctctcgatactgatccgaccaattatgtttggttgttttgacgctcaaagtttctagctctacagctacttctttcatccttggcctttcttttcccattagccttgtacactctgcagcaattcttgcagcttcctggatctccttcagattatcctcgttcaacacttggtcgtcaataatctcatgcaacctattctcttccgtggcagaaacaaagtaactcaccaaatgttttgaagcctgtggccgttcaaagcacaatgccttttgacctgagagcagttccatgaggactaccccaaagctatacacatcgctcttctcgttcagaagccctgtggtatagtattctgggtctaaatagcctagagtgccttgcaccatagtataccaagtaaaggaaaatatgaacatgattattgatgatgaacaaacaagctctcaaagcatattgatgaagcaacaaataagtggttttctttttttacaaacaaaagagatacatgtgattttgtgagcaatatcagcggccagtttcaatgtccaatattgctacatttttgatgctatcatagccaatgctgctactggtttcgccttgtgcagacaagatgtgaccaccaatcaagtgttcattctcctcaggatactgatccgaccacttatgtttggttttctcgaccctcaaggcttctagctttgcagctacttctttcatccttggcctttcctctcccattagccttgtacactctgcagcaattcttgcagcttcctggatctccttcagattatcctcgttcaacacttggtcgtcaataatctcatgcaacctattctcttccgtggcagaaacaaagtaactcaccaaatgttttgaagcctgtggccgttcaaagcacaatgccttttgacctgagagcagttccatgaggactaccccaaagctatacacatcgctcttctcgttcagaagccctgtggtatagtattctgggtctaaatagcctagagtgccttgcaccatagttgtgagctgctctttatccattggtataagcttagaagcgccaaagtcggctacttttgcagttaagttttcatccaagagaatatttgcagttttgatatcgcgatggatgattggaatagaagcagaggagtgaagataagcaagagttccagcgacttctatcgctattctgaggcggtgttcccatgtaagagaagaatcaaaaatggaaccgtgcaagtgatcgaaaagggtgccattggtaatgaattcatagaccaacaaggggacttcagtctctagacagcaacccaagatcttgaccacgttcctgtggttaatttgtgaaagcacgagcacttcgtggatgaactgatctacttgtctactgtctgcaagccgagctttctttatagcaacgatagtgttgtccggcaatatccctttgtagactgttccttgacctccctggcccaagattctgctctcatcatagccattagttgcctctttcatgccttcctcagtaaagattttgaaatcaatgtttgacaaccctgctcctgaaagtcgctgtatcaacatgccaccaccattttgctcaaagaattgtcgtcggagcttggtatacttcctttgcttcgttgcatgttgtatacagatcgcagcaagcaggaggaccaagacgccgattatgattactgataacatcatgcatagatgattagagcgagttgatttaaagagaatctagaaccagtgaagagtgtttaccaagaaaaattcgagtccgtttgtattcgggcctcgtgcagctcatactggagtttaagtcgtaaccagatggacacttacaatcgaagcctccatccctgtttctacaggtttttggatccgaacagttatgtgtatcactaatacactcatcgatgtctgaccaaaggaataagtgcacaagatgcaaccaaaaacgtatgaggaagattataaacactcaaaagaagaaagaaagcaaagaaattaatatgaagtacctttgcaaccctctgaacggtatggattcccatcataaccttcattacatttgcagatatacccgtttctagtagtagaattgtaacatgagctgttcttaccgcatattcttgtgcttccagcttgctcacatgtctggtttccaatagaccaatctagtgccacagggaacctcgtgacattcctcagattcttaagatcttttgaagaatcgaagttaaacttaccatcttcaacgagaaaagcgtaggtgcaaggattaaactgatataccgaagtattaaatagatctaaggaattattaacttggtttctcaagcgaactgagccaaattggaatgtatcgctatcgaacgggacagagaagtcctctgttgtgcagcaacctacaccattacatcttccatttgcctctggttgagaattgcataatgacaagcatccagttgagtagttttgctttccaaaagtgctcaaaagtgataaagcgttacatcctactaaagtaaacttgttgttggaggagagagagaaactactacccagctgatacccgagggcagttccattagtctcatttttctgctcgtagcattcagagaatcgttcaaacagtacacttacatggccactgtgagaaatattggtcacttgaatgatgccaaagagtagtagcttctcttccacgacacaggtgagattgaaattatcatctccgggatagtaacaacctgtagaaataccaaaagggtactctattgtgacgtttccacatttaagtttacaatcttcgcgaggttgatgttgccccttcacaagctgagtatatgcaaggaagaaaataaccaccaagaacacaccctcctggaacttcatcttctacctttctctttctttctctctaaacttgtttctctttgagttttctctcatcgcttattcgcttcttatagcttgaaaagtaacccctgatttgacattgttgaataatcaaatgtgaagaaaagtaaagattcagactactagacgttagaaaaatataaatgcgtcaacttctttatctgtcctttctttcttgtcttgatttttccaggaaactccaatttattgttcatatatgaaagtctcgttatagtgacaatgtaggaataagactcatcatgatcacaacatgctctgttttcttctgctgtcgtaatagtagaaatatgtagtttttttgtgtgtgtgtgtgtgttgagtttataaatgtcaacaagttttcgaagaatttgaatagttcttgcctcatgtgtcatgtcgctgcttactcttcaagaggttatctatgagaaatttccatgcaaatccaccactttgttagaaactgaatctccttctagaaacagaacagagttaagaacagagaaagagaatcagactttgtatcacaattggtttgatcgtcaacataacaataaagagaagaacttgtctttctattatagagaaagtgaaatacaacaactgttttacaaggtttacaacaattaacttaaatacaaaccaacagacatgaaaagtcaagagttatgactcttctttcttgtgacacaacaaacataactactttaacttaacagacacgacacttaagtaatatattacaaaccaaactcaattacgaccagcactctttcaccgaaagaaaccagattcattcaaagaaactgagggaaaatcttgagaaaaaactgaaaatacactgtttgatgattaaaataatctttgacagaccagacttagagattttaagggtatagtagaggtagctttctcaatttactaaagatcagagttttaacaaaaaaggaaaatttgatggttacaaaaccacaacaatcttatgcagcaagaatgataatttaatttagaaaacgcagtattaaaattttaataacagagcaatatatgagtcaagttgtttatcaaatagtcaagttgttctttcatactttcaaagccttgtatcaaaaacgttatttttcttgaatataatttaacattacattcaaaaaaaaaaaaaaaaaaaaaatgtcaagttgttcttttggagttacgtacataccacgcatcttaagttagagatttctcgtttactagtttttacttctcatgtagttgtgcatatgtttgtttattactgatctaattccaaaatcatatgttaacttgtttacatttttgtcttcgtcttgttgctcgtggatatatataattgcatctttgtaatcatttcatcataatatcgatcacgttgacggagagtgcttttctagaatccaccaaattttctcatgttttcactatatatattacttatggttaaagatcataaatttttaacaaaataagaaaacttgatggcttcaaaaccagagcaatcttatgcagcaagaatgattttgttaatttagaaaacgcagtattaaattatagatgccagtaccaaaacaatatatgagtcaagctgtggatcaaataggatgttttaagcaactgagccctttaaattcgagttattgttttgcaaccacaacagtatatcaatatctctgctagtagattcatgaattcttaatttttctcataccgaatcgtctactggttagcttaccaatcgaatggagttataaaatgaataattgatgatctacaacggatctctcgagcataaatgttcttgaatatcatgttttgatactctgttttttttgaagtgttaggaaacatataggacataagcaataaataagtggctttactttttcacaaacaaaagattgataaatatcagcggccagtttcaatgtccaaccttgttacattctggatgctgtcatagccaatgctactggtatcaccttgcgtcgataagatttgaacaccaagcaaatgctcaacctccttgggatattgatctgaccactgatgtttggttgttttgactctcaaggcctctaactctgcagctacttctttcatacttggcctttcctctcccataattcttgtacactcaacagcaattcttgcagattcctggatctccctctgattatactcgttcataacttgaccgtcaataatctcatgcaacctattttctttcatggcagaaacaaagtaactcactagatgttttgagctttgtggccgttcaaagcataatgccttttcacctgagagcagttccatgaggactaccccaaagctataaacatcgctcttttcgttcagaagccctgtattgtagtattcagggtctaaatagccaagagttccttgaaccatagttgtgagctgctcttggtccatcggtatcagccttgatgcaccaaaatcagctacttttgcagttaagttttcatcgaggagaatgttagcagtcttgacatctcggtggatgattggaatagaagcataggagtgaagatatgcaagagttccagcaacttctatggctatcctcagacggtgttcccatgtaagcgaagaatcaaacatagaaccgtgcaagtgatcaaaaagagtgccactggaaatgaactcatagaccaacaagggaacttcagtctctagacaacagcccaagagtttgaccacgttcctgtggtttatttgtgaaagcactagcacttcgttgatgaactgctctacttggctacggtctccaagtcgagctttctttatagcaacaatggagttatcttgcaatatccctttgtagactgttccttgtcctccctggcctaggattctgctctcattataaccatcagttgcttccttcatgccttcttcagtaaagattttgacatccacatttgatggccctgctcctgagagtcgctgtatcaacatgccaccaccattttgctcgaagaattgttgtcgcagctcggtgttttttcggtgcctcattttttgttgtatatagctaatggtaagcaagatgattaagaatccgatggtggttcctgatcacatgacataaaaacaaagatcattagacccgagttgttcgacaaaacatattcatcgaaaacgagtaagggagcttaccaagaagaacagtagtccatcctaagtacttaggctcttctttaggtgtgtcaatgcagctcatagtagtggtatttaaatcagaaccagatgggcactgacaatggaagcttccaagtgtgttttcacatgtgctggtatccgaacagttatgtatacgggtagtacactcattgatgtctggtccaaggaaatatatgtatgaggaaaacattcaacactcaatagaagaaaggaagaaaacaaatgatatgaagtaccttggcaaccgtccgaaaggtatggattcccatcaaaaccttgtaaacacttgcagttataaccctttccacgagtagaatcaaaacatgtgctgttcccaccacatatgtttctacctacaacttgctcacatgtctggtttccaatagaccaatctagtaacacagggaacctcgtgacatttcgcagatccttaagatcttctaaagaactgaagttaaacataccatcttcaacgaaaaaagcgtagctgcaaggattaaagtgctccacggaagtcatgttttcgaagcgagatggttgagtttcaattctatggctatccaaggggatagatacctctgttctgcagcaaccaacaccattacatttactatttggcggcgggggagtatcgcataatgacatacatccagttgagtagttttgtattccaaaagtgcttagaagtgcccaagcgttacagcctactaaagtaaacttgttattgggggagaaagataaattatccaaccgaaaccagagggactcgaaatcattatttgtttgctggtcgtagcaaacagtggatcgaggaatcagaccgcgtagctggccgctatgattaaagtttagcacttcaatgttgcttaagacatttggtttatcttcctcacaggtaatattgaagctatcatctccggggtagtaacaacctgtagaaataccaaaagggtaatcaattgggacgtcaccacatctagtttggcaatcatcgcgaggttgcgccttgaccagctgcgtatatgctaggtagaagaaaatagccatcaagaacagactatgcaccttcatcttctccctttccctctctttatttttctttctttatttagttctcaaacttttgtttctcttttgaggttttttttaatccatctctttgaggcttcctttaataggaaacaaacctcagtcttgagatgttatcttgattcgtgttcgctgacctcttcccattttcctacaaattgcaaaaatatttgcaatactatataccaactacataagcaagaccatgtcaatgtaatgcaaggaggacttcaaatatgatacattcaatattaccatattacatcacaacgtctgcgtttgctaccgtttaacagtgacctttttttttgtagtactaaaagattaagatggttggtagtagcaaggaatcttcagatgtggagaaatgttaattatgcagactataagcttaagatattattatcaaaatagtaaaccatatatattttttgataattgatagaaacttgaccattaaaaaagagtagtggacattagtcaatcattttgattatcttcaagagactaaccctattcgatattttaatgcaaatccaccacgttctgccaaaagaagccggaggtattccaagaaagtgcgagaaaatcttgagagagaaactgaaaataaactgtttgatgattaaaggtattgtagaggtaactatgtcaatttacaagattttgatcttttaatctgcaagataataaataaaactggttaaaaaacagagcaatcttatgcagcaagaatgataaatttaattttagatgaataacaaacaaacaaaaaaaaatgaatcaaggtttggatccaatatgaagtttgaagcaaatgagccctttcattttttgaagttacgtacataccacgcaacacacaagtattagttgaggcgggaagatctaataagtcctaaaactttgggctcagaaggagatatctaaagcccatctatttatgtttataaaaattgaaaggaataaaaagcaaaccctaaattcaaacagtaacgagagagctcagagcagagcaagtcacagtaacaatggcggaatctccaacactcgatcaagaatctccctattatctcgatccaaattatcaatccaacgagaatcttcccatggctatactaagcaaatccgaagataactacttcatgtggaagattgattttgtcattttccttcaaagcaagagcaaaatcggtttcatcgacggaaccatcgcgaaacctgaaccttcctcaccgctctatcgcccatgggaaacatgtaacgcgagagtcaaatcttggatgatgagttcgttaagcgaagagcttcgaagctatgtaacgttctcggagacagcacataaagcttgggaagatctccgagttgaatttgtaccaagtgttgattttaagatctatgagcttcgtcagagacttgcggtgttgaggcaagatggtgactctgtaggtagatattttgcgaagtttatgagagcttgggtggagttgttggagtatgatcctgtgctgccggagtgttgtgattgcgagattgcgaaacgagctaaagaggcgagagagaaggatcagcgttatgcgtttttgatggggttggataatggactaagtaatgtgagaacgcagattatgcttatgaatcctcttccgtctcttcatcaagcttttgttatgttagatcaagcggaatcgatgatgaagtcgaccgggagatgaagaatttaggatacaggtcgatgatttcgtaactcttctcaatatctctgctgaattatcacttgatggaacatgttggattatgatatacttgagtgtaaaagaagtatttgccaagaatgtttggttctatcgttctaagcatgtgctctagtttaccaacaagacgttgaagactttcttcctttgatgaatctagggagcaggttggtgatcatgagttcataacattctctgtttttgttgatcctttcttgaaattctagtgttacttcatcatcataccataaccatatatatacatcatagatagattttccgattcatgaaactaaaatcctgaactagaactctgaatttccagttatatacttctaaaatgtagcacaccaattaagtggataagtattacacaatctctcttgaacagatgtgatattttcacgagaaaagatgatctcaagcatagtgttcttaaacacatcagattagcggccggtttcaatgtccattattgcttcataggtcaatcatttgaacttcttctacgtcaacttctctctgtcctctcttcttttcttgacatcgctgggaattgttacccttcgtaacagttatttcctgatcgcaagttcacaacatgctctgttttgttttgatgcctttttcagttatcctggtcctatgtagttgttccatctcataataacattttacgttttagatattcctcacacaacatgctctgttttcttttgatgctttctttagattctgtagtttctttgagttttttttttttttttttttcaccgtaacgagacatcaacatagattcaagttcatgaattcttgattttgagtgaattctaaatcttcaaataccaaagggatttatatacacacacagatacacaatgattgatgatcttaaaccaccaatccatacatttcctgaatgcaatgtttggtacactgtttttacatgttttttgaggagaatcaaggagataataaatcaaactaaaagaagagttataaaacacaacgattgatgatctggcgaaacaagaatgtctcaagcttttgattattatcttttttatttacagggttttattagatgtttactatgagtatgatgcgggaagaaacctgatcatatcgaacggaatgtggccaacagtgagagttggatggagatatcagcggcctgcttcaatgtccagtattgctacattcctgatactatcatagccaatgctgctgctggtttcgccttgtgctgataatttttgaacaccaaccaagtgctcagtatcctcctgttcaggatactcatctgaccacttatgtttggtttttgtgactctcaaggcctcaagctctgcagctacttccttcatccctggcctttcttctcccgtcaatcttgtacactcaacagcaattcttgcagctttctggatctccctctgattattctcgttcatcacttggccatcaataatctcgtgcaacctattctctttcgtggctgaggcaaagtaactcactatatgttttgaagtctgtggcctttcaaagcacaatgccttttgacctgataacagttccattaggactaccccaaagctataaacatcgctcttttcgtttagcaaccctgtgttgtaatattctgggtctaggtaacctagagttccttgcaccatagttgcgaggtcttctttatccattggtatcagccttgaagcaccaaagtcagctacttttgcagttaagttttcatccagaagaatatttgcagttttgatatcgcgatggatgattggtatagaagcagaggagtgaagataagcaagagttccagctatttctacagccattctcaaacgatgttcccatgttagagaagaatcaaacatagaaccgtgtaagtgatcgaaaagggtcccactggaaatgaactcatagaccaacaagggaacttcagtctctagacagcagcccaagagcttgaccacgttcctatggttgatttgtgaaagcacaagcacttcattgatgaactgctctacttggctattgtctccaagccgagctttctttatagcaactatggagttgtccggtaatatacctttgtagactgttccttggcctccctggcccaagattctgttctcatcataaccatcagttgcttccttcattccttcctcagtgaagattttgacatcaacatttgatggccctgctcctgagagtcgctgcatcaacatgccgccaccattttgctcgaagaattgttgtcggagctcggtgtccttggtgttcttcattttatgttctatacagctaatggcaagcagaatgaccaagaagccgatagtggttcctggttatatcacaatgattagagtaagttgtttcagaaaagaaagaatagagaatcagtgagagaggtgcttaccaagaacaattgtagtccattcaacgtattcaggattgcctttaggtttgcaggtattagtggtggtatttaattcgtaacgagatcgacaattacaacggaagtgtcccaacttgttttcacaggtgctgtcacccgagcagttatgtttatggataggattagcagtagtacactcattgatgtctggcccaagttaaaaaaaaagactcaagatccaacaagaaatgtatgaggaaaacaattaactgaagtgatagaaagaaaacaagttgtgaagtaccttggcaaccgttttgaagatatggattcccctggaaacctcctttgcatttgcatgtatacccgatcccactagcagaattggaacatatgccattcacaccgcatttcttttctccaacttgcccacatgtctctcccctaatagaccaatccaagaccacaggaaaccccacattcctattctgcagataagaatatttgtccgaagcattgtacttaaacttgccattttcaacgagaaaggcgtagatgcattgaccctcagagataggttgcactgacgtgtcgttgtcaaagcgatatgatctgactattaaccaattgttccctgcagggacggggttctggcagcagccttcaccattacattctccatttgcttcatgggaaagagcatcacatgctgatatgcatccaactgagtttcttcgagttccattagaggacacaaaagcgtacgagttacagcctaatgcagtaatcgtgttgttgccggagagagtcaaattacctagattactccagtagtaagtccctttagcgaactttcctttgctgttgtagcaaatgtaggatgcaggatataggacgcgtaactggctgctgtgagatatttcgaccacttcaaggcccttatagaatagattctcgttcacacaactgagattgaaactaggatcttcggcacgccaacaacctggagaaaagccaaaagggtactcaagtgtaacgttgccacatttttcggggcaacgaggcaaggtttgccccttgaccagctgcatataagagaggcagaaaatagctactaagaacagacgctgcactttcatcttctttatttattttctctccaaacttgatctttacgcagggctcttcatcatatcatctatttaatttcggagaacaattctcatttcaccttctagtttgcttcctaaatctacaatactataatccattgtccaataacaaagctaagacattttctactttattacaagggggcgttgaagtatgcttcatatgccatataatatctcaacgtctacgtttgcttcactttaacaatttgtttttttttttctgacggagtcaaataccataacggttggtaacttgtacaagaaaacaccaaatggaaagaatacgtaatatagaatagagacccatttaacaataacgaaacagccatttgatctctcgtcaactcgagtctttgtcaatattacctttttttaacattgattatcacatcaaactgtttttttttttttttttaatgtatatgatagttaaacttaaaccacctctggaagagacttgattactaaccataacacgctctgttttattttgaggtttactttagtttgcaagtcagtttggtgtgggagccgctcaaagagatagtgaaagcttgaaatgcagagagtggatacagaattcctaccttggcagggtcagacttatccagctaagctggatttgtggttggttcgctacaaacaggtgtaagttgttgaccaatgcaattgttacacgtctccagcactgcagctgctcatgacttgatatgctatcagcgtgaatggggatcacatactcggtgtaaagagttcttcttctggtgcatttttgcgtattgaagcaacaaagcataaacaccaaggcagatactagagttccttcccttgtggttccggctccaacctcaggaaatgaaaattttcatgctacgccttgattgacttcttatattctccatgctaggaaattaaaattttcaaggttttaattgcacaggtgtatgaagcagcgagtcaaagacgtttacacataacctgcagaccaaaaaatatgagtttgtttcaaatttagagttttctggatacttaaaagttaatatcgaagaagccctctctttgttagtaactaataagtatccagaaaactctaatttgaaaaaaacagaaaggaaagaagcttctcatcactaaccagccaaaaaatgaaacacaaaaactgaaaagaagcgcaagcatgagatggacctaaagcaggcaaacataacatgctttttagtcagaaacatctttacatttatgttgaaagagacaaaagaagaacatgtgactgcaaactgaaagaaacctttagaatatagcttcaagattcttcaggaaaactcaatatcgtcaaactgattcattttccactaaaggagatgtgatgtgatccaaagtataaactgctaaaggttatctggatccacgtccaatagaaaatatgtattaaggttccatgtcgaaaagtattcaatcttcttagaagcaaatagttagcaacaactcattctcaaactggcttaacaatgagatatttgttacacattggattaagatgtcgaaaacaatacagcagaacaatgaaaataaccttaaccagttgagtactgagaagtagagttaaaacaaaccttagagagctgcttatattaaccactcctttctcactacattcacaaacttcatcactgatgcaaccacaaagatctctcacatcaaagtctcgagatcattccaatcaaagcaagcttacaaaagcagaaaatgagacttcatttagcaaagctatataccaatcaagagaagtgaagccaattccgttataattcaacacccaattccctttgtttcaactccaatcccatccgatcattctcaagtttcatcctttcattctccattctcattctctcgagttcttgatcccttttcttgctaaacctctgccacctgaatctctgtttctccaattccagcaattcaacttggatctgaagcttctgctcttctagctggagagtccgcgactccatccactgcttctgcaccgaacctgctcttccactctccgccccaccttgattcacatcagcttgagaaaacggtatttgaggtaaagagactttattacactccagagaattcacatgactcggatgatctccatcttcatggctaaggcttggtcttatcttcttcaaaggaccaccaccacctccataatgatttaccctacaatctccatacgcataatgttgctcctcatactcatcatgttcatcaccatcaccatcatgatcctcatcatcaagatcctccatttgatgtttcctagaatcatcattatcatgatcatctctgcttctaagcgccaactgtaacgaacgctgcaaagcaaggtcatgaggcaaatgcaacctattcccattatgatacgaacacatctcttcataaaaaagatgtttagaactcataatcttcctaacatcatccttctctttatcattcaagtaaccaatcgaatccaaaagcgcaggattctcaacaacttgacaagatgttcctctaccaagcatatcattaagcttcttataccgtttattcaaatcattgaacttatcctcacattgctgcggcgaaacatgataacctctctcagccataactttagaaacagatttccacttccctttcttctgcaaaacagcaaactttcttctactactactatctatactcgaatcatctcctatataagaaacagcagtaatcaacaacttcaccatcttatcagtccatttcactcgttgccatggagatcctttagttgatctattagcttcattatgaacaccatcaccaccttcctctgtgaaacttggttcatcatcatcactcactgaattcttctctctttcagctttctgttgctcagacatagacatgttctgattctgatgatgatcacaggtttgacctgtaaccatagtaaagggaagaccttcatgaagtggtctagaattaggattgtgtcgatgctgctgattcatggagtcttggtgatgaactctcatagaaccttgtaaatcaaatcctccataagatgaagctccactacgaactacacctccttgtggaaaattcccatccatttttggatcaaatttcttcctaattcatcagagaaatcgaagagaaaacagatctcaaaaagtcaaaacctttgtcaacaaaattagtactggatcttaggggaatattaaagatcgaaactttaggagagaatgaagcagagaggaatcgggatgaagaaaataaagcggtaaatatatgagagatgagtcaaaggaagtaaaactcacagaaaaaagtttgctttcgtcttctccggtcagcttcctcaggtttctcttctctctctgtatatgacaaaaggctttttgattaaaacaaccaatataaagattatagtaaatttagtgtaatgaaatgaccaattgataccttgtgattggacttaatatagttaagttccactaaccatgatttatttgcattagatgatttattatcttcataatacttcgacgaaaaaaaaaaaaagagctaaccatattgggccgatatgagagcccaaaaacatagtaaaaggccgaatcgtaagatgttggtttgaagtttttagggaaccaacggtggcgattgcttgagctcagtcagagagatatcgccgagagcactacaatttcaaaaccctcggagaagttataatcagaaaatgtcagtcgaggaagacgccaccgttagagagccactcgatctgattcggttgagtatcgaagagaggatctatgtcaagctccgatctgaccgtgaactccgcggcaagcttcacgtacgttcttaaccactcggattccagaaaccagtaaccagatgtgatctttttcgattttgagctcctttttgaattccttattcgttgaatttaacactagtttttattcttttcacaaatatcaaaatttggacccattttgttgagtttcagtttcgaaagcctcagcgagagctaattggcgtagaaaacctcataatcttgttaaattctaagactctcacttttgttgttgtttttgtggtgtaggcttttgatcagcatttgaatatgattctgggtgatgttgaagaggttattacgactatagaaatcgacgacgagacatatgaagagattgttcgggtatgtaattctcttagctcaataagatttattaatctatgtaggctttagtagtaagataaacgtttttgggttcaaaatatttcagctatcacagtatctattgtctatgtctctgtttgagtttaaaggagagcttgattcatgtagaagttaatagtgctggttacatagagagtgttcattaccaatatagtaactctgtttagtttctcaaacttgaattttgttgtttgcgctccaaatgtgatgtgctaacttctcattagactagtgtagaatcatatgttcttctcctgctgatgtaacttgcttctgtcagacaacgaagcgaacggtaccgtttctattcgtgagaggagatggagtgatattggtgtcaccgcctttgaggacgacctaaatgttcttgtgtactgggatcggagttaacaaatctggcgctgagtaaaagcacttttttctgattacttggcttttgaatttgtaattgtgtggtatgtttttctttgttgtcaaacattgaaaccgaatgtagcattcgaatcttggtaatgggtgcctcgttatagtagaatcagtgtaacatacttcgtattgtgactttcttaccgtttacgatcggatttagtttcgttttctggtttggtgtagttttctctaaagatttgtatacttcctcaaactcattgatttcgagctctattatgaatagtgattggtgacatatttagatgtgtgtaaccctaggaaagacattttgattaaccaaaccatcaaattgattcacagtacaggaggctgaaaacgcaaacaagattgatttcatgagaaaagattaatgtaattgtaagcatgtaaatttacagtaaaaaaaagattagtgatgaaattaaaagttttgaggtatctatcgtaagatataacttgtcatgatcaccaacacgcttcgagcatagtaacaatggagaagagaagtcttatcttcgtctgggtctggcttgaaccggagaacccattggttgtgactctctatagtttctgcttggagaatcagttgatgttctggagtaggcagctttggctactggtggcactggatccaacggaatggtctcaatgaaacatgcactgttcaaacgggtcttctctagctccagttgaagcattccgcttgtacattgctgtgcaagagcctaaagcagcaacagtaacaaagcaaacccgcttttaactgaatgtgctagcggttttaagtattgaagatggtaaatattaagtggtggttaatgaaaaatgttcttacaaggagatcatctggggatacggatgattgtttgtcatctgaaattgcatcttcactgccacgtgttggtttcctttgatgccctcccgggttgttctcaactgtctcgcttatactctctatagctttctccaacacagctccttgcagagactttagagactcggttgcatcaaccgtcaaatatggcttcagtatcgtctcaaaatactcgagctgcatccaccagtttgtgaaagcagatcagcatcacaattttttaactattaatccattcactcaagtaaaactgagaagacaaacagattttacctcaagcatcaattggcagaaaccatttgcatctattgaactcaggtcgtcagatctgttttcgtctagaagactgagaaaagtatcaatcagaccttcaaccaaagtgccaagaattttgtccaggagtggtttggcacccgcaaatacctgcaattataattcttagtactaaattaacgggctttgacccaattgtggtggttagaagaaatggttgtagaaatttgaatatctaatggttagaagcaatggtattacctctgcatggacagctacaagagtgtgtaacagctcaacagcagcatctcgtatgccctgaagtaaaggtttagttatcgtttctttagacaaaatgctaaaatggtctattcattggttcttctaaggcgcaaaaaaagtgacaactgagagtaaacttgctacttacttttactggaggcgctgccccccactgaataccagagtccagcagataatttgtggcggctgttctgatcaagtttgcctaggtacaagtgaaatagatgcaaacttagtaggaatgatttgaaaacaaacaatccttgttccattgttcaatggcggtgcatcaattctctaagacacagcgagaacattactaaactatcaagcagattaatcgttaccttagcaaaagtgtaatgttcgagaaccttctctccaagaccagagaaagacatcattagatcttgaagatcgctgatgtcttcatcatttctcctgcaacatttaagagacacaatgataaccagtaaattttataacaccatatagtaattcttacgtttacattcaaagttttgattaggaaagttcagatattggaaccaattatcttggttgagacatttaaccatgactgtgtttgtcattcagacattggcattaattatcaaggttctgacatctaagcatgactgagtttgtccaactactctgccgatcgtaccagtgaattcaaataaaaaagaaacccacctagactgtaaccaggtatatttgtacttgttgtaaagctcagaggcaagttcgtctttgcagtaacctatattacttaagatcatcaacaactgcctgtgaggatcaacaacactttcaggagcattgattgattgttcttcctggtggtcattggagtatccattttgccaactctctcgctttgtagtgcgttgagaaaggtcagcaccaatttgctccaagtgagctgatatgtgcaaaaatcaattagcatattaacataaaaatttctttttgtctgcccacacatttatgtgggcatctatacatgtactttcacggaagtttggtgtaaaaagcttaccagcaaaatccagaaagcagttcaaaaaggcaagtctaacagatatcagaatttcttcaatatgcgcaaacatatcttcggatctagcagcttcaccttttaaagatagaatcatcctggaaaatgtatatacagaaattagcagccatataaggcaacatcgctgttaaaaaacagaaattggtggtagacaattgcatatgcagttctctgattgtctctgaactccatatttatggttcattttctgagtatcataatatgactagtgattatggtccgagcaaccagaatcataaaaatggcaatttggcagcttcccattcttctctaactagagagagaagtagaacatcaaatcctagggtacggtctagctggaatcacagatatctagaactcttacagaataatagcaaaaagttgtaattattaaggtacacaaggttaagtatttgtatatacaagtaagtatgtaacaggaagatgctagaaacttacatattaatttgttccatcccagaaacaataattgaacgaaatgcaaggggcaggtaagagatggaatatggagatctgttcctttcaagaatagaaactggaatccacgtctcttcctttgatatttcttctgtagacgctctcatccaagagcagagcctttggatgtatattttagtgatttccaccttaacttttcttagtgccatgactgccacaaccaaagagttacataatcgcagtatacttcaacaaaacaacaagctcaagcttaagacgaaattcaaataccagcactatggggagctgactctttggcctcaaaagcttggcatgcttttgatacttctttgattgtatcactcatatatgggtggagaatgtatgattcgtcaaaatcatgaaaagtgctttgcacctacacaaaaaataatagaggaacgaatattagaacaaatgcaaggaac

SEQ ID NO: 1142 - DNA, 91825 bp, Arabidopsis thaliana
gaattctaaaaacgataaataaaacaaattatgctgaatatatcaaatatatgtatatgtatttttttgcgttaacttagccaattaaacacgtaacattcgtgtttaatgtttttaatttgcctaaggcaatattttattttcgtcaaaaacaagtaaccgaagacacttgtttctttcgaaatcagtactcaataaaataaagttttgtgtaagactaattttagagattctcttagtagttgaccaaaaaaaaacaaagatgttttacatcagattcgaagtaccacagtttataagtatgccaatacgtgtgattgaatacatcaatataattagatcttatcttacatatttgtggacaattaagtcggtatttcgctaagaatgttttttttttttgcaaatcaaaatgtgtattctatgacaatataaaaatcatatacacaaataaatgatggctaggaatcgaaaaagatgtgtcctcgtgggtttttagaattgaaagcgtcaaaaaagaaacactagagctttcagatttcaagtatacagcgaagagtaatgagatgccttgaatatggaatgggaaagtatctcagtatggcgtagagtaccaacgcgttatggtgtatgaatgggaaaaaatacattcattcaaccatattttatactcctaatatttatatttattcgtatcgtgtgattttttcattaatgtggacaaaagttattgagtacttttaggttttaactggggatccacccccagcattaacgtcggcttcgagtaccgaaataaaataaacggtgtagtaatgacgaaataacataaataagtgtcgaatagctccaacacgtagaacaaacgcaagaaaacaaatgttaaatggtcagtttatgaagatataaaaacaaggagtatcaaacttgaattaaggttttaagaacattttgagtgattcaattgcttcttttatacaaaaagtttaaactcagattacgtacgcccacgttcccttgaagtatatttttaatttttcctaatgcggttgtaatatatttttataaagattttaattaaatggtgatcaaatgtgttagatactctaaccaccacagccgtggtaactaaccactgaccactcgtacgtataatacaattttagaaatatacatacttaatatgtggtgtattaggtatttttgtagcatttttttttgttaaaatgttacacgtttgaattatgaagtttacgtgcacggtcgcaactcgcaatatagtttttatgatgtttgtggttattcgaatgacaatcatgtcctactactagcacttcaaatcaaagtacacgaacctatagcctataggatgatgtatgtctatttatgcgaaaccaaactataaaaaatctcgattatttatcaaataaaatattagacctaatttacaaatggcggacaaaaactcaactttaaaatgtaaacctttggcactatcaatatcaacataaaaacgttaaaaaaataacgcaactttagaatttcatatactacttgcatcaaccatcttctgtatctatcactatccgtatgggaatataagtatcctttaaattaataaatcatcgcaagtaggaagagaatcaatactcgaaaagatataaaaaaaacccaccaagacaacgatcatctaatcacagaagagaacaaaattcttagaatcataaaagtaattaattaagtaagtcatcaaagacaatcacctggaaactcgcttcctaatcaagatttctcgataatcctctcaatcataatcatttctctactatcaataaaataagtaaacaaaggtagaccataaactaatcatttggtcttctactattaacgtatgaagtagcccatactatatcatatcgctttaaattatacaaagacaaattcgaaacaatctcgagtacgtatgtattattaattttatgtttacactacggtgtcgttttcaaatttttaataatattgtgggtttctttttcgggctggtgggctttttgtgtccgcttcccaatacttttattttataaattaaaaattaatcatcgtctctcttgtgtctctctgttcatcacttttcttcttttgatgttcttgtagcgtctgtacgaaatctcacaaggtttcttcttctcagatttagaaatacttgtgtgatatcttctgagtaaccaaattcttgataaagtttctagctttattcaaacccatttgaaaaatccggtggtgaatcgccggagaaatgtgtttttcgtttctccactgagttttttttgttaagaaatctgttaaaactctagatttcaaacgaatgacattttctgagattgaggaacattgtgaatcgaggactggagtgaagattctctgatgagtgattcagaagaagacgaagaagaagaagaagctagtgaagtcattttaagcagcgtcgttcagaagaagaagaagaagaatctgcgtttcggtgaagaagtagagagacgagacggtttggtgttgttagctcaatctactccaatggtgagatcgagatctcaaggaacgactcggcgcgtgactcccacgcctttagtagatgttgagaagccgctaccaaacggagatctttacatcggaagtttctccggtgggtttccacatggatccgggaagtatctatggaaagatgggtgcatgtacgaaggagattggaaacgagggaaagcttcagggaaaggcaaattctcatggccaagtggagctacttacgaaggtgaattcaaatctgggagaatggaaggttttggtactttcactggagctgatggagatacttatagaggaacttgggttgctgatagaaaacacggacatggacaaaagcgttatgcaaatggagatttttatgaaggtacttggagaaggaatctacaagatggtagaggtaggtatgtgtggagaaatgggaatcagtatactggagagtggcgtagtggtgtgatttctgggaaaggtttgcttgtttggcctaatgggaatcgatatgaaggtttgtgggagaatgggattcctaaagggaatggtgtgtttacttggagtgatgggagttcttgtgttggtgcttggaatgagagtaatattatgaggagtttctttaatggtgttgagaagaatgatttgattgtggggaataggaagagatcttctgttgatagtggagctgggagtttgggaggtgagaaagtttttccaagaatctgtatttgggaatctgatggtgaagctggagatatcacttgtgatattattgataatgttgaagcttccatgatttatagagataggatctctgttgatcgtgatgggtttaggcagtttaagaagaatccttgttggtttaatggtgaggctaagaaacctggacagactatttctaaagggcataagaaatatgatttgatgctgaatttgcaattaggaatcaggtaaatatctcaaatttggtggattggtgtttttgtttggtgtgtgatggctttctctgttgtttctaatgaaggttgtgtgtgattgaattaggtattctgttggcaaacatgcttcgattgttcgtgatcttaaacagactgatttcgatccaaaggagaaattttggacaaggtttccaccagaagggactaagacaacaccgccgcatcagtcagtggatttcaggtggaaggattattgccctttagtgttcaggtaactttttagcttttttatttttatgaaaagtgtttcaatttagcaaattgctgaatgcgttttaagtttgatgatgtggctatacccaaatttgggcttagttgataagattgtggacgtatttgtgatgaattgtgtttctttttgggcaaattttgtttgtagacgtctcagggagcttttccaagtggatccagctaagtatatgctagctatatgtggaaatgatgctctccgcgaactatcttcacctggaaagagtggaagctttttttacctaactcaagatgatagatttatgatcaaaacggtgaagaaatcagaagtcaaggttagtagttgttggctcttcttgtttttgacctttctcttgtcatatttgaaaatgcttgtctgttcaagttaatttacttgattagcggatgggacaccctttttgtttgtttgtttctttgctttcacattactttctcaatcataaactccactaagtctgtgattagctaaagaaatttgacctgaagtgtttgtcttcttctatccaggttcttctaagaatgcttccaagttactacaaacatgtctgccaatacgaaaactcccttgtgactagattctacggtgttcattgtgtcaaacctgttggtggccaaaaggtatgtgtttgttcatctaaagcttcatgggtctcttagtgtcaagaaaatttactgttttgtttaccatttttgatcagactcggtttatcgttatgggaaacttattctgctccgagtatagaatccagagacggtttgacctcaaagggtcttctcatgggcgtagcactgcaaagcctgaaggagaaattgatgagaccacgactctcaaggaccttgatctcaatttttctttccgtcttcagagaaactggtatcaagagcttatgaagtaagctccatgcttctcactattttttgcgtatgcaaagtattcagctacctaaacatatgctaatgctgatcggtattcatgatcaggcaaataaaacgcgattgtgagttcttggaagcagagagaataatggattatagccttttagttggtgttcacttccgtgatgacaacacaggagaaaagatggggctttctccattcgttttgagatctggtaaattatacatcattgatcattctctatatgtgtccccccgctgaagtcgacctatcgtgagatttatgtcaatcttatgcaggtaggatagattcatatcagaatgaaaaattcatgcgcggttgtcgcttcctagaggcagaacttcaagacatggaccggattttagctggcaggtaacaatcattgatccgggtttcatttttaatgttaagaagttgacttcacagaggaagctttttgcattcatagccattgagacatgaagtggttgagagattcaatttcggattaagtatataatatatgtaggaatgattaaatgtgcttggcaatcttgtgtggggagtgtttaaacaagtcatgtggtcctgtttgctagaaaagaatcaatcaattcatgatccatcaatttttgcttaatattcaatcttgtgttaacaggaaaccatcgatcagattaggcgcaaacatgccagcaaaagctgaacgaatggcccggagaagcgattttgatcagtattcatcaggaggagccagttatccatcacacggtgagatgtacgaagttgttctctactttggagtcattgacatcttgcaagactacgacataaccaaaaagatcgagcatgcgtataagtcactgcaagccgatcctgcttcgatctcagctgttgatcctaaactctattcaaagaggttcagagacttcatcagtaggatcttcattgaagagggctaaagacaagaaggctaaagtttttaactaacattctcggctctacggaaatgtgaagaaagctgcgcgggaagagtaaaaaggtaaatctcaaggatagaagaaaagcgatttcggaattttatgtttatatattttgagatgaccaatcaagtttttgggttggggaggggctttatttatttttgtggtgagccgtttatatatataatatttatatatgtgaatatagattgaaggttttagtacataggcagacaagaaattacaaggaaaaaagggtttggtaaattccgaaaatgtggaataaagtaaagtgtacaagtaaaaaaatgaaagatagtaataccattaattagttctcttaatcccatattctcataggatccctccttaaccatccaaagttaaggggtccattattttgttgttgtttattttctttcaatacaactttaccacttgcataatctatgaacctaaagcaatgtcaatggtaaacagtaaatgctaaaatagttgattagtaaaatagtatatggtcaaagaaggaagagttgaattggggttggtttcatgaaaagtagataaagctaaactagcacaccacatgtcttttctttgcattctttttgtctaaatctcttaagtctagtttttttcatatgtgatagcttcacaaagtataagactgttattcaaattaaagtcttagatcttttaataaaaactaaaagtctaagaagcctgaaacggtttgtttatctatgaattcatttaattacgcttggattctgatcaacaatccattgcatcatcgttaattctcaaaaaaactaaaactggttttttcagacttgacatggttttatattttgtttacattaaaagaatttgtatattttttctttccaaagtaaacagtagtgagtagacaattattgtttttcattaagtttaatactttctacagtccatataattgctttcattggtaataataaacaactcttgttgcaaaagaacatgttaatgcacattagcaaaagtaattaatcccattaataaacaacatatagacatgagtcacatgatattctattcacagatccactagatgttaaaagctgacatattatctaagactacaatgcctagaacttaatagattaataccaatttggaatttgaaataagcaattaactaacatgtcatgttctctcagattctagtgtccgaaatcccaaagtcataaattaataatagtctttgtttaagataccctgagaaatcatacttatcgtagtcttaaaacattgcattataagaactgagtggtgcaaacatattttacgatagtcatagtgtgggtttggattaggaaaattcgatttaataaaaggaggatgtagttttcatggattcagacagatggggtgtcagatattgacaatggaggcccaaatgaagacaagaagaatgggaaattagggattggtctcaactttgggactatgtttgtctgaagttgaaaaaagccaccaaatgtgcccattcgtgtatttttttttaacaccccaacataatgtcccaccatgaaggggacatctccccttagctatccctttctcattattcttgtatttctataattctttcgtttgttacaaacaattgttataagaggtataatttgtagaaagatatatcaaaagtaatcactaaataagtaagaatcgtagacgcattatccttatactaatgatgttgtcttcacttcctcgagaaacctcgtgactcatgacactattttaatatacatgcaaattgcaagacattggatgttgcgtaggtggtcattcttgtataataataatataatcatgaaagaaaacactaattaaggaaatatccattcttaagtttttcatatcttttatattattcaaatatgtatcttcataataattcttcatattttttggtatcattattcttcatggttatgcttcatatttctcctttttaaaattatcttcctcactcttttgatatatacatagcctctttcaatattttatgagaattaattgggtgatgttggaaaatattacaagacatggttatgatcaattaaacaattctgagagtctaaacaataatgctttgcaaccatcaaataaacaaggttttggcaaataaacaacggtggcaaagagatatcagaggaaatggatccgacagtttgatgaaaccctaggaagcttcataagagcattggtgattctcaggtacgtattactagcatcgttgtcttctcggtgatccacttcaacgcgcaccttgacagtctccagacatttcaaatttgccaagaaatgactcatctgcttctgctcacgacaagttccgcgataccctataatctttaacaccttcacttgacatgtcaataaacaacattctcccctcgtcttcttacggatgcaaaggcaggcgtccccgcatctactagtaactttgtgcacaagtccctgaaatcgaaaggaagaaattcatgtaaagcaaaaagaataacaagtgtgtgttttgatcaacagaaatttgatatatacatgtatttaccttgatgactaaagtttccaggtttggagagctgttaagaagaagtggcaccacttgccagcctctttctttgtcactctcaaacgataacttaaggaggttttgaaacgccggcattactttacacagagagtgaataacctgatttatatcacaaccaaaaacaactcttgttagctagcttcaaatcggaaaacaattaacacaaaaaaaaaaaaaaaaaactgacctcaagagaatctgaagacaagtgaagggtcttaacattgcttatcattgcaattagacccgtagcatctttcgatcttttttcccagcgaggaccataaccatcaaaatcatcatcctcttcgtctgagtcaataagttgctcccatggtagaagattgagtctagcttcttcaagggaacccatttcagcggtatacctacgcgcgacatgaccagaatagtcaaggtacacaagactgggtgtatcaaaccaaacatatatgtgcgtttcagggtaatcggggtaatcgtgactgatggtgagtcgcttgatggaagggctagagactttcccattccaacccgggggttggtcatcatcagcataatagaggattaactcctcaagaacagggcagccaaggacaaaatcatcgtacatgtcacaatctgcaaacgcaactaagactatagagagtcttttgagcgctgggaaaaacaaacccccaggaggaagttcaccctcgggataaagcgcaccggatattgtgagctcaaccagtgtgttgctagtgaagaactcagtttctacacgatacatacgcgaggactccaagtgaaaatccaacacgcctcgctccagaactgtgcgaatccaactgtaaaacctagattctccatgcagatgatcacaattcagatggactttcttgatgactgaacaaggcctgtctaagagagcaagtgttttttccacgaaatcagggaagcctaaagaacagcgaccacttggatgatcttcagtcaattcaagcttgtccacaagcggaagcagattcctccacctcttcgacagaaccgatgtggttgcagcatgatgtgtcggaagaaaggacaggattttgccaagaatctcatctggcgaaccgctaattaaatctctagctactctttgggcatgcatagatcaaatgtttgttttcctcgtatagatattgataagacccgagatatagggtttataactgaacttcttatatatatcttaatatataaatatgtcaactgatggattagattgccatatgttttagaaaacttaacttttttttttctttaatcaaataggtaaactaacaagaaaaaggaaaaaaaaaaacatatttacactaggattttgaccggcaaagtaaattcgatgatcatttttttctcttttttgatttaaggtttaagtcaagaatcccagatgaggttgaggaaaaacgtggtgctcaagtaaacagtccatggtccaacatctaaattttgaaagctgaaatcgatggctgcctgctacggagacgatcagactaatatcttactggatgagtattttaaccatgaaaggatgtgtgcatatcgatagtaaatcgtagctcgattgctttgcagattattaaccctagtggcttgattcttaacgaatgaatgaacaacacaaagttaagacgacgccgcaatataccaagttatatcaagatgaaaccagattttggtacatctcggtgagtactagaggaatccactatcttaagctccggtgaatcggagaatcgtgagaagaaaaaaagaaagagaagataacaaacttttcttattgtttattaagtgttcgttacaagagtttaatctaattaatgtcttatataaacacatataattacattaaaccaacatttagttaaccgaagttaaccagacattgaaccaagtcaccaacctcttacgcaccgctttcaaaggctcttcctcactgtgagatacctcaacgttgccacaacgaacagtctatcaacaatcaactcatgtcgaatgagtaatctttgcttttaaactggttatcgaacttccaaagctgttttaaatattaaaaaattagataattacacaagttaaataataagtatcaaagcaaatgcaaaaatacaaatctaaaactcatttgaaatttctattcagtatgtgagaatcttttaaatttcaggacaacggcatgatcatgaacatcttttccaaattcgacaaacaaataactgaactatagaacacaaagaagttaattgtatagaaaattcctcacacagttagaatagtctttaaaaaaaaaaattaaacaagcaattgcaaaagaagatttgttgctcaaaatcgtttttttttaaatgggttaggccgaaaagataaaggccacattatcaaaaaatcaatcacacagttcttcaattgtggcttaagtgatgaaaatcgagtcctaagagtcacaccaaattaccaaatattaaacttgagtctaggtccaaagcaaattataattaatgtttgtttcgccttgaagatcaattaccatttacccatttgttctaactccaatttcgcctcttgtaattggttcatacagctaaatgcatcatcagtcaaggcaatatttgcatttaaagatctttttttgatgcaaattactgcaccctaatttacggctaataaatatataaacattttctatttattagcgtcattatactatccatggaccatataccaaaaccaaggatggtgcaagcaattagagcaagccaagtagaaaaatcaatcaaggttggcggcaaaattgggaattggaaaatatattcatccaaaataacaaatctggatttttacaattttgtttggtttgatgatagatttttaagggaaaaaactaacaattatgtaagaatgggaatcgattgatattttatgtgtctatattgcagttttacttttaaaaattgggcaactttaatttagttttttttttttatatatgcattaataaatatacatatatatacagtatatatttttgaacaaataataaatatttgtataatatttttttttctttaaaaaaggctttacaatatagactcacttttgtgtgaagtatacagtattaggattttctctcttacagacaacgacgagaaagaagtttcattggcgtctagctaggtatcccacatctatgagtttcttgtgggatattatgcccattgataagcatctgtcaactgttccagaaaccgaaggttgtcagcagagaatcgaaactaggatctgtgctttgcctgacgatttgctcttgcagatcttgcctcacgtcccaacaaaagaggcagtcgccacttcaatcttgtccaaacaatggcgttatgtctggctgatgctgcctaaactcgagttcaaagacgaaggcagcgagagcgttgggtggtttattaaaaagtcattgcaactccataaggcaccgaaactagattgtttgattgtcgaactcggtccacattgtcctattgacgtcgatgtcagaaagtgggttgagaacgcagttaatagagatgttaaagatttagatttcacgctcctctggagcgcagcgcctacaagctttcctaagagcctttacacatgtgacacgctcgtttgtttaactctatccaaccagattctggtggatgtgtcttccccggctagtctaccatctctcttagatttgagtcttcattacgtggtgtataaagacgatggctctcttgttaggctcttatcaagttcccctgttctcaagaggctgagtgtgcatagtcatgaggatgacaacttaaaaacctttaccgtgaaagtttcttccttagaatcattaaattatgatgagaattggctcaaggatgaggtagaggataatgaggttgatgaggtagtggataatgaggtagaggttgatgatctcaatggatcgttggtaatagattcccctgcattaaaagaattgcacttatctgaggtttgggactattgcttgatagagaatatgtctttccttgacgaggcattcatcagcaatgttccttaccccgatgaaaagtttctgagatctctttcttctgtcaaacatctcttcttactgtttagcaaatcaatggtagctatattatatatctctgtacctcttctttgttccttgttgcttaaccaactataatattaatttttttctatcacacgcaggttgcatgctgtaacgccatcaagttctcctggctcatagagttttacttttttccaattagtttggtagattggttgatgccgcttatgtttttgcttcaaaattctcctaaacttaaaactcctacgattgacaatgtaagttttccatcctccttaaaaataagtgcatctagttttgatgaacttaatatattgtactgataccaggacttcgagtgtctctcactttcctggaaccagccgagttctattcccggatgcttgttgtctcatctagagacctttaggtggagaggctatggaggaagagaagatgcgaaaaaactactgatgacatacattctcgctaactcaaagtgtttaaagacagtggagatctccctcttagcaacctgcaatcttgaagagacacaaaaggagttaaaatctatgcctaggatttcacaatcatctcaacttctaatctccactaaaaagttatggagaattaacgaaagaacttatctttgatatatattgttactaatctatttgtttaaactatcatttaatgattccgtttagttaattacgagttcatacatagataatactactttttaaaaacctcaattgctaggttacctatattcgagagaacaaaactttagagatgatggaattctcagtagcagcagatatccagactgttttcacaagaactgaatgagagacttatgctgacaagctccacaagatttgcagaaatcttaagtgaatctgaaaaagtcttctatagaaaaaatatttcaatttctaatggctgcagatgttcagcttatgtttacaaagatccagtctgacatatgtatcaatgaccttgcagaacaacttaactgctgctctaatagccaccttgtacacagttgtggaatctttccttaagcattttctagtcaacgaaacttgaagtcttaaagtctgagctagagtcttccatggctaaaagtagagctcttggtgatagaaatgatgaaatgtcagttgaactcgaagagcacgcaactagggatgagaatgcagaaagaagttactctaagagaagcttatgtgctcctgaggtcgagcaattgaaatattttctgtttgggtatgaagaagaaatatttgacggtgttaaaagctgaggcggaaattacagttgagaaactaaaagataaactaaccgcgctatatgggcaaggtgccagtgagcttgaaacactgaaaaataggtgcagtgatctcactcagaagctctctgagcagattttgaaaacagaagagttcaatgcaatcgcgctcgtgagaaggccgactataaagccccactaactccacagcaggagtcgttgagaatcattttcatcaaggaacagtatgacaccaagctgcaggaactttaatatcaactgaccatgtccaagaagcatggtgaggaacttctgatgaaattacaagatgccattgatgagaatgaagctaggaaaaaggcacaatccagccaattaaagagaactaaagagctggaggataaaatattggaactggaagctgatcgacaatctgttatctatgataaacgtgagaaaaccacggcttatgacatgatgaaggcagagctggattgctcattattaagccttgagtgctgcaaagaagaaaaacagaagcttgaagctattctgcaacaatgcaaagaggagagtttgaaaatgtccaaagagctaggatcaaggagagaattagtacaacgttgcagctctcataaaaatattgagatggaagaaaatgatagattggacatggatgatcaaatgtcggagttggatgacaataatacaactgcagtctcttcaggcgaaccataagcaaaggaaagttacttgttttgatcatcagtcccaggtcagtaattcaggtaaccctcagttggatcccgtttggtagttaagaacattcaagttcatggtatcatagacctcctgttaaaattagttatgctccaaccagtgatgttaatagcgaagaaagcctagctttaatcaatgataatttcagggcagagaccttaaggtctagcatggatcacctaaacaatgaggtaatgctggatcaagggttaaaattttctagttaaaataataggaaatgttaatatcagtgacgtagtttggattggatgataattctgaattacactatctgcatgttggttagtagaaagattcgtcattggatcttttatttgtcatttgtacagctagaacggatgaagatgataataatttagacaccagatttccaggtttggaacaggagctgatacagttgcgtgaggttatagatagcttaatgtaatcgttgtttattcagatatggggatctcgaaaagatgaagtatattttctgtattgtattagaaaaactgaaaacctttaattaaaagaatgaaaagcttagttgaggataagaacacacagatataatggtggcatgtcttcttcattactaataaatcttatgttatttcactattagtgaaaattgtatattacaccctttaaacagtatctaaaagccacatttatatataccaattctcatagtctatcttctgttgtgggactgaggaaaaaagtggcgaaacttcccaacaatttccctcctcctcagcaggtgggcaatcccatatgacctatattgacaagtggacaccacatagaattatggtatcaacaacacatcatctttttgatttttttttaatcaaaaagcatcgacaagacgtaatcaaaagtagatagacataccttcaagtgtttccaataagagctagtattcttccgcacgtgagttatgataccgtccttaagaatccgactatgtaccccttgagtggtatgccaacaatcatgtttgtccattgtgccgtttacagtaatcatgtgaaaattagaattaataccaagtgatgaccgtataattaataccatgcaaactctatgaggttagcaattctactatctcaaaaaactaccactcacacattcaagtgactaaattgtgtttgatacagaaatcatactagtttatcatcaaaattatgtactgaatttgtgtaatactaatactattgattcaaacctaataaactagcgtttatattggaacaaatagtgaatgaacttttggttagtttccaatacaccaatcttcaaaaatccttataatggcaaactcacaaaagcaaatctcttctttaaatatagcagataattccaatgttttatctagacacttttcttttggttgcgatagattctccccaacaaaatacactttttggagttttaatttattaatcttcgtttttttataaaggagttttattaatcttgcttagttactattggtcgctcacctagatttttattagtctataaaactataatagtcaagaaaaatatatataatgaatcaatattacgtagaaaaaacgatttggcaaaaaaaatcatgtcgtcattttaattggtttaaaattttttacgttattttaattatagtttaaactctacatacatgaatgaatatacatacacacatgatattgatactaagatgacgtgaatatcatcatctgtcttgacaatttagctagtgaatcccagagattcaaatgttgagatctttcagaagctgccaaaagtgtggaacttaattgattcaatccacataaaaaaattaatagcatacttagttaagttaaagatccacaagcatggttgaaaaagttccaacaaaaattaccttgtaacttgtaagagaaacctctagtctttttttattattataaaaagcttaaatgtttttttacctaaaatattcctccaaaattatgatggctccatttgcctataatatggtaacatcaacattatataatgtaggactcaagaacaggtcagcgagagattaaatactcgtacatgtcacaacaaacgcagttgagactagatggagtcttttgacctctccaagattagagagagtcttttgatctaaaacataattaaaaaaaagaaaagaaatttacgttagataaatattagagtaagaatcggaaccataataattatctgtaaacagaaaatcctataattagtaccaaacacaaaactgaacaaaatccgattaaaccctagatccaatccctagaagagtccaccgcctctataaatataaagtaaataattagaggacaacgttgcaacaaggagaagaaaccctaaaagcatatctcgtattctttgtaatggtcgaaaaagtatccatcaagcatgaaatcaactacaatcctaaacctgaagacgcaggacgaatcaaagtctatgtgagtatcctaatgtcggaagatcctataagagatcgtcgaccaatactaacattctctttgcctgccaaagaatttcgggatagcttcccgagttatagatgggaacaactgaattgcttagaggacgatgaacgtatcgatgtctctcaggttgatttagcgaggagggaactcagtagacttgtcacccacctcatgttatacttgcataactatcaagattgtgctctgtcaatttatattacctttaagttcattagtcgtactcgtgttaggattcttgaacagtgtgtactatcggaaatgacgacgacgtcgaggatattcgaagacgaaaaggatatgtggctcccagtcgatgagagcgtaatgggcatcgaagagcctaactggaacatctttcacttgtagaaaaggaaacacaacaaaagtgttaatctccttattgctatagaatttagatttgtttcttttccctttttttttttgttttggtgttatgttttcttataaataaggctgaagctcgtttgtgaacttcatccaagagtttggaggggatttagggtttatcaagaagagacatttgggagttgttggtttggtgtttgtttgaacttcatccaagaggttgaagctcatttttcttatgttgttttctattatcttaataaaggttttgagtttttgaattggttcttagctctaataaagcaccactgatatccgatttagaatgccaagtaaattatacaagaagatgaagtctaagctcccacaaaatttcgttttgatgagtttaaaatggggaaagagttgtgactttaccctgtggacacgagtttgacgatatataattgtatcctcgagttgtttgccaacaaatcatgtttgtccattgtgcagtttcgtgttaccatgtgatagttagatgaaccagtactcgggtgaaactagatctagaatttagttcaattgtttaagggttttcaatctttggcattttaaaagtggagttttaaataaagtaattggcacatgtaatcgagtactgtttctctattcctcaaaaataaagattgctcatctttctttcttgttttggtttcaaggttaatatacagactgaaattataatagttgggttcccttaggtaaatgatgttacatttaagaaagttgcataagctagtgattgtgattgttgtacaagttgctgaggtaattgagatggtggtgttgctgcaagttagatgactcgaaatcacgaaacgaaagagatatgagagtatatgaggactccatcggataaattcaatatgaaatttcaaaaactacatagtcaccattaagaaatagaattgttcatatcgagcaaaatgtttataagaagcaagtatgtcacgtctgtatctatagaaagtctcattctttctttttagtttttatttttccacaaataaaacgagaatattgaactaaaaggtcttcctcagcgtcttttctcacatttgtataccttttggttctttacaaaacaaaatgttcatcttctcttgtgtctttctccgatctaagagagttttaaatttgcgtcccacacagctttactaccttcaccacacatcacatgaaccatccacattctatcgactgatctgcatactccactacacttccagtcaaatgtagccacacacatttcgccagcctctgccctcatttcacagtctttgggaaagagagaaataaaaggagagtaagaatatgagaaaaactcaattatctttttttttttactaacttcttgaggcatattaaaaaaaggaagaagaaattttacctggaggagtaccacaacagaaattacgatcatcgatttgctcaacctcaagaccgataaaccatgacccgagtgtcacatcttcatttgcatacttatgcaaaattggcctgcgaagtcaaacatcaaatgttatgtttggttgatactcatttcccttggtaaaacatatcttaccttgtcgaaaatccaaaaaccataaagttggtcacttactggttgttagatatgtatgtggcaagatcctttgatatggcataaatctgtcccgtagcatgtcggaaatatttgttaccttcttctccaaatttccaaaactcgggttcacggtacttggccgtcctacacattttgagaaaaaactggttagaaacccaaataaatagaatagaatattcaaaaaaatgatataacaacacacacattaggattattactttttggtaaggacaggaccggatttcatacatccaatgtagacccttggcttagaacggtgacttgctaatgtggaagcaagcgtgcctgaaaaagcaaagaggtgagcaaatatattcaacaattttagttcaaggaaaaaatattataattttttttatgctagaaacatattttggtaccaagattgacgtgaacatcatcatcaatcttgacataaaactcagcatcccactttgcaactgcactagagaagaagcttttggtttttgcagatagattgtaatatccttcgacatgatcctgcaacgagttaaaaaataatcaagaaaaccgtaaaccaaatcctagaagaatcaagtttgtagtggtctaaccagcctaaagaaatcgttgtattgagcatcttctgaatcaatctccttatccaacatactgtttggcgttgaactgccaacacattaaagtaagaatcttagtctacttaaacaaaaaacacacattagactacattgcattcattcacctgtgtccaatcataaatttgacgacaattcccttctctttttccaatttctcaagcttttcccctgtgatagatgacatacaaaagctaaataagattagaggcaatgaagcattgaaagtaaccagagatttgaaggatggacatcacagataccttgaggcatccaagtctctctaagcgaatcgcgacgttttcgactgctaaatgcagtattgataccaatcaccataaaaactttgttcttttggtttccttctgttgaagaattggttgctgagacattcacaatctgttgagggctatgtgtagcagagagctgcttctgaagcatagaaactgacttatccaatgatctgttgtctcaacacaagagtatatgatcatcaaaatattattaatcaacagcaagtttaagattcacacaaaaaaataatcatttctcactcactcgattgctttatgagtttttaaaacctcttccattacatcattgtcttgtgatttcttctgtattttggtgaaatcaaaagattgaaaataatgagtttttttgttttaacaccaaaataatactcataggagaaattcagattcaatgagattaattgttctaagaaagatactttctcatgagcataatcttgggtaacaatcttaagctcctgatcacgccggtgctgtaaaatgagctggctaccggaatccgacgaagctgatcgtaatctgaaaatgcaacaacaacaacaacaacaaaaataatgagaaagcaagaagacatgaaattatttattgtgtaaccgtagaaagatttttttttttttgttaaagtaaccgtagaaagattgatgaagaagaagaaacagaacttggaggtgaagattgctccgaggaaaaagcaagaaatgcaaagaagaggaacccatgtcatagtaagtctcttggagactttgttgttgtgcttcattgtgagcacacaaagagagacgatcagagaagagagaagaaatcttttaagacgtataattttaacaaacggaaaggcaaagttgttactacatgcagagaaactagtaacactctctatataaattaatatttaatgcaagtttgactgtttaattcaaagtatctaatatgtcaattgatttacttccacttatgaatttaaatacatgttcaaagaaatgaactctttgagtcttgactaacaaaacaaattaaataacctgatatggtttatttattgaattatattattatttttcaacgcttaaaccacaagtttgtgatatttttggaaatataagattttttgttctgttttggaaataaaatattcaatattacagtttaggaaaagtctcataaatatttataaaactttttattaacatagattcgtttttagttttgcatatttcatttggttttgtgttaaaaaaaatatatataaaaattaggatcacatgcaaattgtattcactagagaaggagatgcgtgtgattcaactagtttatttatttgacaaatagttttcttttgattatacatttaaattagatgtttatttcgttatgttcagatgaatatttttttgaaattttcatgtaactattttcaattattaatttatttatttattttcaaaaaaaatattttatttttgtgattggtttggtttgcaagtaatatatgattgtaaaactaaaccaatcaaaccgatgtaagtcaccggctactccggttgaaaagtatgcggcttctagaatcagtctcaaagccgtcatcacctattcagccggtaacccttccaaattccattttcgttatttccctcatttgtttttctcctttccccaattctcttcttctcatccatagcttccgacgagagagaagaagcaaagcaaaattcgatcgctctgggtttttgatcttttagggtttctggcaaatttggatggaaacctcaactttatccaaagataatcataaaggaagaagctttcgttgttgtttccattgttgcagctccttcaaaaactcttgtctctattgctttcacagctaagaattctcgattccatcgttgtcgttttcgattttgacgaaattgggttcttctagattttggttatggaccgtatagctcaatcagatctctctttaggattcggtagctcccacgctttacctctacctcatcctcctagaatcccaatcgctgatgactcaatcacgcttcagattgattccagcttccgtccttcgtctaatcctatgcctcctgttcctcttcagttacttgagcagagattcgatgtcaccggatcctgtagccgagttgttgaggaggacgatgaggttgttggtgataatgatgatgatgatcaaagagaagaggagcaatttattctcttgggtcatcctatgaagttgaaacgaggtagaggtgggaattcgtattcattggcatcatcaagtccttgtaagagatttgtagttgattcagggattgaaagtaggcgagctgttgttagagcttggggtaatcagtcgattgaagaagctgatcctgagattcatgagtttatggaaaaggagaagcagagacaatttagaggtattgagcttatagcttctgagaatttcgtgtgtagagctgtgatggaagctttaggaagtcatttgactaataagtactctgaaggaatgcctggagctagatactatacggggaatcagtatattgatcagattgagattctttgccaagagcgtgcgcttgcagcttttggactaaatcatgagaaatggggagttaatgtgcagccttattcgtgcacttctgccaatttcgctgttttcactggtcttttgatgcccggtgaacgaattatgggattggattctccctcaggtggtcatatgagtcatgggtattatacaccaggtgggaagaaagtctctggtgcgtctatattctttgagagctttccatataaggttgaccctcgtacagggtatattgattacgataagcttgaggaaaaggcgcttgactatcgtcctaagatacttatttgtggtgggagttcatatccgagggactgggaattccctaggtttaggcatattgcagacaaatgtggagctgttttgatgtttgacatggcacagattagtggtcttgtcgctgccaaggtatgttctttctcgttttccatattgcgttatggattgtttgtcattaaacttgaagcttaagcacatgatctttttgtttactcagtgatatttattaagcctacttttctttgcattctcttgacgttttggtttctgtcaatgttgtaggaaagtccaaatccattcgattattgcgatattgttacctcaacaacacacaagtctctccgtggccctaggggcggcatcatattttacaagagaggcttgaagcccaagaagcaaagcataaatcttaatcactgtgagagcaatatccagtatgattttgaagaaaaaatcaacttttctgtctttccatcgttgcaaggggggcctcacaataaccatatagctgctctagccattgccctcaagcaggccgcttcaccagagtacaagctttacatgcgacaggtcaaaaaaaatgctaaggctttagcatctgctttgataagcagaaagtgcaagctgataacaggtggcaccgataatcatttgcttctctgggatctgactcctttgggcttgacaggtatgtgattagttcctcttattcttggcagataaggaaattactcgcactatgtgattcattgccttacgtaagctattggcagcattgcaactgtgtctgattttccatggtgttagatctgcttaaccatgtgtcatgggtctatagcaaaattttaccagctatttgagacaatggctgagtttcttagcgtatctcttttttctcatctctctaggttgtggatagcctacattactagcttgatggccaatgatcagtctgaaatctattataaaacttgtttgagattgtaactaaacttatatgtctaatttaccaaaatcaaagtctcacttttttgacgtctgtaccatgcatatggtttagctgtgtgtccaaagacgactcaaatcttccgccttgtgattttttcaggcaaggtgtatgagaaagtttgcgagatgtgccatatcacggtcaacaaagtggccattttcagcgaaaacggtgttatttcccctggaggagtgagaataggtaagcaaattaaattctcaaggaaatctcaacactttggacttagaatgaaactcagtgtgctttgagttcttttttcttgttgtctgattcttgacaatgggctcatgtatcaggcagtccggctatgacctcaagaggttgtttagaaccagaatttgagacaatggctgattttctatatagagctgctcagatagctagtgctgcacaaagggaacacgggaagttgcaaaaggaaccgctcaaaagcatctatcactgtaaagagattgcagatcttcggaaccaagtcgaagcttttgctactcagtttgcaatgcctgcctttgacatgtgagtcagcctgaagaacgagaccagctcaatctctcttcattttttgttgccatggtaatccatacacccatttctctgttttacaatgtcaacattccctaaattcttagtttaatatttgggggcaaaacaaacttgtgtgtgtttctatggtcgtttattcttcaatgcgtgtgtacatagacattgggctgtgttgggtattagtgtatccctctgtgttcttttagaatggtaataataatgcagttgaaatttatttttctagaaaagggaatgatatgctttcaagatgtttatatgttggggaacacaaataatttctgtaaccagaggaaaacttgcttctgacctcaatcattactattttccttcgagaaaatcattatattctgtagaagagaaaaacaaaaaactgagacaaaaggaatatacataattagtttattttgttatgaatatgtattttttgtttctttatcattgtgtgtaagtggtaatgtttatttggtaaatcagctgagaaagttggtgtcctactgaggaggcaaagcatggaattctggtgagagtctctaaaagcatatttagattctgcaatttttattttttttgttttggttttgataatgacatctctcctcatctctattattttattattatttttatcattcatatttcatttattgaattttgtttttaacaaagctctataagtttttgatgaattaaaagatatcaggaaagaaaaggctcaaatcttccctttttttaattgttgcttataatcttgatcatgttcttaaagcttaagtgtgaattttgttgtgttgtatgcactttgtgaagttgattcttggaatgatgagtgttattatgataagagtgtagatagttgaacacttttctccggttataaataaattgttttggactcgttcaagatatttcgataatttaaatgttactatgttagacatgattgttctctattggctttaactttttttctatcggaaattaagagagctaacagtaatgggaaatggcacttttggtacttgattacacatataccaagtgattcttgagggttgagatttacttgatagatagatacaaaaacaaaaaaaaacatatattaatattttgtcaaagaagttctttttgggtagagaaaggagaaagcaaaaaatgagtgaattgtgtataaagcaaatattaaaataagaattagaaacttaaagaagtaaacaaggagtgctttaaaacagtgggtggggatggatttagggtgtgaaattggtaataaatcataattattgacacaaaagccaccaaattgtgtgcccaaagcatatatttagatgagagtgccaaaagacaaatcctgctttacaaaggatccattttcatcattattattgattaacaccacaaaattcaccattttcaaattaatatctctcttgacctcctcctttgtgaatcaaatcaaatcaattctccagttttgatcattggctattttcaatttacttttcttctccaactatctcaaagagacaacaagcactccattttgaccaaatgctttctctttatttaagttgtgctagtagtctaatgatatagtactattagatgaaggtgtatgatcaatttttttttccaataaactttcgcttgattatcgccattttgattagttttagtttcggccttaagcctaccggcgacaaatctaatatttaccgattaattcataaaaatatcgtataaacactcctcacgaaaattctgttacatcttaaatcgtctaaatgtgtcctaatatcgtcttgcacattttgaacatctcaccaactaatataatataatgttttatttctataaccaaaacacatacatttgaactaccatgtcttgaaatcttccagaagaacaaacatcttccaacggcttgaactatcaaaaactgaaaaagcagacatttacttttgatatgattcagagaataactccatttctagaattacatatataaacatcaaaatactaaaatagaccagagtgacaaaaattctcaaatttcaaattattttttttcataacaacaaagtaaaaaagaaaaaattacaacaactccctaccaactgattcatctagagcctaaagcctaacccaacttttttttttttttttcatgtaaacataaaaaacaaaatgtcagcttttgatatttcatcatctatggctgcagaaatccaaaagctttttccttccttcaacaatctcatcgaagaaatcatcgatttgcgccactatactctctgtcccattccttaaattaccaaaataccctttcagattctcaactctctctctcagctccctctcgtcctcctcctcctcctccctctctcccccaccaccaccgccaccgcagaaccgccgctccagctccgctttaagctcctccaacgccgctttgctccggcgatactcgtgcatcaatattcctttccttatccccatcctcccaacctcagccgccactctctgctgcaacctccccattgctccggcgaaacctccgacttgactctgcgtttgcgttatctgcgtctgcgtttgcgttgccgcgtctccgggaaaacagtagacgagaccgttcattaaaaccataaggagaagcgaactcatgttcctcgtcgcgtaaagcacgccgcgaaaaccactgaacccgttttgtaacttcgtcgacgactccatcgccgtcgccgacgtttgttccgaccaaaacggaaacctttgaactctgttctccattaatgctctgttttcttcctctatccctatcgcttctcttctacatcctgatatcgcccttatcacctaacccaccattaaaacaacaatcagcaaaaagattcaaatttttggaaaaagattcgatttttacgatcacccacctgacgagaaagctgaggagagagacgacggtcgagggtggaagcgatcgaaattccggcggaggagaagttttcgacggaggagacggcggatttgatgacgagacaagcttcccaaagtttggagctttcgtccatatactcatcgagccatttgtcaccgacgggaagttgaagtttttgaactaagagagtgagatgagagtgagaggtacggagaagacagagagctctctgtaagaagtgtacggacatgaaattgtttgaaagataaactctttcgagatcttccattgatctgtttagaaatgagtagaatccgttcactgagtttgcacaggacggatccatttttcgagtgttacaaaagaaaagctttcaaagatctgatttttttggattttttgagttttttttgtttttggttggtcgatgatcaatgaaaagattatgaagagagagagagagaagtgaggaaattgggggagagggaaaaaagagagaagagaataaaaaggttatatagagattccaaggtgtgtgtatgtatgtattttatgtatatgtatgcgtatgcgtatgcatgtatgtattgagtgtaaaatgtgtgtagatcaaagaagagtgaaaagaagaagaagaagaagaagaagaagaagaagaaggaaattgaggtttttggttctagtggtgaaagggattgttgggtacaatgatggatgtttcctactgaggagaaaagatgattggttattttgtctgaattttttttcttcttgattttccctcaatttttctttatttaattttaatattgtgtactagtactacaagaaaataaattgagatttgaaattatggagaatgactttttgttgaagaaaataatatatatttggacaatttgtttcatgatttttatcttaaaattgtgggtcttacacttgaagatatgaaaattgacaattgtaatgagtttgtttcttcttgtagaggctactccatgagctctctttttttggtctagggaggaattgattctttgtatgaataaaatctctagttgttcaatataaacacacacaaaaataaaaatctaacaatcatgaatccaaataccttagtattttaatacttttaatgaaaaaaaccttcaactttagccagatccatttttaaaccctaaactatgtttttagtaaaacaaaccctgaactaaaacctgttactaaacttaaccccacagtaattaaatattaatgagatattaatttccaaaaaaaacaacaacgagacatttgtatttagcgcaaaaaccacatgatgttctttaaaactgttttgaatttattacaaaaaacgttttaaattattttgaattgcttaattagtttggattttagaagctgaaagaaagacacaacaatttaaataatccaaagaatcatgcttaaataaatccaaccaacataactatcgaagctgttgcaacacaacaatatttgtcacacaaaaaaacaatcgtttcagagggacaagatattctaaagtaaagacttgtcaagcattaactttgaagagaagattgtattggctgagtgatagggttctcttcatccattgttttctgttttttccttggtcgtccttgaggtttcttgggtggttttggcactgctttacgcttgcatgaacgtttgttgtgtccgacttgttgacagttgctgcaagtctaaatatgcaaagattaaattaaataatctgaaaaggaagatcttgtgaaacataatttattgttctctattttaccatttgaattttttcacgtgtataaggaactttttgaggtggacgatcttcagttggatcacggattctgtcattgttctttggtcgatttttggaaattaatatcccattaatatttaattactgtagggttaagtttattaacaggttttagttcagggtttgttttactaaaaacatagttcagggtttaaaaatggatctggccaaagttgagggtttttttcattaaattccgtacttttaattaaggtatctaatatcatctccgctattaagtattttaggatttgattacaaaactcttgatgttaaactatatcaaaacctatgacattcaatgtgtgtaacgttttctatataattgtatatataaaatacttacatagcttacaaagtttgatttcttgctaaatttatgcattgaagaaaagatagttgagcctaatagaagatctttaggtcttttcgggggtaaaaaaatcatttagatcttttcaaaaggtaatttactttgacatttatacatggtaaagattaaatattgagatattccaacgatcaacctaaaccatactaataaattaataacgtacatttggtcccttttctttgctaaaagctaaaataaaaaacaatgacctattgaatgtttagggttttgagtggggtctctatcttctcatttatatatgttgagtttttagtgttcacttttttaggtgcttcttccctcttttcctccctcgagctactgatttcgtgggtttttaatttctccaagaaaataaaaataagaaaaatgattaatactactacttcataagtgtcatttttatttacccaattcatatttcgtctatgccacctttttctacaatttgcaacatttgccaaaaaagaataaatggaaatgatgagattctttgtatgtatccttttaggtcgatgcacatacttaaaattctttttaggacataggtctctgtgatgtttgcaagtcatcatcagtctataaacttataacaacaatctttaccttttttttttccttaacaaaaaagaaactcttcagtgtaaaactctattgtagcaagcagcacaacgattagtatattaaaatagtcaacaacttcattgcatagtagaaattacacaatatagatgccgcactagtgacttagttgatcgagattgatttatatcgtacgacgatagattcgttgagaactattaataatgtaatcctttattttttttaaattgtagacttcaaagtggtatttcggacccatttaacggcggatatctcaaaaggaatgttatgtactctatttaaacaataaatgagttgatatgtaagttgtagatataataaatgcaagagggagaagaaataaatttaaatgcaaaggtgaaatatatcttctaagctaagaatatactttgctttatttctgttaccaatattgaatgtccattagtagtatttttaaaaaaaatattatttggtcggattttattagtataagaaaataaggtttatagcattttgaaattgtacatattgacattgaacatgtagtcgttcgccacaaagacataaattacacaacccggtttgctagaacttggaaaacgaagtactcatcgagaattcgagatgatctaaaaccaaatgagcccatccgcaattaaacaacaccaatattttttggcaaccacaataaaacaccattacgtgtagtcgtgtaggtttataaatatgtataaaaagagaatgatatgatggagaatgtgtattagtgtatataataacaaggatggtgcgagagaaatgagtagtggcagtggaagaaggggaccatgaaatctatgggaagcgtcgacaactcaaaaacctcggtttcgtaaagagactttccctccattcttttccctttaaaagaaatgaattagtcattttttagaataaatattagtctccaccatttgctttattctcaaccattttccaacttttagagaaggatcaagactaaaaattgatagtctagcgaaaattatcaagtaagcttttgaacatgttgtttgttttggttccaaaatgtttttttttttaaaccaagctctcataaatgtttttaacttttcaccaagctctctcacaaatgtttaaatttcattattaagagaatactagtatgagagaatgtttcgttgtcttattaattgtgtgatggtccataaactgccctttctctgtctaactcattaaaagttatttcgaatttttcgagctctttaatccaagccagtaccttagttattaccttcttaaaaagtttagagcattaaagggaattattgatataaatagtgaaaacaaatcaaacgtagaatatcaagaattctgatgtaaaataccgttgactattcgaacattgacatgcaaaaaaagacattgaatagagttgatatgattatatgtgttgtgcaagacatatttcgaaaaatcaagatgacaaatattattgacttagcattttttttttaattatgtaaatgaatgcagtgatcgacagtgactatgactagtgtgatatatacctgtctacccagaaggagaagttatgattaaacttaattaaggtggtaagcaattgataagtgtgcttaatctttgattcagtgatttctaatcggatggtggaaagagagagaggtggactaatttgattcttttgaagggtcaacttgcccccacttaagatcttgagatgtgctcattttcttcgatatgtaaccttttctccattttataatattctgtataaacaaaattggattcaataccagtaaacctaagagtattcacattgcacaaattaataagtgtctttctgataattaaaatattttaatattttattaggtgggaaaacaccctatcaaattttggaatgtatatgctctaagtaacctttcattcgcgatgaaaaatatatacttatggttcgagattacgtttcagaaaacattttgatctaacttttagttatttgtttgcgtttgtatttatgtttctatctaattttgtgtagacgttaaaatggttttttctgtttacgcttgttgtttataattttacagaaaagaaaataaaggtgttttttatttgaaaaatatgattaaaaaacataaaatcatttaaatgcaatagaaaaatatcatttggaacaattaatacctaaacatatgataaagaaagatgttgaactaaaaaaagatgttgattttttttttttttgggacatcaagtgttgaaactaaagttaaagaaagcaaattcatagctgtttcgatgtagccaatgatatactactatattaatcaaatgataaatgccagttttgtatacttcatggagacagatatgtatctatgtggttatgatacattcgtacacatgaaaatttattttttcttatgtggtccaaatttctcatataaacaattaagagtgatcatttgagactttgagtgtcttatccatgtaatgtatatgacaattgttttatgtataaattatccatagaaaatagtagccgaagaaaagcctataaacctggtttgaaagtaataatatttcaataccgttacttttacctcaagccaagaaagaattcgaactaaaggaatagagtaagaaatattaaccatgaatttgattgaagtttcggtatttatttgcagattgtatcaaagtaaatagatcaatcattttgtggcgagagaggaggagacagagaagggtgattattagaagagtgagaagggagtggcagaacaagtcatatcaagaagagacagctgtaatttcataaagacatcaagtggtagagagaagtgtaatgcttaaggtttggtaacaattaaaaaaaaaagttactacttttctaaaagcagagcatctctacttctatttttgtagtagttgtcgttgtacacacttcgactcaatcagaatcacattacatcatcagatgtagacaaaagctagagaagccagatttgtctaaggaaatgtaacattgttagaaaggatcttcctcatgcatacgtatatatacacctatttgtatagatacacttgaaattctacatctacaaagtctaaatctccttatttttgggttggttacttgcttttgtgttcttcaagtgcaactccacttctggccgttccatccatggcagaggcaggatcttttcgttccttcaccgcctcagatctagtttactcaccattgaagatctagatctccttcccttcttcttgagacgttttccttcaggtctcgggatgctgatttggtctcaccgccgttcgtggtaaggagaatcttggttttgattccttttgtgagggttcctagtatcagatctgttgattctatctttgttttagattttgtatttttaattttaattatcaggattataaatccgggaagtatttgttaagatatgatgtatttgtagtttgggtttcctttccctttagtttgctcttgtctccgggagtttttaattactcgccggctttagtctctggaaaaattgtttccttgccggcttatgtaatcatcagactctaaattatatcagtgaaatccttattgtagtgagaaaaaaaaagcaagggtttatggatagagaaagaggtggttgagtcattgcactattaggatagagtttagagattttatgtttaagtttgtagtcaaagtttctttattttggagactatagtcttaaatataatagtaaactataaatatgataattaatcctatggttttgggtggacctatctctctctatatataactcaaggtcggccccttcttctcgttctactactccctccacagctattagccatcattatcattctcccttgcacttcttcttacccacaccaaaaaaaatgatagattgttttaacaaatatgaaagtaaaaaggtgaaaaactagacattcgttcgcgtagatgatgggagatgtgtaatatgtggatatgaataattcaaatggtacactgagtatattgtactagtgttcctaaaacaagagcaaagaccaagactttactataagattcatagaacgtggccctttcaaagtttcctctcgaacccacaagagtgccttctttgttccaaaccaaattttgtcctttctttaaaccttaagcgtttcttgttctatgatttaacaagacgctggtttatgtttgttctcaagtgcacctattttcttagtgtcgcgaaagaagtaatcgtatgttaatttctaaggaaattatttgcatgtgtgtttgttatatgaatatttcatgtgtgaaccaaataccgaatttctggattgatgttttgaagcacttatagaggagaaccacatatatctacaacacaaacacagagaaaaaaagaaagctaactaattgatatacaacaaaagagaaaagagttaagagtatacgaagaagaatgaaaataacaaaaggagcttttgaagttttacaagtctcataattcatgggtaacaaagaacaactaaaaaaatcttgaagaaactcagcaaactacacaatcaattctaatcgaaagcagaccaccacgaaaacattcacttaaactgagagattaaggtccaacgacggattgcgcgggaagcagacgtctgagactaagagctaaccaaagaccaaccggttaataattattggttaaaagttaaaccagatgttaaaatttgacaaatatcataagcaaaataaaatgaagaattattcaagagaaatttttggtcaacagcttgtgatttcattaaacgaacattaattacttattttttagttgacttggaagatgattactgattagacccggtttacctaaaatcctatacatttcacatcaatccaacggtcacgattaaatactccaaaataaaaaaaagcaaatcataattttttttcctcattgaaccaatcgtgattcaactacaaaattcctctttgaaccaaaaagacaaatccgaaacatgcgtgtggatacgaaagatctctagattcctccactcctcaatttctcatcttttgcttcgtcggtgagattttcatgtcccgatttctctctgttactcttcactctctgaactaatttcgaaaacctcatttttttaaagttttatactttaggttttatcgattctggaattggacttagctcttgaggtttatgttttgatctatgtcggattcatagaaaaataaaattagggtttacttgtatcggattagtgttgcaagcccatttattgatcatgtgtgtttttattgcaaagtttggttttttattcctaattacgcctaattgttgggaaatttatgatttgttgcagtgactcttcttgatttcatcaataatgggttctgttatgagtttgagctgttccaagaggaaagcaacgagtcaggacgttgagtgttcaagcgaatctcgtaaaagacgaaagatatcttcagagaacgatgaagaagagtgttgtagattgattccaagtcttcctgatgagttatctatacagattcttgctaggcttcctagaatttgttactcgagtgttcggttggtttctcggaggtggagatcggctgtttcgacttctgaggtgtatagtttgaggaaagaacttgggaggactgaggagtggctctatgtgttgactaaaggtcatgaggataagcttttgtggtatgctttagatcctgtgtctactaaatggcagagattgcctccaatgccggttgttgtttatgaagaagagtctagaaagagtttatctggtttgtggaatatgattacaccgagctttaatgttggtgcgattgtgaggagctttctaggtaggagggactcctctgagcaaatgccgttttgtgggtgcgctattggtgctgttgatgggggtctttatgttattggtggactttctaggtctaaaacagtgagctgtgtttggcggtttgatccgattttgaactcttggagtgaagttagttctatgttggcgagtcgggcttattccaaaacaggtgtattgaataagaaactatatgttgttggaggggttgatcggggacggggaggtttatctcctcttcagtcagctgaggtttatgatccaagcacggatgcttggtcagaggttccgagcatgcctttctcaaaggcgcaagtgttgccaaatgcgtttttggctgacttactaaagcctattgccacaggaatgacttgctacaacggtaggttatgtgttcctcagagtttatactcttggcctttctttgttgatgttggaggagaggtttatgatcccgagacaaatctctgggttgaaatgccgtctggtatgggtgaaggttggcctgcgaggcaagcaggtacaaaactgagtgttgtggtggatggtgagttatacgcttttgatccttcttcttcgatggagaacggaaagattaaagtgtatgatcaaaaggaagatacttggaaggttgttattggggaagtccctgtgtatgacttaacagattcagaatctccttatttgcttgctgggtttcatggcaagcttcatttcattactagagaccctaatcataacgttacagtcttacgagctgatgtccccaacatcccagtctcctcatcatcatctagctccagttctgtttcaatcccacacttaaagaccaatgcacctaacaagtcagacactgttacatggaaactcattgcaaccaaggactttggtgctgctgaacttgttagctgccaagttatagatatataaagtcatcagaagctttgcccatttctcgtgggccattaagaatctctgtgtacagccagaagcaaaaacatgaagcttatgagatgttctcccaaagattttatcgtctaattcttcgatgatatattcttctggcatttggctgccaaagtaagcttgagtaataaaatgttgtgtgacaaatatataataatgcgactgttgtatcgaaatttttgacatgcgcaaatatactatagcagtacattacctagcagtacaattgcagaagttctgaatatgtaacatcagtatgcttctgcatacatatttctgtagttggtaatagagaaacttgtaaaagaaataaagtttcaggtaaaatttgcaacttatggtgtgtatgtgattcaggcaattaaaacagtctaacacaaaaaggtattgaaacttcctccttttttggttaatccatctcaaccagggatcacatttcttgaattgaatctaaaccggaaatattcggttcggtttagaatctctcttccttgcactgaattatgtagctctcttgattagtttcttgcttcgactacaatggtggacctaaagaaagtaagaagacaagaatgatatgtataattgatgccttaagaatttagaacgaatcatatgctcataaagcaaaccgtttctagattctcatttcacacttcacctcttttctttttatcttctttgatttttatatgaaagttgttgcttttgatttatttcaacgaatctattctatgattaatttttgacatttgttttagtactttaatctgatgtgaaggaaatagtcttcttttcatgaatatcaaagtatcactagcctgttaattattccatccaaagggtgtatcggttctttttgtggcatgcacgaacgaatttttcttcataataatatttggttggtgtttaggaggaaattttttatggttgaacttgaacatttgaatttcaaccatttggaaccaaactaattctcattttaaatgatttccacttgaacaaaaaccgattatatctatttttttttcttcgaatgttttacttgtaagttggtgtatacaattagattcattacttgaaagtgaaggaattttagttatacctcggtaacattttttctttcgaaccaaatcgaatccaaatgttaaagcattaattagaccaaaatttcaattatttcatttaattaccaatcaagattactcactagattgttcctcatgtcttaaaaccccacggaaaataatcgatttgtgtaattaaacacaatctttaattagttaaagtagttaggcttatatagttggtggctgccattttctaacacattcgaaattacaatatgtttctttgtgtgtttatgctaatcctaaattccagaaatgcccctcttaccatataattttggcatatatgccaacatattaaaacaagaatcctataaaataatagaggaatccaaaacacaagaaataaatttctttaattaaaagaaattaatggttgttaaagagttcaatatcaaaagggaaagtatcaatacccacttaataggaatcaaaattattgaaatccacttgttcaatattgatattgtacaacatggccagagtttttgactaatacaatatcactatcgaacaatctaaagttaattcacaagtctatatttttgattagtaagtcactaaataatcaaaagtcagctttattgatgatattgtgtaggggtaaaaacgtcaaattgaggattcaggtaggattacgaaaataaaaaagaatctgaaagtttcccaatttgtgttatgtctgctcaaagacagcctttgtaaccaaaaccaaagtgtctctcttttcttcttcctaaatttctttccacgagaattgatttgggtttgtgttgtttttttctttcttttttgggtttttgtaattgggttggtgaataatcctgcaaaagtgttcgatgattttctccagagaagaattttgaagtttctctttttagagattttttttgttgttggggttttttgttttctgggggaaattgaaaagagatggcaggtgaagaagattggatagaactaaagtttagactagcagatggtacagacataggtccaagcaagtataatcaatctatgactgtttcttctcttaaagagaaactcatttctcaatggcctaaaggtattttatacttatagttatgcttttgcttctttctacagcttttcacggttttgatggttgagtctcatttgattcattgcttcatgtatttctttttactctccattgggtttgattgtattaaatttgtcttctttctgcaatgatttgaatgtatgatgaacttttttgggctagtctaggtgttgaactttgtaaagtatgaggctttaatagataattatagttttatagtgtgaaaggtttagttgttgttgtgttaagatcactctagttactgattttggctaaaactagtataagattgatgtctcaaattgtattgtttttgcctggatttttttggtttaggtgtttggtgtttcttggccttattgaatcttatgttgcatttactttctctacttaaggttgttttataattgcattttcaatgtttctctgtttcacagataaagaaaatactccaaaaactgtaaatgatatgaagctcatcaatgccgggaaaatactggagaacaataggacacttgctgaatccaggcttcctgtttgtgaacttcctggaatgatcattactatgcatattgttcttcgccttcctacgttagacaaaaagagcggtaattttctctaccttgttatactgtttatcgcagtgtaacaacatgttcccttgaattctgtactcgttaactatggctttgagatcatgttcatatcatctcattatatgaaaattttctgttccacagaaaaactgcagaatgatccaccgatgaagaatcgctgcgtgtgcaccattttgtagctgcaagtaaattggatcatagagatttatatccgtcatgatcatggcactagatgatgctccacggaacaacttccatggcatcaaacaagctttgagaagttccttcagtacagaatgattggcataggcatgaaaacaaaagatcttcattacagaatttggttccatgtgtgtggtttttaattattattttttaaaaatcaaaatggcttgagaaaatgtactatgattcttgaaggttggttcttttataaatatatacaatatgttcaatacaacagtaaataacaagaatggtattgtccttatgtatgttcttattctcaactaaacttctcattttttgaattaaagaatatggggtttctatacaacacagagaacacatcactttaaaaaccccatatcttgagactcgaataaacaacaattatattaagctatctataactcgagaccactcttggaacttggacttcttcaacattcttggaactttatatacatggtaagtaacatctgtgcattaatgttcaccaagagttgctgatgatgaacggttcaagagcatagccttctttgatgccctaacgttcttcagagtcatcatcagcttttgtctctctccttcaacctctgcaaacttgaggcttagctgagaataacggtcatgcatttccctaagctctgtctccatagacgaataccggcctttggtatccaacatttcttcaattagattgtttatgtctctgaaactctggaagattgcttcgtcatcggtgtgttgcttcaagaaagagctgcaatttcaggcaaaaaggaataataagttcaacgtggtctagtatagttacaaaggcgaaaattaatagcagaatttttgaatcgtgtacctctggaaatgggtggttgattttttctttccacgcaatgcttcagcgagttctatttccagtgcaagaaccctttccaatgcgtttccgcaactgaaattctcttgagatagagggaagatactctgaagttcttcctttgcctgtcgaaaacaagatcataagacttctacagacacttatgcttcaattcattacaatctctaaaaggtaaacatcagcacctgacgcaactgcatcagctcctgttccaaacccggaaatctggtgtctgaatcattatcatcttgaggttcaagtagattctcattcttcatccgttctagctgtaaagaagacagaaaaaagacccaatgacgctaggcaaaatctttctgtagataattaccatcatgtagatattgtaattcagaattgccatccaatccaaactaagtcactgatattaacatttccaattaatttaactagtaattttaacccttaatccagtattacctcatcgtttaggtgatccatgctagaccttaaagtctctgccctgaatttatcattgatcaaagctaggctttcttcacgtttgtccagcgccattgcttctccggaaggtaattggtctctgtttccatttacactgctcgattgaatagtaccctgatgaacatacattaaaataagaaattccttatagcacctttttttacccgtcgagcacaggaaataacatccttaatatctaactagagaactatttacagaaaacatcgacatacgtagtagcctagtcattaccagcttgattaaatcacgtaaactagttttgcataacatttcataaagaagatgcagcagaagtttagggttggaacagaactcgttttaacttctatgataccatgaacttgaatattcttaacttccaaataaatgctaatgcaaacgcaatctaactgagggttacctgaattatcgacctgggactgatgatccgcactgtaggatcaatacaagcaacttccctttgcccgttgttcaccgagtcgcctgaagagactgcaattgtatttttgtcagccaactctgacacctcactatttaatctatcattttcttccatctcaatatttttctgagagctgcaacgttgtactaatcctctccttgattctagctctttggacattttcaaactctgctctttgcattgttgcagaatagcttcaagcttctgtttttcttctttgcagcactcaaggcttaataatgagcaatccagctctgccttcatcatgtcataagccgtggttttctcacgtttatcatagataacagattgtcgatcagcctccagttccaatatttttccctccagctctttagatctctttaattggctggattctgcctttttccttgcttcattctcatcaatggcatcttgtaatttcatcagaatttcctcaccatgcttcttggacatggtcagttgatattgaagttcctgcagcttggtgtcatactgttctttgatgaaaatgattctcaacgactcctgctgtggagttagcggggctttgtagtcggccttttcacgagcacgattgcattctgcttcagcattgtccttaagctctttcaaatgattggacatgcttttgaactcttctgttttcaaaatctgctcagagagcttctgagtgagatcactgcacctatttttcagtgtttcaagctcactggcacctttcccacaaagcccagttagtttatcttttagtatctcaactgtaatttccgcctccgcttttaacaccgtcaaattttctatttcttcttcatacccaaacagcaaagattttaattgctcgacctcaggagcacataagcttctctcagagtaacttctttctgcattctcatccctagttgcgtgctcttcgagttcagctgacatttcatcatttctatcagcaagagctctacttttagccatggaagactctagctcagactttaagacttcaagattaatcaataactgattgttttcgtccatataccgcgtttcgttgactagacaatggttaagggcagattccacatcagtgtacttcttctgaaactcaaggtggctattagagcagcagctaagttgttctgcaaactcattgatacagatatcagactggatctttgtaaaaataagctgaacatctgcagccattagacactgaaacagttcttctatgaaagaagactctcgatgagcatttctaacgtactccaaacgttgaaaagacttttcagattccagctcagctaccatcttctccaaaagttccacttgagatttctgcaaatcaaagttctctaacaacaaatgtttttcatctaactcagaggtgagttcttcaactcttctgtctaagttgtttctcaaatttctctcaattttcaattctgattttagggagtcgagatctgccaacaactttatattagcattcatatgctgagctcctacattacgagagtcattgaaggcagtcagtacctcaaaatgatccttgtggagcttgtcagcataagtctcccattcagttcttgtgaaaacaatctggatatctgctgctactgagatttccatcatttcaagtatctgagattccaaatcggaaatatatgatgaatcacgagtcaagcttctcagagatgtttcatatcttgtcagacgatgagtgtgagttgccttctccagctccagatcggaaaccatttgcttaagacggaccaactcagagctttgctcatcaaagctcatcaatttggaacttttggcgatcacctcagatgtaagatcttgcattttaatttctagttcctgcctcaagtttctttcaagtctcaactcgtggtcaaacgttttctttaaattttcaagctcacgcacaagacccaaagtttcctgagatttatcttgaagtgaaaccagaacacgtttcttttcctcagccagttcttccacaagcagcttggttcttccatgttcaactgctacagagcttaattcactaatctcttgaccaagtccctcattcttggacacaagtagatgcatttcattctcaaaatggtcaagacgagaaagaaggtccaagtgacggctctcatagttttgttcatcttcagtaataaccttcattttatccatgaccgattcggtttccaactgcagtctccggaggagggcagtggaagcttctaatttagtgaccatacattgtacatcattctcatgcatctgcttgagctccataacatcagactcagcagcccttaaatatgactctgtcatggatttttctttcatcaggccattattctctgatataagtacgaaacacttttcacatatcttacacaagaatttatcaagctgctctgttaaatcatgggactcaaaatcaagatccactccttcccactggggcaaggaaacgagtttttcattgtagcagcctaacgtgtttatcaacttgtccgtcagactactgagattctgctgtagatttccatttgcagtagccaaatcatcaaacttacctctcacagcatcaaactcagcctgcacagtagcaagccttgtccgataatgagctttttccaccgcttctttctccataagctctgcaagctcttttttctcacaaatgcatgtctcataattggtcttccaactcttagactccaacactacagattccagttcatcaatcttttgcagaaggatgaggttttcgtgagtaatattctgcaaatttgcctctaagctttgattctgcaaagctacagcattccatttggcaatgcatgtggttttctcctctttcagggagcaaacctcgtccaaagtaatatccagcctctgcttcaatatttccttggcctctgttgaaagctccagctgccatccaagttcatcaattttcgctttcatgatccttatgtcaacacttgcttcaagaaaagtttctcgtagaatgtttgagaatacttccagatataagttccttgagtgcatctcatagagttcttcttcaactttttgatacaagctttcttgcacatgaagagatctcttcatatcttctagaagaataatatcaccttttaaagggcgttccttcatcccctttttctcattctgaaactgtatgagttttacatcacgagtgtcctgtttctcagaaattgaatcatctgttgattgaatgcattcgtgaaagctttgtggaggttctggaaaggcttgcttaatgagattctcattggtctcaaacatggatacaacctgagatgaaagcaattcaagatccttctgcaaatggttgacagcaatagaataattcaagcgggcccttttaagtgctgcctctgcagccatagctcgtttatccagttcttcattaaaagaatccaaagttttcttctcctcagaaaaccttagtgtttgctcattcatgtcgtgacgcaacgtttccatctccgccttagcgccagagatactatagaggcacgtggaatgttcagtccttaaactctgtaactctactagcaactgcctttgagtttcctcaagctcctggaccagagattcgtaatagcattccatctgatccattttcttggtaaggctatcacgttcagctttagactcgtccagccctcgtacaagctcaagtattttatctctcatggcactaacagaatctgctgaattgggttcacgagaagtaagatcaggcataccaagatattgaagcggatcaagttctggttgataaatatcagtgtcaacctcagagcctgatacaaaatgctttgctttcgaaaggcctctctctttactatcagtcatgatgattttctcagatggtacagtgctgaagtgagatataggctgctcaatctgcgttttaaaatcctgtagaactccgagcagagactcaaagtctgagaggaacaatcttaagtctctgtcatggtagccatagcatactttgttttgaatttctcttatgttatcctctacaactaaaagtccctgcagccatcttagttgtagactgtggggaacattatcttgatctttgctattaaatagaacgtgtgatttgacgttacgtaatcgctccatctcttcttttaactttgaacactctgatttcagcacagatacttctctgaccaaatgatccccagaaccaatctctgatataagtatttgagaaaaatcttgagctttggaacctatatcatctgcatggcactgcagcgaactcacttcaatcttaatctcattaatggatgattccatgtcttccaagaatcctttaagcttattgttgtcttctattgcattgcccaaatcgctattcttaccaagatagtctgacccccagccatgttgccacccaagactgtctttctctttctgcgggctctgagcaagtccactcagatctccagataccacacttttgaggctgtcaacttcgtttatgctggatatatcatgtttctcagcgtttaggctccctgatgtgtttgaagagacatcaaaacccaatcctgaatcaaggtcatttagccccactgtttcttccactaaagaattgtctcggaacttttctttgaaactccctcttatatttgtctgcaaaaagatattaacattataaagttgtgtcaacaccctcattccaaaattggttgtcgaaaagttgttctgtgaataggtgagcatgacactaccatacaactcagtatattattttagcagcatattgtacaatcaaggatccaatacgagcaatgaaaacctgaaaggacacatccatgaagcttttatgggaaaagaagaccaaaccttatcaacatgactaagagtctcatcagaaggtgaaatcctgcaacgagaagattcgtcaggactgctatggtcaggggtcgttgatggtcccctctcactgatttctctttgctgctcgaactctctgaaaccagtttttgaggttaacagctgtatagtgacctgaaaataagaaacaaaataatgagaaaccaatctctgagctttaagaaggaagttgatctctttatcgggaagtgagaaatggagagaagatggcgaatggtacacacatgtaagatagctcctggatcacagccttgcaagggcaatatcacagcaaaaggttttaaggcatcagcatattcagcaaggttgatcatagcctctccaagtatactagatctagaagtaccctgatctcataagaatgcaaagggaagaataaattaactctgaaatcaaaaagtaaggaaaaacaaaaaaccgtagaagcgataccatagcgacaacaatcttataaagtttttcatcaaattgcttggtcctagtatcctgaagcagccttgtagtttcatagataggatccccccacttgcaagttccatttctcacaagtgctttagttgtctttgctgtagcttttacggagtcagcgggaatgaaagatataaatagtttgtcccaacccgcttgtggaaccttaaataatataaacaaagcacacatgagatcacaatgtacattaaaaacagaaaacgcagcatcaacatcttattgaactcctcagaagtaaatagttgcacaccaacagcataagaacacaatcaaaccaatcggaaagtgttgacttacatgggtagcgtgaaactgcaatcgaaagacgaccttgactttggctttctccagcttccatttagccagtctcgacattactcaaaaaaatcaaaacagcttcacctgcaaacacacacatgaaacgagcacagttttcattttcgtgctcatcttcttgtatctatatgttccggcaacaaacagagacttcaatcatagaagaatgaaaccatacatacaaacttagatccaaatcactcagctgttcaaaattttcagatgctgaatccactaaaccacaaactatcaaataaataaccgaggtttgatctccgatcattcctaactctccgactaaccaattccaaaaaaagcgaagacatttctgctaaatggcgaaagagaaacaaaaactagaagtgcccacttgttacctagctctcctcagatccaatcaccaccaaaacttaaatccacttgaagcatctaaattctagtaagagatccaatcaagtaacatgcttacctaagctagaataaattcccacaacattttccagatttagtagctagaagaagtgaagaaacccaaaaatggagaacaaaattaccaagtgaagcaagtcgtgaattcttaaggaaaacaaaaatagcaacaaaacgaaaactaaaaagcttttgattgattgggtttgcattaatggggatgaagtggaggaggaggatcatcacctagttcccggatctgaaggctgcttatgtcggaagcaaacaatgaataatctctctcacttcttcttcttctccagctttttccactgagtcttaagtaaataataataataaaaggtgggtgaatttcaaatccaggtaaagctaaatatattcagagagggattaaaactgcattacggatctagagattgggtaatggagattgaagcaagaattagggattttagagggagattaggttaggtttgattagtgattgtgttgataatttggtgaaatatcaggagagagtacagtgttttggggtttaagtgtatttgacaagggttaattaacaacagagacatcccgccaaagcctattatcatccctaattaatttcgtttattttttatattatatggtcccatttttctctctttggtaagtaatgaagatttattgtgtcgggctatatttatatatttgaagccggtgtgtgtgtgtccaattcgaatttttaatttaatttttatgtatatttgattaataaatgatcaaacaattgtagcaaaaataataataatccacattgaaagaagaacaaaaaacgtactaattaatgatgtcattggtaaagatcgtaagaatttacttcagcatgtacgattctatataaaaaaaacatgactcattcaaaggtttatttcttttcgtttttttttttgtgttttcaatttttattttttttataaaatataatcaaagaaatggtaaaaataatcaaggcacaaaaccacactgaaatttcttgacctttagagctttaatttaatatatattgcccttttaatataaaagtatacatgttgctaaaatgttccaaatgtcaaaaaaaagtttaaagttcattgcatttacaccaaggaaacaaaatgttactgtgtcaaattacataaacaaaaagcattcctatagcatttaatttatccaacacacacaaaatctatgtatagttagtaagcagacagtggtttatagttgaagtacaattactaatgtaaactattgaattctcatctgtatatggtgccaatgtggtaaataaattgtcaaaatgttttttaaaaaaacaacaacaatgaaaacatgtaatggttttaattagtgtcgtaaattactactcgtaattaatgttgtaaaataatacaccagtagaagtgtaaaggtggccccaaaacggcgagctataatggagccaggaagggcacgtgggtttcgagcggtctctttttctcccggtcacagctaagctattttccactttagcacgtgaccactcatcctcatcacgtgttgcgatctttgcacgtggcgttgatccgacttacccatttactacactaggtcgatgaggccagtattttgggccaaggcccaaactaaaaaattgtttctgttttattttcactactgtagattgatctttataaaaatgtttcatgtaaaagataaaatataaatactccataaaattgtggttgacttatttgtatactgttagaacaatagtcaacaataaagtttttttttgaatgacaaacaatagtttgctatgttaaaccattgacaacaatctttgttaatggttaatgctttcttataacttttttgtactatatcatgtacagtatagtactgttatactgtacatgtatgggaccaaaaaacgtcaaataaataaatcctccaaatttaggaatcaaaagaacaagcgcattatcttttattcttttgctgattttcttatgttctcgtaaagtatgtgcatgtagtgccgatcgatatatgatagtgagtatgtatataaataaaactatataattttaatttattagatgcttcttcttttcttcttttgttaaacggtttaactaccataacatggtatatatttctcacgatcatacagtaagtaacgttattatattgtgcaacaacgacaaattaaagtagcttataaaagcaaaaaaaaaatcaatttaacttagctgtttaaaattttcacaagctgataagtgataatatacaatccgattaaagtgacattaaataaattaagattcatatcattagccaatttatacgaattgtatttttttcattcttgtaataaaagctacgagtcttttgatttatagattttactagtattctattccgtactacgtacgaaacaacaaattgaaatcaattgcaatgtaatttttcatattattgtaatatttttaataatcattcaacagattattaaaacctttggatttacaattaaaactgagatatatattttctgcatccaaagattgaagttaatagagagcagtagagattcaatcataactaaaaagtttgaaaaataaaagtggatccctatactatcgaaaagtcctaattattttttgtttttagataatatttcaaatttgtagagttaactaagaaaaattagtttaaaaactaacaaattattaacaacaaattgcaatatttgtatttgtttattttgtgcaacaaataattaacaacaaaacgcaaatatttgtatttgttaactaacaacaaatggtttaaactacaaatagtttgtaatttggaaaacatgagtacaataaaatcataattaatatgagttaatagcaaatgaatgaatataaataaaaattaagcgttaacctggttagaatttccatagtcgtttctatagcatccacaagagaaagaaaaaaaatggaagataatagaaagaaagatcaaatagagaagaagttgaaaaaattggtgttaaataaggaatgaaaaatcggttaataaaacatgccatgattttagcttgatcctggaggggttagtaggagcaaattaaggaatagagattttttttttacactttcttttacagattgatattggcttgaattttatttttaaaaagtttttttttacattacgaagctcattttttttggtcaataattaattttcttttgttatttcacttttttcttttttgcacgatctcaattctttttcaaattatttttataaaaattaaattataaaacagaaatctatgtagcatgtttttattggacaagtgacttgtgttttataagataaaggataggttaaagactatctttaagaaaaaagaaaaaagtgataatggttttaccacaaataattatttttttgaatggagtttgaaacaaaacattctctttggctggtaaaattgaagcagttgtagtatcaatatttgtttattcgctaagaactgttggatttattgttttcgttatagtagttgcacctcaaacacgactcattaaatcttggattaatcaaagcaacctaagtatctaactaattagagtaataaaaagtatctaactaattaattgctagtgtttagtgtttctatgtaccaccactttatatggtttacgaacagtagccacgacaagggctatgttcatcgattcattagacgttcctgtaatattataactagtaaaacatagagtgcgatgcttaatgctttcgtctttgtgacgtttaattaattatatacactaacctaaattacgtctacttttttaaattatatagtacaaaagtggatgtaatcatatccggaatctatcgtggatttgcaccaaatccatttttttcttaatttggtttatcttctaattattgttttaactttgtattttaatgagagattgtcgtatatgtaatgtcgcctgatactcaataactcaaacagaaattaaaccaccatttgctttgtaatgactatacgaatatgatgaatgatcaggaatcaccactcaaatttaggaataatcgttcagtttaactagcaaatatctaaaataatgcttgatctattgattgagtgattacttttttcacgtagtctgtttctgattatgcattgaagagttctgaccacacattatttgctttttcacgtagtctgtttctggtagttttgctatccgatcaactaaatgtgtataacttatgttacgccatcgcattcatgaaagaaaatacatttagatagtttataactggtaacctatagttctgccgacaaaaaaaggaaatatagttacatggtccactttatataaatagtaatcttacctttaaaagaaaacaatgaacgatttaaagtcttcgattctaaaatctgttttgctgaattcatcgccaactacgcaacaaaggacgatgtaacctcttttcgcttcgataatagagtaacccaaactgtttttcattgtatctctgacgatagaaacacttggaactaaagcaacaataacattagattttttttttaataattattttagattcccactatttgtgtacatataatagctgtcaaaacaatgtacgtataataagtgggaaacagagaaaataaattcaactaaaatggacccacaaatttgatctatatattcatcccaatccctcactcttaaatttccaaaccacactcacctttcaccaacttctttttacattttaccacctattgtctctatttgcatctcttttcataattaccatcatatttttctcctgtaaactttttgataacatgtcactagacggatcgggactaggagggatggctatagcggaggtttacacgatgaggaagtttcatagagagaacatgaagagtataacggcaaccgcggccacaaccgctggtggaatcgaagagaacggtggaggatctggtcgatggttctttggaaagctgagcaccaagaaaaactctgctaaagtttgtgatcttatgattacagaataagctataatggcgcgtccaaaattaatcaaataattataatgaataaaaacgttagaattttcttttgccctttttgtttgctttatgtttaatatgtagtgtttatcgtttgaatttattttatgatttttttttttctttgggttttaagcaagtatttagattggatgttttataaagctataagagtttctaaatccctgctacatatgtaacgattatatagtcatgaactcatgatgagttatttttaagcataataagtttaattaggaccaaacacacataaataaggaatttaagggctggagttacaatatatgccaatttattctcagaccagcatctctccttcccgtggcaaatccagagggtcacgcaactatctgaattaagtatagataagtatagtatctaatctatctatatgggtgacatcagaatttgatgcaaattggaatagccaaatgtgatggacaaattagattatttagaaatacattttttaaataactaagagtatctggccctaaactcatacatcttttcagacgagtatcataattgtttgttaaatgtaaattattgaatctagtaccaggtttttaaatcaatgaacggccgtttaatagtttacaagaagaatgttcggctaatctactagatttatatagtaaaatagatttttataaaaactaaaaagcaagtaaatggtaaaactagtaccaaattaaatatataacgccgttaatatatttcctaattaactaatcaaaatggccaaaacattatagtatatgtggcgaccaatatgcgacctcctgttcaaaaaatcaaacgtactagtggtgtacaaaataatattttgaaatcttcattatgaaacgtgaaatcgtcaggattttatagattttgttttcctctaataaatttttctaagagcctaattattgtcaaatattttgtaatgttggcgtaattttaattatttttaataattgaaaatatattttgtagattcaaacaatttaggatatagttgaatgaagttgacaagttgatgcatgcaaagaagtaagaagaatgacattcttgtatgcgaaaatgattattttcaattagtgactgatatcttttgcaagtctaaaataaatataatatattttattaacaattcgtgaaaagtctttttatttgatggcaaaatactacatggttgttctttttttttgttgcaaccatgtaatgattaatggtgatattgttggttggttggtagtcgaatgttatatggttattatttttttggttgcaaccatgtagtgattgatagtgatactgttggtttgctacatggttactccttctttggttccaaccatgtagtggtggttgatggtgatattgtttgttggtagtcgaatgctacatggttgctccctctttggttgcaaccatgtagtggttgatggtgatattgttcagtcgatcataaaatatatgatgcatgaagaatataaattattgaattgtttttccttgctaaaaagttaataaaaaacaatttatcctaaatactcttatttttttgtaattatgttgttaaagggtctaaatttttatatatccttttatcttatataaatatatatatatatatatatatatatattattttattgtttatatatatgtaagtaaatgattgtgtataaacaaaattaatactgaaaaagactaatttttaaaatttgtaccaaaattccagttctattgagccggttttgggtgtatatataataatatattataatatataataatatattataatatatcgtgtattaaaatttaaaggtttattacgaaattttagacttaagattgaattctatcatctagattattaaagttaaataacttattatgatctattatttttatcattgtagacactcttttaagtggtaaagtttaggtctaaaatctatacatgttatataacaaaataaagaaaacaccaaaattattagggttaacgaaaataatatgtgacgttacagaaaagaaacttgcgcatttttaaaaaaaaaaagttgtacaaggcgagaagccttaaaaagcggcacagagacttctgtagattttttctcacgtgcacttgccatgtgttgaatattcgacaaattttatgggctttactctaagcccaacttttcctctttaggcctttctgcgctgttgcgtcaaaaagacaaaaacttaatagatttaagaaaatcaaaatgattcattttagtttcggtatttatccttttgcatgtcattgatcaatacgttttgaatcatatttataaagattgaaaactatagtatatgaaatctttattaaagccaaaccaaaagccccacttattttacgtatttgtctctgtcgaaacgcagattttatcagacaagtggcaccaaactaactaaagaatcaatattgtattaggcaaaagaagaaaaagataacaaaattaatcattttcttagagttgggtaggtcactagaggcccaattattactcactaagctaaggaggagtacttaagttaaaagatgccactgcatagcactgagaccctccaaataaagcgaataaaaattaataaattgattaaaagtattaatcttccactcttgtcccacaaaatgcgacctaatttcttggaaaagtttattcaatttctgaataacaaataattcacagttattcaaatatttatacaaataaattatcagctatatttaaaatcgttactaaaaaatatatttaaccaatcggtagtaatctcgtggtacaaatatcaattatccattttcagatcaaatcattactataactattttaatttaaaaactatatatatatatatatattatatatcaactttttataatgtgaatcataagtcgactattaagttttgatatatgatattgtatgtttttttctaacaaaatcataaacaaatcacatcttatatatatgagattcagattctctatgttaaaaaataaaaattaccggaatattcccctcaagcatctgacgtgtcggccgacgatgaagaatccaggtcatcaaaaggtgtagtttagaaacagaggcgcacgataaggtcaacttttggaatagaggaaaagactcaaccttttttatcatctctctcgatttgtttttctcccggtggtgatgcttttgtcgtttcatcgttcgtttacttcaacttgcttattattctacgctcatggactaatcaaagccatgaggaaaaaaaaaaaagcaacaacacaaaatatatgtataaaaaaataaatatctctgcttttttttttcaatgatgggtacgcttcacctctaagttttgaccaaagtttttcttcatttctctcttctctcttgtggtcaccgtttgatcggaatattccttttagaatgccaagattcattcttcatctctcgagctcctcatgaatttcttctctgcttatcaatggaggttggtttttgtttctcatgttatcttttcttgctttgtgaagtccttaaattttccaattttggtttttagttgttgcaactttctagtttcatgggtattactctatttggctatgtttcttcaaaaggctctgttttggagagctgggttttctaaagtttcaacctttattgctaaaactgaaactataactacttgtttattgtgtgtgttagtaagcaatgcaattttagagatatggactggatctatatatctattgaaagctgagctagagaatctgtttcttgaattcaataagcttgagtctgtaaattgttgatttacagatgatgagctcttcttcttctactactcaagttgtatcattcagagacatggggatgtatgaaccatttcaacagttatctggttgggagagtcctttcaaatcagatatcaacaatattactagtaatcagaataacaatcagagttcttcaacaacacttgaggttgatgctagaccagaagcagatgataacaatagagtgagttattgtttattcctggatcatgctttagaatgatttataagtgttgtttgtttggtgattgatggttaattatgttgcaggtgaattatacttctgtgtataataactctcttgaagcagaaccgtcgagtaataatgatcaggacgaagaccggatcaatgataaggtaaggctttagcattttaaggctacttataccttttgcttcgaagacttcataaactcctccttctccattttaatctttagaggaagagacacggcgtgatgacatgaattgttgttccttctctatgaacagatgaaacggcgtttggctcagaaccgagaagctgctcgcaaaagtcgtttgagaaagaaggtaaccttggtgggattttttcttgtgttaatgataaaaaggaaagcttatgcaaagttgtgtctgtgcttgtaggcccatgttcaacagttagaagaaagccggttgaagttgtcacagctcgagcaggaacttgtaagagctaggcagcaggttagctcaagcttgtttatttgttgtgtgttcatcaaactttatctgattcattctgactcagtgattcttctggtttgtattagggattatgcgtacgcaattcttcagatactagttatctaggaccagctgggaatatgaactcaggttggtgtttatatcactaaataagcatatgttagcattgctttatctcttaatcctcagtagataaagaagtaattttcccaataataaccattttcaggtattgctgcatttgagatggaatacacacactggctagaagagcaaaacaggagagttagtgagattcgaacagcgctccaagctcatataggtgacattgagctcaaaatgttggtagatagttgcttgaaccactacgcaaatctcttccgcatgaaagctgatgctgcaaaggctgatgtgttcttcttgatgtcgggaatgtggcgaacttcaactgaacgcttcttccaatggattggaggtttccgcccatccgagcttttaaatgtaaacttcttttttacttttacacgtttctctttctactcttgagaaaaaatgctcaaccttttttgttgtctaggttgtgatgccatacgttgagcccttaaccgatcagcaactgttggaggtgcgtaacctgcaacagtcgtctcagcaagcagaggaggctctctctcaaggcttagataaacttcagcagggtttggtcgaaagcatagcaattcagataaaagttgttgagtctgtgaatcacggggctccaatggcttcagccatggagaatcttcaagcattggagagttttgtgaaccaggtaacgctaagtgtatttgctttgtgcttttgcagtctccatgaatccaaagtttattttcatttttgattagaaactttgtgagcatggatttcacaaacaaaatctctgacaatattggaacaggcggatcatctgagacaacagaccctgcagcaaatgagtaagatattgacgacaagacaggctgctcgagggttgctcgctctaggagaatacttccacaggctgcgtgctcttagttctctctgggcagctcgtccacgagaacacacttgacaagttaggaggcaaacaaaacaaagagaaagaagcacaaggcagatgatgttagctatagggacttgctttatctctcagaaagtgttggctgatattttctccattagagagcatcatcttcctcattgatgattttgtttacttgaaaggaataagagatgtgtaaatttgggtggaaaacatgtaatgtctttgatgcattaggctctttatttgtaaaatatatagggtttgttgtcactcatctcctcgtatatgaaaatttgagcccacaatcaaattttttgtctatattgttattccaacagttcttagcttatatttgttgttggtataaattggtcaatagacaaacaataaattcaaatagattcatagagagtttgatcattcccttcattcaaattgtgcctaaaatgaatatcctacgggtctcagccaaaaaagcccacaccgaggaaagataaagacaagagttaaaggtaacacatgtttcttcccttttgtgatacaaatggggtaaaaagggttagttctctttctttctttatctctcctgtaaaattcaaatcttcttcactagccatcctggaaaaaagaagtaaaaagacataagaatagaccaagaaatcaacttccaaatgtgaagaacacaagactcatatggaaaaggcagcagagtacttcatgtaaacaagaaagtatccatgacccggtttactactacttccttgttacaaaatacaagctaggaggatgaaatattacagtctcgtgcttcttaaagagaaaggattatttacctctggcatggaactgcttgggccaccaagtgataaggcattgtggctattacttgagcccatagagtgtccatagaagtcggtacttctgcaagcaagcatgatcagttggtaagtatggtataaatagtttgggaaaagaaatcactagtaacagaatacctagcatctgaatgttccatctttgaagctacatcagaggtctctcctgcgttgttgctcaaagggcttgatccaaagcttagttgcgagcattcttctgtagagattggcaaattatctgaagttacaacagcaggtttatcgtcttcatgagatgcttcttgatcatgactatttgtatctcttgtctgcaaaagaagataaaaccatacgacaaagccaaagttccagtaaaacaaaaatgacaactagcttaaaccagaagtcatttgattcctgtaaaacatcaagagtcaggaactacatgaggacagctagtgatacagagtttgaggacagtaacaactcctcaggtatgacagatttcctaattcataagatgaaattaatgttaaaagatagagagccagaagcttcagaaatctgtcatcttacatttatcaactgcctgacttggccatgaagacttgcgacgtcatcatcatctaggttagagtgcaatttagaactgctgcgcgccactctgcaaccaaaacacagcaatgaaagagtcgcaacactgagcattgttcaactctgtgacagtctgatcaatttacctttgacgacgacgctttttagatctttttggttcatcttgttgctcctgtttcctcttaaggtttgcccttggagcttcatccattagtgggcaattaaaatccgaaagaagatggcgtggtgttgaggagggccgaagcatatctttatcattatcctgagcaccaaccaccatgtacatcacttccagggaaacccatacatacccaccaacaccaatttttgggccgttgctcagcttgcacaacgccacctgttcgcggttaatcacatctaccttgacaatcaccacgtcatgaaaccccgtgaattgagtattctcttctaatgggccacggtagatgtgctgcacaacaatttatatatgttagctaagaaagtaagacctaatcaaatactacactgcttaaattattcttacttctccaatacgccacaactcagggaaagtaattaaagctgcaccaacaggctgaatgtgaaggtgggctaaagccttgtccaaagtgtcgaaactaaggacagactttatcttgtgctttctcttatgagcacttggaggataacgacggcatttatactgacgaaactgtgggatctcttttgggatcccttctctttcaatatgttccaaggcttcagcaattgaattaccgtagcacacatgtcccttttccgcatgtttatccttgccgagcatctctggttcaacatggttgcttaggtaccaagcacacagtggaatatatgtatcttcccagtggcggataatccttatggcactggttagatcggaagaagcgtacgcctaacaattgatgtgcctgagctgatctcgaataaaaccagcaatcacgatccatgacgagcttttcaaaagctcagcgaatgcctaaacaagacaaacaacaaaagttctgatattttggaaaattatggacatgttaaagtttaagtattagattctgtaccggtcttgcaactctccagcacaagaaagcaacgcgaccatcatctgaaaggtggaaaggacctcttcgggctgttcttcttgcttgttgaacataccaatcagtcaggatcaaacacagatttccaggctgtataatactcaatcccttctttctcaggcgcttcaaacagtttggtggaagcccttttagaccatcaggccttgagggtataaactgatccatatccataggtaccaccacctttttgttttttcttttacccatctctgaaaaacaaatacaaaaacacaaacatatcagtgtctcaaacattattgaagtgtttcaatattttttgcaatggcattatccaaaaaacgaatacaagtaacatacgacatcacaagaaatttattcttaacaagccatagtgaagagtttttgaagactccaagaccactactagtctagtgacacatagtaaagagttttttaagacaccaaaaccactactagtctagtgacacatagtaaagagtttttgaagacaccaagaccactactagtctagtgacacatagttaagttttttaagaaaccgaaaccactactagtctattgacacagaaagaacttttacttttagaggcaatctcaaagtgaaacatacaaaaaaaatcagatgcatattcaaagtcaaaacgtacagaaataaagtaaattcaagtagaatagacattcagacagcaaatgagggaccagcaaaaaaaacaacaactagcaaacattggacatatacataaatcattttttagtcccatggtctcggataataatcccatgccctacagtactagagtcacaagatacgacccataaatgtatgtacctcttggcgtcgttgttcctgttctcttagctctagatgaaatcagagactgagaaacctagcgaactttttcgtagccaaagaaaaaaaaaagaagtcaaaatcaaacttatgaatgaaagtaaagctcagaataaacggaaagtttccgtggttggaatgtgtaaacccttaccggcttgttgtcggaatctcgagaaatgctcctgtgttgctcggacgatcagtgtgtgtacttttgctgaagtgaaagattatgaaaagatctggggtaaatcagtaaatgtaaaagcccttacctaaagcgatggcgttttaagggtacggtgaaaaaacaataaaaattgaacatgtgcgttgcaacatcgtcaagattgacaattgaagtcccaaatgaagcccatgaatgaaaccttcgccgccttcgccagacaaaacctaaaactataaaagcagcagtcgctaatttttggaaggagaaggagaaagatgagtcgccgggtggaatacacgttagctcctccgcagaggaatgaatctgacgtaattctctcatctttttatattgtttagcttgtgtactagtgttcctttcttacgatgttaagggtagtgattgattgattgattattttctctgatgggtcttagggttttgattatcccgacggtatcccaatatcatacaatcttcataggcttcgtcactttgagtgtgaaggcagttatcccaagtatccttatggttctttggtcaagttttatgcaatggtgggacttcatcgttacaatgtgttggaggtaaacaatatagtgcttttctagtcgatatgctactggaactattaattattattatgatataccaattacattctcaatctctttttccatctgtcaggggaaaaatttgcagctcgataccctaaagagtttcaacatgagaatcaattgtggtgcttcttcttactacattactttggctgcacgcgttccagatagcggtttgaagcagatctttcaggttctagttcatgaagagcgtcttggcagtttagacatgacatgtactatcgctagacctcgaggtaaacatgtaactttacttgatcagtcattttgacttgtggcagtttacctgtacatctaacacttgctggttaatattgcacagtgactaccaatgtgccttttctacgtccgcacagcgaatcagagtatgattatatggacaatgatgaattgcctgactggccttcagagattgctttcgatgatacaaaacggtttcatctggtaagattattatttataaagtacatcctttgttgtttgtttaatgaattatcatatggatttataaatcatttaaaatgcatgaatcaatagagacacttgtggttttgcttttgcctactagttaattttattgagataccttgcaggtgaaggaatcagagttgcgagacaatgattggattcgactctatttggaacttacacttgttgctcacgataggtttcttacagttgtaagtgtcttttctctctttcatttgtttgcatatcaaaatgatttagtggcattcaatattggtaataattaacattacatgattttgtttatgcagcactatctctcccagttggagattgtgaaagttgcgattgaagaagtggagcaaccgaatgcgagtctcaacaccaaaactacatttgtctacataacttataaggacttggcaaaggctcagattggtgagccggttgatcgcaaagctattgttagaaaaatcatcaatgagactacgggactcttgagactccggggtgattattggagtggagaaagaagtgtgatcactccggaggaggaatatatgcttctccatggcggagaaaaagttcgaaacaatgagcagcgttctaaaaaacttaagcgtcgtgtaggtgttcataggctatggcgatggtggtaccaggcttacaaaaaccgtggcctccgctcgtcgtcttattaagtaatgaatgtggataagctgcataactattattaatggtctctgactaagttattttgtgcgtttggactgtttatgtggatttgtttttttgcggtttgtgtaagttataagggtgtactgttctcaacatctgaacactaatgtttagtttaatcgtgcttggttttgtcttcttggaccaaatcctagttgtgaaatttgcctttactgcttcttctctgctttagttttctcttcatctctattcttttccatggttttggcagatgatgttataaaaaataagattagagggaaatacttttaaccaaaaatagacattataaccataggaaacaagactagttaaacctgggaagagaaagagaccattgatgaggaattggcaaagcagagagacaatgtcttaaagcacattttgctctgtttcctctaatcataattccagctacttcattgttctttcggatagagaacacatttaaaactaatgtaaaaatatcttacacagagtgatgaaattctggtgacaatgaccaagctctacactatttctcctgattcttatactgcgagaaagtaatgagattttttgcatgtcatttagttttattctgttgtaaccatagcaagtaaagggagtcttacagaattgatacaagtgaacacagtaggaaactgttacgtgaagtgaaacatcaattacttactaccaattcaggaattgttttgaatgagatatgatatcttcttctcggcttgtagttctacaagcattgaggttgagttcctttcttctttaacatctccaagtatgtgttcatgatcttcttgtctaactcgtaatagacttccattttcttcaaaggtctcatatcaagatcaatgaaatgtacctgcaaagattatgagagtaacaattcaatagcaaatatttaccatctagaagttaaagaaagatgtaccttgtattcaaactcttgctttgttgtttcaaggtgaagattactatgggaagaggattttgagagcccagcttccgtagatctaaaacttatcattacactacaatcctttgcagtggcagatattagaaattccttcaaaatattcactttttcgtccattggaattgagtgcatagagctaaattgattcaactctctgcacactttacatggctggtcaatgaagtcatagtacacgtgaatcgctccctcgatgttatatctatcgagcttttgtacgtctagaagctgatctagaactccggatgtgtaaacagtttctgctacaagctctatgaaacgatctgcacgtaaaccatcatcggtcttgatgatatctttgagtatatgctcaaaagctagttcaacctttgaggttgttttgcatatgccaccacctaagcctccaaatactagagaaccattcaaaaacacacgaaaattgttctgaggagtcgtgtagagcgcttttatagcttcgagtattctttctttggatccagagaaaaggtctaaaggatcatattcactgatttctgagatctgcaaaatacatagctttaaagtgttaggttcaaagattggattaattgttaatttgagagatgtaggagaaaaggtacctcgttttccctaagcttgagaacttggtgcatttcgaaacgagttatactcttcttaataacgttttcttctgctatgaaacttgaagatggaaggaatccacatttgggctacttcatcagagcaaacatatattagccactaaaagcattcaatggctagcataaaagtaagtaagcacaagataatgacgaacacctttatttcaacacttaagcatggtttatcctcaacatgacctgaaagcagaggagatcatcatcattaacacgacaacatgtatataaaccaaaagcaatgcttaaatccatcattgaatttactttaaccaagagacaactcacaagctcacatcaaactttacttgcaagtgagaacaatgaaaggaaaagcctgatcaatagttttattacacgaaatagatttaccgtgggcgaaaagcgtcaaatcatccatgagaagcacagaactgcggttagtatccacactagctacatcagctcgccaagaaggacgttgagatgttataattttctcaacagattcaagaaattcctttgctacaagaagaagtatctgcaaagttgcaacaacacaaaaaaattcccaaatcatcacaagactcaaaaccctttaaaaaatttccattttcatgtaaccattgcgttagaatcatgacaagagaaggaaatgaagaggaaacatactccaggattgacatgtttacgacccaacaaaggtctcatgacatgtttgacaaacaaatactcttcaatctccttgttcttgcaagatacaagatccttaacgtctccccaaataagcttttcatgagtagtaagaccattttcacttttgtctccattttcattcccatcctttggcattttttgtatcctcatcatctttcccaacttcacacataacacacacaaaaaagagaaacaaacaatttagaatcaatgttaactacttcttcctaatcccaaaaaacgatgaaatataggttttgagaaacagattcaaagaggagactaacgaaagagggagaagatccagtgtaagcaagaaccaaattaacagctccttcgcctctatatgaccaatcaactgcatcttttggttccaaaacaatctcctccatctgaatccaaacaccaacacagattaaccaaaattctcgtttattttatatttaacatcagatgcgtaatcttagagcaatgatcaaatcgaaaacaaactatgaacctttgatttgatcacaatgtagtccacttgcacctttgatctgatatgtgtaacgtgttgcagcagtcaggttagaaaaattatcactaatgatctcgattagtattaaaatccaacactcgtaatttagttctacaggtttctttcctctctcaaaaaaaaaaaacaatatctgtacgaaacaaacgcattgcatgtatccgtttttttttttaattattgattgtgtttattaaaaaaaaaaatcaaacaggtccataagagacatatatcgaataatttagtaaccattagtagaatataattttttggaactaatacaatataaaaaataatgatattgtgtatggattttaatggatgaattaacaataattaaaagaacaagaggaagaaaatgtttttttttattaatccttcaaattaggcgaaatcaaaggggttaagattagaattagggaaccaagtcgcccccatttatagatttcgtaattgagaatgatgatattaccgggaaattgaaacggttgtggatttagaattagacatttgagaccggttaaagaaagtaaaccgggaggggaatataggacaagagatcaggtggtgggaaaggaccaatgatgaggaactgacaaattgcagaagacagagttaagtaagtgtctctgtcttaatattcatcgggaaactctctctatctttcttatcttagctgtacttaacatttttctccgtaccttttattctcccttattggcttcttttctttttcagttttttttttttgtataaaagattatatatttgtttacttctgatttcttactcaaaatgatctcgtttatcttacaggatatatatgtatttaagtagatacgatttttgaagtgatagatacgagaacatagctggattttaaggtagaagtcaattcaaaatcaatttcctataaacttaaattctccccaaaaacgaataacaatattagctgtttgcacttgcaccatatggtttatcgaatattcgctgttatgtttcttccctttttttttctttgcatttcttcgctctctgaaaatctttttattcaattactactattttcctttaaaggaaattacgattcgattttattagtaatatatttctcttccaagtgtatctcttttttatagtattcagattcacccggctagataaattcgaactttttaaaaaccatcatcactcacataccgacaaaaaaactattcatcttattaaaaaaaaaaagtaaaatatcctcaaaaacatctaaaagaagataaattacaccatagcctctgaagattacaaaaataaacaacatttcctcatgaaaaaaaaaccctctagtatttatcaattatgccggtagtaattttattactctcttagataataatcttgttttccacccaaaaagatgctaatcaacaagaactacttaataataataagaattatcaactaagaactggtcttatctcatgaactctcataccaacaaaacatgacttcaaacactttcctctcggcgatcctcctcctccgaccatcattccactctccaccaccgtctcctcccccaccgccgctaatataaccttcctatatccatcatcactatcaccatgcacattgcccttatcatcatcattaatagtaacatccttattaatcttatccgccagatcatccaaatcatcttccacctcttgctgatcatcatcatcgcactcatcctcatcatcacattcatcatcatcctcttcatcatcactttggtaatgagagggttcttgaggaagatcaaaaacatcatcgtctaaaggaacaaggtggagagtgagacgaccattggatctattcgcacggaaatactcatgatgacgaaccttctcttctctgagtataagcctgccgtcgctggtcaccacacgcttgagaacccacggcatgtgcgggagaagattccccgtctgagcaagcaacggtatcggaggaggaaactcacgcgccgccgcagctctagcttctctctcctctctcctccttccaccgtaacgaaaccggctttttacaggctccgacgcaacggagacaacatcgttcccttcgtcagcggagaggatgtcgaagcagctctctgtcccgatgtagtctcccacggcggaggaagaagaagatgacgtgcgtgaaagcatggatgacgtcacaaaaggtgaggtttgatcggagttgatggaaagagactgatcagaagaagaagccatggatgatgatgagtcagaggaagaagaggctctctccatatctggattttacaagaaaataaaaataacaaaacccaacaaaaaaatatcaattttttttttaatgggttttgtttcttttattttataatttgaatgtgatgttgaagacttgcatgaagagatcttaaatagagagacagctaagagaaagaggtgatgtcatggaaaggatggtctctgagatattattgagaatctgtgacatttaatgttttttttcctgtaaataagaaaatatagaaaatattagactaaaatagaccaaaataatattttttgctaacaatatgtcatcattaccaaattagtataagctaaagtggatatgattggtagaacatctagaagtttcttagaatttctatacatctctcacacctttcttttatccaatgaatgtacaattgttcttttaaatgcatatggcaattaatctatagcttgaaattgggactgaaaaatgggaaaatataatgtaattgttctaattgggtttcaaatatatgtacaacatctagacgataatggttacatatattatcttactaacaaataatcaatagtttaatgacaagatagagcataaactaacaacatcacagccacacataatcaaccattatctaaatatttaggatgagcttaatcctatatatgtatgccatatcatattctctttgatctaattacttacatttccattttcttgaacgatttaatcaacagagaaaaaaatagatagctaaaataaggttaagctatgaagatggtcattaaaacgtctatggattattaatccttttaaggtaaaaacagccaaaatctgttgccaaagtttttagaaacgttacaatgaaaacaaaaagcaacttcgattacatgaaagctacacgttttgttttaacaagaatctgtctattctagaacttggaatgcaaaaagtatctacctattcttgaacgccaaaaagcaactacgacgattcacgaaataaacaagttgttgactgactaattcgcgaattatttatcaattagttttacaaaaaaatcattaacgcaatggtcaaatcgaacaagctacacgtacctttaataaatgaataaaacgaagccgacttccatgaatatatatctaattaatttcctaggattcaaacaacgattaaccaagattctaagaaaacattaagataatcacgaacattcttatgtgtttaagaaacaaaacaaaaaaacgaatgattgagactaatatcataatcagatttcctaaatgtaatcctacaagataatgtatcatcatcatcatcatcatcatcatcaaacaaataaaaatggttttcaaacacgaaataattgaatgcaaaaagattaaaaaatcgataataaatttacctgtaaacatggaaaaagcaaacgagttttcttccgagagattaaaagatgaacgttacgcgaacttttgttctcttatacacgctcgcacaacgaagcacaagagaatttaattcgtcgaaacggaatcgatacgatatatacctatcattaattcgattgtttgaaaagaaaaatcgttttgggattaaggaaagataatcaagaaaaaatatttattttaatttaaaacaatgcttaaaattaggcaaagtcggagggattaagattaggatgtttaaccaagtcggccgttcctctctcgcttgctgtaaatccttaacctatcctaattttaagcgttatggataaaaaaacttttaaattttaactattttacagcatctctatggtaacaaaaatttagaatttattattcacttttttcttatccaaaggatatgactgatagccacaatggcagaattttccgaaaagtgataattataagatagaataggattattattaatttaacctaattaatatttcaattccctgtatttgatagtaatattcaagatttaaagatttgataacatgatttgtattttgtcatgacattatcctaaagtttgtgtttgttatctaaggtcattgtgatttatgcaataatgtcagattttaaagcataatttagacaattaaattaaaccacaatggattacgtttggatatatattctttaaattttataattaattaacactctttagtaaaacaaaacataataagattacagaataaatttaccatttacatatgttagttgtattttttactattggagaaacttgtaaacacaatggtacagtgtttggctgataaatttttgtggatatgaaagatccaaagtgagagaaaatgctaagacgctaaaaaaacaggacaaaaattcctaaaggaagaaaagtgttcaaattttttcgaagttaactctctgttactgattaccatgcatggagagtcttgataatgttctgaatcacctgaaacgagataaattgacaatatcagcattatgtaacataagttatattgttactttagtttataaatttaagattttgacaagtcggcgaagaaacaaattaaaactggtgatctgataatgtatacaatagtttacttttttaacatcaaaaaagtttaaaatagtttacttacccggatcgacaacacagaagtacttgccgcaagctgtacctagaccatatcgttatctcaaagtgaaacatttttaggatttttgagaataaagtcaaatgtgatgagatgagatgagctctcaagatagaagagaagataatagaagttttttgtgaatataatatgttttttggttttgttttcaactagtacttttgatgattcccaaagcagcttacttgtcaaaaacttaaagaatcagaacacaaaaacaaaacaaatagtaatataatccatcaagtctggcccttgagtatatcgtaatatcgtatgcaacagtgaaatcaagcaatattcaaaagatctttaaagccaaggagtagctttttgatcttagcagatgtaaaaaggttaaacctagataagctaaaagactaaacacagagtgttacgttataagctgaagcatttattaatgattattacatttaaatgtttttacctaaacaaggtttgataaatccataaatacacaagaagagagcatttactttcactgtggtgatgaacaaaacaaccacttcaaagcagacgaaggcccgctaccattagggagtgatggaatttacatgtgctagggtccattgacattctgatgtttattaggcttttcatcagtccatcattgttgatccggccattttttccctcaaaggctctaaattcatgttgcatctacaccaacatagcaaatgggattcaaacatattttagctaaattttgtgtaaaaaatacttgaataaaataccatgtatattgttttcaaattgtgttctgagcatcgtatgtttgacaccaaaatgcatacacgtctaacgtttttaattaaagtgcaacttttagataaaacgttgtcgtcttcttgttcagattaggatgaaaattgcataacgcgatgcaaattcagtagttacgtttgctaaagagaaaataactgcagtgaggatggtgttgatcatgacttcatggcatgattttggcgatgaactattaaaaccttttcccaatatgaaaaattgaagcaaacgctatatgcattaaaaaatttaaaggatatgacacaatataatagctagtgatttcaacagaccttacaaaagattgacttccaagattcttttttttactggcgatgaactatgacaaccttttcccaaatgaaaatttgaggcgacgccttatatatgcattaaaaaggtttaaaaggctatgacacaacataatcactagtacaaaccgatggactgacaatttttgtcacatgcagaaataatgtacatatatccataattgcttatatgatatagaatatggctctcaaatatcgtatcccatcaatacaccatattgattcttcaaatatgcaagttatgccgtcctgcaaaaggatttttagaaaagtatgaaagactataggataatgtaatatacgcttattattatttagttacgtgtcttggagattatataacatatataagaaagttaaaaaacaaacatatataagagaattaccatttcaaaaaattcgatcaaaagaacctcaaatgaggatcaaggggtaatccaacacctgcataaaatggatcgtatactgtattttctaacctgaaataagaagttaatatataagtaatgtaactaaaaatattttagttctaaagagagtatactactgatctaacattaattacttatagttgatataaacaaacctctcctcattgttattggccgcacttgaacgcctatttccatcttgccatagagatacactcgacgattctgctatacttttttcttgaaacggtaacatgatcctctgcaatagttattttttatgtgtcacactcctacaaacttttcttagaagaagaaaatgattagtttgtgtaagaatgcatgtgtacctttcttttagacgaagaaccttcattttcaaattgatcataacaatcgcgttggcttaaacctccaccctacaatagtagacataatatttttgttattatcacaagtgtttaaaaattgtatattatagttttgtcttgtaacagattgactaatagtagttggttaatatttatttatacaagcaaataacatttttcatcaagtggttctatagctcatccttcaacgagaaattaattgacatgtaatccaataataagatgaaaaaaactttacctgttggatcattgagtttgtgtatgaattttgatactgattgtagagagttgggttcaaagacggcatcgctgtaacatgttgttttcccttctcttgggcgcgatagggcgtacttcatataaacaacaatcatgaaaataaatttaaccttgtaccaaaaaaaaataaaaaaaatgatatatgaaatattaacacccaaattgcatggaagtaacaatatgtatttctaatgcatgtttcaatatattaaaaagatatgtgctagtgctagcatgatcaaaacttgttacctgggaggtgttgatagggtttgaattgcaggtactaaagacatgttttgtggtgttgtaattgtcaaactcggaggcataacactttgaattctcctcggcctaataaagtaaataatgtaatacataatttttcaatagatcatatggaaaagttaagcaaaacatgtatagggtaagacaatgatgtcaccttccacggggccggcgagtagggtttaacgagcttgatttttggaaggcataagcaaatgagtcaggctgatatgacctatgcgtaaatggtgagtaatttcctgtcctgtaaacattcgaaactcttcatttgtaagtaatttaataattagaatgtatataagcaactaaacaaaagtaaaatcactttttatatacttcgttagtgtaagattattactctggatgcgtcaaaatagttggagtcgatgcaaaaggacttaggcattgattgtttagcagtgtccccctataattggacaaaagattaaacacaattaagtttcactacactggataaatcaatttttaaacaatcaaagtaataaatctcttacactgatgttggggtactagacatgtttgtgaactttggtagttgcatttgatgttcagtttcatgaatacgcatgatttgttcaagtagtgagtcggtgtgattatattgttccttctgatacctgcattgattgatatttgtattaatagaatttctaaacattttatatatttaaggagagaaaagaaaaaagatgttatgaattgcatacaaagaaggatgaaagtgatgatcttgaaggccatgatgaattagattgagatttgtaggtccattagcttgccccacttcttgtatattactccttacctgactcatcataatattgaatgttttttgagtacacatcaattttaaattatggattatgtaaaatagagagttatagaaaatttataccagtgttgaaacatatggctggttagagaaatggggaattgtctgagacaataaaggttgttgataactttgctctggaggtccatgttgtacatcagttgattgtagtccagtagtcatcatttgattgctcgaagttaggacataacttccactgtccacattttctctttggccattgctaaatacactcgacggctacaaaattataagattagtacatattgaatggtatgtcattagttatatgcattattttagtggaacaagtgttataagtatagtagtgttcttaccatgtcattaaagttttctgcagtggtcaaatacttagaatagtcgtcatcttgatgaaagctttgattgtgtgctactatggctgtctcttgatcaaagcttgatgaagttcttgtcaatgtctcttgatcggtgtttgaattctctattagtggtgaaggaaacacatcacttgtggcggcagagacagggttatatccaacaaggtcattgtgttcattttctgaaaccagcaacgaagcatttcctccacactcctattcacattatacgttaacaatattattatatacgtaaactactattctactttgtttaaatgcgactttttttaaaaacaaccatttacatgaaaagtaacagaatgagaaaacaagaacaagaggtatattaattggccaacaaaatgtagttagtcaaagcaaaaaccgtttgatgagaccagtggatatagcaaagtttttgaccggacatatgtatatttaataattaattatttataggtttttaaaattataatttatctcttaactaaatattataaaacttttgaaaaacgcattttactctatatgttttgctatggttttgctttaaaaaatatatatatattttcttctaaatatacacaacaatattagtatgtgaaaaaaacaaaattttaaaaaacaccggagatgaagaaatataccgtgagaacaccaaaagtttctggtaagtcgaagaacgaaaattcaagatcgtcgtttgaagccattcttaacaacactgcaatattctcaatcaaatcattaaatcaacgtaaatcactaaattgtatacttaccacaataaaaacatcaaatattttgtatgtatgaaaaagcttagatgtgaccaaatcaaaagtgtgtatgcatatattttttatatgttataaatgcatagttacacatgccatggattgtatatatatatatatatagtttcaaaatatctgtgaaatgaaaacataataaaatttgcaaaagctacatgtattttcattaaaatgaacaaaattccacatcatcatcatccaatattgaagaaaacatttgataatgtaaaattcaaggaacaaaaaacatgtgcgttaaaaaaagtaatttagatttgaatatatatgatatataaaacaaaaatgaaacttatctcataatttacaaaaaaatcttatctgaatcttgtttcaaattttagagagctaaagataaattttaacataaatgaaaatgataaaactcagaaacttatgcctaatttatctatagagatgatgtgaactaaaatataccttttcttcggtaagaaaagcgaccggatatgctcgaatgaaaccaagatataatgaaatcaagaagaagtattagaaatggtcgaggttacggatcgagatatataggtagacgcttgaagcaacgggataagatttgataaatatgattgcctttatgtttgtatttttctgtgtggccaaaaacaaaacaaaattgtttccgtatatgattacaataaaaaattttatactaaatttaggattacatatttttatactaaataaaaaaattatgaagatagaaaatcttagcttcaaaatttcatctctattcgtacttatatattactagtgattatccatatcctaaagacattgcgttttgaagcaatcataactcagaaaagctaaataatagtttaatttttaaaaaaaaacagaaaagctaaatatttagcttataaaattattgttttttacatttattggagaaaatcttgatttgaaatccccttataaaattatttggttttacatttattggaaaaaatcttgatttgaaatcccaataatattagtgttagatttctttcctcaattgttaggacattatatataactttttgtgaaagtatatattgtatatcttagttttataaattaagataaatgtatccattcgtaaataaacagatggaagattatcttaatattgacattgctaagttcataggatgaagatttaactttaaaaacaaaattgctagcttctcaacacttatttgccccaaaaaaaaaaacttctgaaaactttaattcaatattctaaaagttcatgagatttggtgaaattttagaaatatgaagttatatttcagacatcataaacttgaaatttttataaattctttaaattaacgattttataaaatattgtgcaaaattttataattttggtaacccaggcaaagattggtccaaaataagcatttttctttgacttttgaaatatgggatctacaaagacacaacacagaatctgcaaatatggagaccaaccaaaaatccaaatttgccagattctgccaagtcaacaacaaaattatagaatattgtcggttttagaaaattataatggatagattacaggggaaggaaaaaaatcttaagattatttcttaatagaaaaagactattaaggaagataatagacaattaaggaagaaaatctaaatctgatgagaaatatctattcagtttttctttcttttttttttgtcttaactacacaagtggaaacgaaatacagtaaaacctctataaattattattcgataaattaataaatttttccggtatagagttgggaccaatgtaaaaattgatacaaattgataaattaataagataataatttttttgaaaattttatataaatatatggtcctatcaatagtataaattaataattgtataaatttacaaatatttattataaatatcatatgtaaaatatgattctattaatgtttttcttcaattttattaattttttgtagtattcaattctagtattttacaacatcaaaaaaaatttgtattattttttaaacttaataattgttttatacttgtaattggtttcataaatactatcgattataaagaaaaaaactacatcttatattgaattattgtaagaatttccaaaatttgtacaattttattaatttatcgataaataatatctctctaaattagtaattttttttgtctcaatattattaatttaaagagattttactgtagccatgtttttagtataaactgagaagataaaattttccgttacaaattaacaacaaattgtgtagtaaaaggttatttatgtgtcagatttttcttttttgttgtcttctcctgactataacttctatggcagtgtaattttgaaaaaaaaaagaaacagaacacatataagaataacataatgaagataagatttctttttttttgtgaaaattaaagaagataaaacttgatttgcttttcgcccataaaactataaaatggtgttgccaaaaagaatagtatacaaaaataacacgactcttcatcgtcttctcatggcaaaaaaaagttcacttttttatgggttgttggaaaaaaatatgaataaatttttaaaaatggtatacataaataaataatacattattggctactgagttgaggaacctttgtttcatagtcggagacttcatgatcaacttgtgtctccgccgtcactcccggaatatcactctgctgagctggcatcatctcttctatactgggacccacaccttcatgctggcacattgaccaaaaaagtcaacatttttaacttaagttattaaagacaaaaaaaaagaccaaaaaaaacctgttgctgcatagaagcgaataaggccgaggatgaatacgcctgagcccactcagggaacatttcaccattgtggttcgtcacgtggcattcactcatgttgttttggttcgagcttgagctacttccttgcaacaatggttcatacattgccgatgataattctctgccaattttacatttctttaaagtaaaaatttactgaattttcttgatcaagattataaaaaaatgtgaaaagtttacaaatcttcttgatcaaagaaaaaaaaacaattatagtacctgagttggttagaatgggccgatgcatcaaacaaatgggtttgattggtcccattttcaggtagccaaccttcaacgacgtcatttacaaaaggaccaccaatgtttggttgcatagtagatgcttcatacgaagataaatggttgctcatgagatggtctcgccgttggacaacatgtgttagagtgtcgagaagttgcttctcagaaacttcgtattcctccatggtcgtgaatcttattggatccggttcgtatctcctgctcatattatatagtaagcaatcatgatttgagttaaaaaaattataaactataacatataacatttatttttcgagtaaaaaccttagttcttcttctgccatttggagttgttgttgtaacctacaaacttcatgctcaagttcctagatttccgatttcaagcgagacatttagaaatatatctatgtcttctaattaattgatggaataacgattaattacctcgacgtcagagttgatagctgcagggctttttcaaaataattatatgaaagaaaaaaaaagtttagtgtatagtttaaatgtgttttgaaggagtgtatcttggtaaacatatgaaaattataaaatcaattataacgacaaaccgaaggaatttacggacttcgtgacttgaagagcgatgtcattttcagtcttgagttgctgcagaatccttagtagacactttcacataacaacaacattattcttgactttaaggaaacaacataatgaggaacaaactaatcactatgattagaactaacctctttgttttgaatatctctgcaaacaaaccaaaaaagaaaagagagggtcatgaaaaatttattatacccatatgatcaagtgtaatgtaacaaaagaaaaactgatatacatacgggcgtctattctggtcaggaaagtatagagcactgaaagaaaacaaatcaaataaccaaagtcaaaatttactaaaaatgtagtaatttataaaacttggaaaagaaagtagtttttagcgtacctctctcgttcttgtttaggaagattgatgaatcttgaaaaaacgtcttcaatcctaaagagacagagaactaagatatgatatggtccaaaacctagaaagctagcaatggaaaatgttaatgaaaaaggggtaaattaaatgatgtaataccgagtttttccggagaaaaggctaaggcgatcagaaggagagaacatgataagagcaatgtcgatatcacaaagaatcgacaattcataagctttcttaatcaaaccatttctacgttttgaaaacgtaacttgtcgattcgttgtgttctctattctcttgatttctaatttcacccgacccatattggcgaagcaggaagagattttgattcatccaaatcgtaagttgatataataatgctgatcagtaatctacaaaacttcaatccaaaaaatccttgtttgaaaataattttgttaatatatacggaaggaggatgaagaaaactgcttataattaggcgagttaataggaactaaaattagaatttttgactatattccttctctagcctcgtttcgttgtatatcgttttggagatttcttaagtttgctcttcttttttcatcaaaatctttggataaacggtgatgagattacgagatactcatatgctgtttaagcatcaaagacgctaacttttatgagtttgatagctaaatagtcctcatgatacatcatagcgcagagtttgttgtctttttcgtcgactctatgaactatcttcactaaaaatgtcccattaacacaatttcagttaatgtctcgacttttgtttgcctttgaatatatatcaaacattgagggatgtaacattcaaccaccaaatttccaaataatcagagccaacgattaagtcacaattactgaggactaaatttctgatttaacacttgagacaaaagtgggaacatgagagtacaacaacaaaagagaaacagagttggatcacaaatcatcgaggaaatgtcttaaatcacctgaaacacacataaatagacaacatcaatagataatgcagtaacagatctctttagctagtttcttgagatgaaacaaaaaaacacaacaatggtttcatcagatcacacacaatctgcagatccattgtcccaattcataaactcagatgcaagtagcagtactaatgagagtcgaatgatctctgttacctatgaagaagtagtgaatagaccagaatcaatgatgagtatcgtcgaaaacccaaggctcatgcaagaaaagctcacgaccattcattggaacacgacctgaagctatgtcctcttgtcgtttccttgctgcttcagcttgtttggctaataactcagcatccttacaagtaaacaacaaacttaggttaatcaataatgatgattcttttgattaactttatgtaagattcattacatgaaaataaacaacgagggcttcctaaagattatgcgtttgagtagagatatcaaatctagggttcttcaaatcgatatattcactaggaatcaacatgtaaaggagaaagagatagagagataccttttggcgtttccaagcgaggaattgatctttagaaattgaaatctgtgtaggttttggcgtttctccattaccggctcccatcgttcaacgtttttctctcaacgcacgaatttcaatatttctctattttgatctgtttttcttcataggtttcgtgataattattgttttttaaacgacagcgtattgattgtcccatcataagtttccttttcctcgtttcgtcgtcgtttcaatgaatagctaagattgaatccgatggtcgtcatttttttgttattttcttaaattttgagtatgaacgaatacgaaattgaatggaggaggtttaatcttcgtgcttgtattggtccactatagtttattaagattttcgaatgataatgatacataactattatcacaatcgatggactctctttaggatcctaaaattgtctaatcatacattacggttgctatattggtgtcattttgccaatgtgtatgttttttcgtttctttcttggtttttttctatcatgtgaattttatataaaattatcaatggtaggatatttgatagattacaaatatacaccggcgtaaacacaagattttcccaaactctataaaaatgaagcaaagtagtactatgagatagaggagatcgagcgataggagagtaaacccataatagtatctctaacccatctctattttagagataaaaatagagatatgttgaagtgaaattaaagtaaaaatagagtattgagataaaaatagagaaaagttaaaaacaattaaacccaataaaactagaatcaaaccaaaccaaaccaaacatcctatttccaagaattattttgagagaacgaaatgaaaatgctctcaaccaaccattgctactcaagacctctacatattacaatctgcattaaaacatcaagagaatcctagactaatgaatatgttttttgagcatttatgtttattttgtcaacatcagattttaatcaacaaaaaaaagttcaatgtcatattttggtttttcagtatggcgatatatataatcaaaagcgtcatataaaattgtaattctcgcccattgccaatacaaaactacacaaaacgagcatcaccttttaccaattaagtattgaaatgctattatctaaaggcaattaatatgagtcctccaatgtaatggttaatcaatatattcgcgaattgtgcttagaaatgaagccaaattgaaaaaagtttgtcagtattattcgtgaacctaccattttgttgtattaaaaaaaagttttttcaacgtcaaattctttttgtaaagattcttttttttgtttttaaataaagtttacactacaaaaaaaaatccatatttaaattacatgataatatgcggctacccgtcgattcttatggagaggcaaaagatggaacacataactgaagtaactccagccttctcgcttagggttgtttgactttttattattgtatctcacaccatcaacaaaatgatgactagtggcattttctcaaatttcggatctaacttcttcgaatcttttttgttgttcactgtaacttctaaaacttgtatcaccacatttaccttcttctttgtttttgttaagttttttcatctttatgagaaacaacacaaatataaagaagaaaagattcgagatccgtattcttcttcattttgcttaagtgaaaacaaatagtttttgtttatttctgttccatatctgaatatttccttatggagaaactttgatctgttttgatcatcactttcaaaaaaagtttttgtaagaatatttttctcctcttgttctacaaaagaaaaatcatattctgcaaaaacaaaaacacgtttatcttttctttcaacaatcgggacgtgacttttaaaaaataaaattcattgatactttttcttaccctcttttaatcttttttttctgaataaaataaaacttcttataatttcccctcttttcttaaaattagggtttctcattgatatatttggagagtaggttaatcagtgaacctggacaggatctaggttcctcctctttaataacagacgttgggtttgtacaatctggcctgacgtttccagttaaaaaaaaaataaagtcctctttatatatttagacctaagcaaaaatttctccatagaagaactttgaaggaaaaaaagagaggctaaatcaaagatcgaattcgtcactgtatttattttccaggtagatatgtaatgctttttttaccttccactatcaatggttttgttctttcttttgctatattcgtcgactttatgatgattcccttataaatcgatttcaatcgtaagatgtgttttgccttttctctattctaaattcacaggcctttattatataattacatggatattcggcattatacggttttagaagaacctaaccaattttccatcacccaataattgctagtctaaaagtgattctaagacgacgtatgtatatagcataagaattttcactataagtcaattaatcgtttggtgtaggaagtttagccaaaagttacaatggtaaacgtttgcggcagctaaatcaatttgattgttagtggagatactaatacgaacttactagtgcgaacaaactaatttcttattcttaggggtgctaatggcgttttttggcaactagggccacttaagtttttttttcctgaagtcatcttctttcttagttacgttaacgatgtttttgaatgtaaaatattactattttttttggcaaaacaggttgacatttctataaatacgtctcttcagtgtttgctacaaaacacacatagcaatgtcggctagagctcatcctgtggacgatgacggagagatttccccggtggaaagatcttccccgcggcaagcaaatacaccgtatgtccacaaagtcgaagttcctcctaagcaaaaccttttcaatgagttcatgtacacttttaaagaaactttcttccacgatgatcctctaaggcatttcaaggaccagtcaaaatccaaaaagctcatgctcggtatccagtccgtctttccggttatcgagtggggaagaaaatataatcttaagttgtttcgcggcgatcttattgccggtttaaccatagccagtctctgcattcctcaggttagaaaaaaggttcaattacttctgccacaagttacttatgtaagaaagcataaactgatatgtattcaaatggtttcaggatattggatatgcaaagctcgcgagtcttgaccctaagtatggtctatgtaagttaatatcaatatcctaattaagcctcatttacgtttttattgtatgttttctttgaaaatgatacaacaattcttattattggtgtttttttttgtttcaaattcttgaatagattcaagttttgttcctccgttggtgtacgcatgtatgggaagctcaaaggatatagcgattggacccgttgcagtggtttcactcctattaggtactctgcttcgtgctgagatcgaccccaacacaaaccctaatgaatatctccgcttagccttcacctccacgttctttgccggtgtcactcaagcagcactcggattcttcaggtaacatactaaatactaattccaacctcacatataaactatgcatcaagtttagagattcttgtttatctaaaacttcttaactttggtttcagattgggtttcttgatcgatttcttgtcccacgcggcggtggtaggtttcatgggcggagcagccatcaccattgcgctgcaacagctcaaaggcttcctaggaatcaataagttcacaaagaaaaccgatatcatcgcggttctttcttccgtaatcagctcagcccatcacggagtaaagagtctttcaatcactctgtttttagtatctttcactctttatgtatcttcaccgtttgatatcaaatgcttgcagtggaattggcagacaatactcattagtgcatcgttcttgatcttccttctcatctccaagtttatcgtaattcaccgaaccatcgattgcaatctcttgttgatttctatttccttgttcttatatgatcttctgataaaaacaggggaagagaaacaagaaactgttttggattccagctattgctccgttagtatctgtcatcatttcaaccttcttcgtctacataacccgagccgacaagaaaggagttcagatagtaagcataaccttataggcttaaatatataaaccctaaagttacttgcgatgtaagttattttactttgccttgtcttaattttcttctcctcaggtgaaacatcttgacaaaggtctgaacccttcttctttgcgtctaatatatttctcgggcgattaccttctcaagggcttccgcataggcgttgtctcaggcatggttgccttgacggtacttacttacataaaccctaaaatttatgttttactattgaattttgatttaatatgtaaacgtaaatgcaagcacaaatctttgtaacaggaagctgtagcgataggaagaacatttgcagcaatgaaagactaccaaatcgatggtaacaaagagatggtagcattaggagcaatgaacgtaatcggttcaatgacctcttgctatgtatccaccggttctttctcaagatccgccgtcaactttatggccggatgtcaaacggcagtctccaacatcatcatgtccattgtcgtcctcttaacgcttctcttcctcactcctcttttcaaatacacacccaacgcaattcttgcagcgatcatcatcaacgctgtgattcctttggttgacgttaatgctaccattttgatcttcaagatcgataagctcgattttgttgcttgtatgggggctttttttggtgtcatctttgtatccgtagagattggccttctaatagccgtaagtcccaagaaaacagtaccatatgtgtgaattgataggttttgcagttttcttggctgatgtttttgggtgttaatgttttaggtggggatatcttttgccaagatacttttgcaagttacgagacctaggacagcgattcttggaaagataccagggacttcggtttacaggaatatcaatcagtatcctgaagcgactaggattccgggagttttgacaattcgtgttgactccgcgatttacttctccaactccaattatgttagggaaaggtatgagatcgaatcatgaaatcaagtttgaactgttacttgtttcacaagaaataaagtgtgtaaaaccttacagtttttggtgttcttgaaatatgtaggattcaaagatggttgacagatgaagaagagatggtggaagctgcaagattgcctaggatccagtttcttatcatcgaaatgtcacgtactgaactaactctttatttttacatatagatcgctatgaggtgatgacttctgattcacgtcaaatgatttttattatacatttttagctgttacggacatcgatactagtggtattcacgccttagaagacttgtataagtctctccaaaaacgagacattcaggtacacaccataaaccaaagctaagcctagattctaaagaagttattatgaaacagactaacacttcttttggttgtgtgccaaaacagttggttctagcgaatccaggaccgccggtcataaataagctacatgtttctcactttgcggacttgataggacacgacaaaatctttctgacggtggctgaggccgtggattcttgctcccctaaactgtccgacgaggtctgatccggagaagaagaatcttgatgatgaagcaaaatgatataaagtgttgtatgttgtatagactgaattgagtagtcagtgactttgctctgtttatcttttatctatccccaatcgtgtgacgtagaggtcaagtgtaaaagttgacctatatagagctttttttagagtcgtgataagcttggatttactggattagttttcgttattgttttcaataactttgaactatagagattatataataagttataatatataaacgaataaaatcggaacccaaacattaacatctgatcaacgtaatgcaacgagcgactttattgctactattattggtggggaaaccttgacaaaacgttttgtgttcaagattcgaacattgaaaaaaaaaacaatgaaaacatttctccgtaaataattatgtgtggaccagaagttgaaacccacttgtgtacacaataaactagattaagacctttgtttatttaaaataataatggcttagacgtctaagcgttagacggtcgttatctagatatcaattttcttcatgtattattatctagttgatagacctagtttgatgttttaggtgcctattagatacgtttggcaatcgatctgtttttttaaatataaattaactataaaatcataaaccattatattttaaacgaatttgactaaaacaatttaaccaccgtgcaaatagaattataaaaccgtctgtaaaaaaaaaaaactcacatctcttctcgaaaacattaattgagaaataaaaatggtacaaaacgtaagattttgagaccgaccattttgtacaatgtgccaactctgttgtactgtaatcgagtgtccccaaatgcaccaatcaaaacgagttagcacttagcactacttgttttttgtgcatattttttataacaaaaaacaaaagatgctaaggactatcaatcaatcaatgttccatcaaatgataataataaaaaactgttttgttttgtcataaaattttgaaatggtattataaatgggaggtcaagtgatattgaaatttggcttgggaagtggtgaaacgttggaggccctttttactattgtaaagagacatatcggtcacagaagtggacaatgtagcccagaagttaggagctataatacaacattttcactttatttctcatccatttttaaaacttttcactttttttcctcaaattttactattttatataaatgtcatcgatggataaactaatgagtgattcagccaaatattttgaataactttatttttttatttttttattttttttatttttttatttttttattttttttattttgaataacttgagtttaactaagatttcagatgattttaagtgaatttatggaacaaagatttgctaatttattagtttaatagccttacattttaagacatatctataaataaaataactaataacaagtatttagcaaaaaaacaaactaataacaacaagttttttaagagtttaaatttgcttgattgttattctaaataatacaatttcaattgtatgattgaatacacctacacaaaataattgatttaagaaaaagaagaagacaaaataatttgtgaaagaagaagaaaaaaaaagcaataataacgaataaaataaacacttaaagaatcggaatcatgacgtgtcgtaattaaaacgggaatagaatcgatcagacaaactcaacggctcagattaactcctcagtttatggctcttcttttatcttctctgtctcctcttttctcacttccctctttctctctttcactttgctctgttcactcagagcatcaaataaacaaaagagagaaaccaaaaccacacaagactaacgatgttgctagggaagagacagagaccaccaataaagagaaccacgagtctatctgagattaagttcgatttgaatcaacctagcgaacaagaaccatccgatcatcagattcagcttgtgaacgttgatgaacatcgtcaagttcatcaaagattgttagatcaacggcttttagcgatggtctcaccaagaggtacacagagaagacactcaagtgattattctgaagattttctaagatcttgctctctttgtaaacgtcttcttgttcatggccgtgacatctatatgtataggtatgagtttaggacctaaagattaatctcatggttttggtttgattagatatgtaattaacgatttggttttggttgttaaattatgagcagaggagatagagcgttttgtagtttagagtgcaggcaacaacaaattacagtggacgagaggaaggagaagaagaaaggttcggtgaggtccaccatcgtcgtcgccaccggaaccaccacaggagagagagtttccgccgccgtgtaggtctcttttacatatgttatatattatcggtaatgattgtattatatggttcttgttttatgtataaaaagcattgagcactattgactgtgattaaccatgttaatcatcctttaaaccttgcttttgatcttaagaattattgtattatgcatattaattagatttgtgttctactgattattctacttctaactatctgattaattaccattaaaagataaagatttattgtgtggagattagatatatcacaccatttcaattctttttacagtcagtaattgacaaatcaagaaaattcgaaatcgtatttgtgaaaattgtataccaacttaatatattgatatacaagtttgtaccttatgtactgtggatttcatgtatatcaacccaccaaaaatatatatttaccgtactgttttaacttcatgcttactttcgaatataaggaattaaggatgatccaatagaatttcttcattttctgttgtattgaaacaaaaaaaaatgaatatttgaatatgattttggtcaagtaaggaatctcatacctattcagcctagcattgactggtccctcattgtaacattttaagagattcttacttttttgcatgtctcagttttgatagattcctaatggctaatgctctccttttgcttcataaaagaattc

SEQ ID NO: 1143 - DNA, 36030 bp, Arabidopsis thaliana
gagttaattgcatattatgcagggcacaggaatgacgagtcatgctcgctctgcaaatattggagacttgttttcagaaggttctctcaacccatatgctgatgatccctatgcatttgattgaagtctacctcgcaaagtcagttcccttcactagactatctctctcactttcagaaacatactctttgtagaagcttgctcaccctccgatttacaacatctgattaatccgtaacctgtttgcttatgaactagctgtctctaaaaaacaatgataaacctttgcatcaaaaaacattgaatctattttaatcttcctatatgtgtgtattgtggacttgtggtatctatcggtgctattagtggttcacttgctcttggtgataacaaatctaatcatgtgattaattgttagctgttgaatgattgtttacagaacactgattccaagtggagtgatcactgaggcctgagaagaatcacaaaggaagcaagtggaaagcggcacaaccatgcagatcaaagttattcatatacaaagcatataataaaacaatcagtacttgtatatatacataactcatacatatctagtttcacattcttgggctcattaacatacactgaaaagtctagcataagagcttaaacaaatttaaagtctgaaactgtttagtggagctatgatcatcatggtgcatgaatttgcagttaggacagacaagagtagatttgcagagcataaccagcatgtgacacttcatgcacactgttgttatcatctcttgcttcttctgattatcatcatcatcaccttcaaacgctagccaagacggggatcgacttagccctatatcacctgatctcaccttcttacttgggctgatgatcacagttccgcctttggaacattcatctttctccatgattgtttttttgacagaggaacttgatgacgaataaaggttcaaattaaggtccaggtctgtcctatgatcttcaaatgtctctgattgggtctacaaaataaatttgaaacatgtatcacttcatgtttgtgtgcatatccttacatatatataagttaattttacgcattcataccttagcctctaggtgaagctgaacatcaggctttatcaacatggcgctatctgactttgatctttgaaagaacagagtagtagtgttcttctcaaatttggtttgtttttgatctccttgtttgctccttttgaaagaaccatgaaacgattctccaaaaactttcatatgatccctctttttagaacagagtgttccatcatgtggagaaaacattagatcttttttctctcttttgtgcttaaagaatctctctctggtgttagaaaacgaatgatcagatagacgaacagatcgtggaagtcgtgtatatatatacaaagataagtcaccaagtgagttattatcccccaccggttcatgtagaatagtagacagagttaatgagttagatataccaaaataaatatcgtagatattcgttgacaatataggattcaatttacaatttctttttgcatggcataaaataatgtctaccttggtatttgtttactcaacaaggatttattttgcatttatgatccatatcagtgctcatatctatctaaagaatggtaactcaagagttttaaacaatgttattatacttttatatatagtactaaacattataatcctgaaaagcaaaattgttttcttttggattaacttgagttttgaaggagatgaatgatgatgatgatgatgatgtgtgagagttccaagttggatgtgtgatcaataagtgttgggtaaggagcttcattgaaatgtgtagatttctatagttctactgaattcctctttctgtttttttgttttttttccactagcattatttgatatcatcaaccattatgtacgagttgtgtgtattcgtgttggtcatgaagcatgaagttgtctacatgtatgtatgatggtgatgataagcgttatataattcaagaggtgaataaataataaatagaaaccaatcagaaaacaataataaatagaaagaaactaaatacagttgaaggaggaaggttgatgacttcatgaatgccgaagcaacattaatacctcaataactctcactcccacttttcaatatattacaccaaaaatacgtacatatattactccctctgatttttattttttgtaaaacgtttaaaggatttttttgtttcaatttattttatttttaccaaaactttatttatatatttattgtggcatttgtatcatgcatgctgtggttttactagcgtatagattttaatattacatgatttttaatttaaacaaggtaaatctgtattaatctgtgtacaacaaccagtaaaaagaaacatgatctttaaaccaaaaactacgtagtaaatttcaaataacagactgaaatcttcttctgcggcctaccatgccacggccttcgcttcctcatttatttttaggactcttttggtcagcttcctcattaatcgcctttctatttttcccctctcttcaagttcagcggatgcatttatttttagatatacctttatagtagtatcatattgtacattaacatacatatgtatatacataatatacgtatgtatatacatattaaatttacatcctagaattatgatcaacccataaaataaaatattggatctaacttttaaatactcattagatctttataatatccagttgtaactaacaatgtttataactaagtttagaaaataggaaatgaaaacatcaaaaagaaaactttaagagagaattttcacaattttagttcaagattaatcttctatggttatatttaaaataatattacatacatttttcgttgttaaagtataataatattacatacatttttaaagaaccgtttgtcttgctgtgatactttagattagacacaacctcgggagccattcaccattattttttgttgcttggaggaacgtcttggaaaagaattttaccatacaaaaatcgtatgtccgcattataacaagtaaatgggccacaccatgcatgcccgtctgtaatttaacttttacgtacgtagaattacaactatgcgtaaatggggctattagctagttaattaccattaaataacagggaagataaaatggaagaatatagttttcttaaaaactagtaacaaattgcaataaaaatcaaaaatattgaaggaggggaggaaaagggttttaaaagctcacaatagcagctactccatgcatgcagttacttgtctcgtcattttatttaaagctagcaccagaaactcatagttttgtaaattgaaatatacaggaaaatagaaaaccataccaagcaatcttaaagatagcaccataaacttgacaacttgtaattccgtgaactcaatataatgggaaaagattgtatgaaatgaaagctttgagtaatttatatactacttcatccaaacaaagtaacttttgtttgtctcggggaaaatagttactgcattactatttattttgaattacttggttagataaaaaatcataattgtgaccctcagttaatattattttttgaaatacgaaaatagttattatttcctggtggaagaattaaagattcagtacttgcctacccgtttccattaaataattttgaaaaagtataaatgcctagtaataattaatacatctaatttctttttaaattataattttacaaaacaaatatgcaaagatatgttttaagttctaactgaagatgactgcatgttaccatgcagagttcgggtttctatatataccggtggaagttatttaagtttggaaacggtttcaactttcaaaatatatgactggttctacttctcttcttgtaaatagtttttataaaaaaatggaatggatcaacctacttgtacagtatttaatcatgtagttagtctttggcataaccacatactggatggttgtttagggataataaaatgcagaggtaggctttactaggagttagctaaacctatattaacgacttcatttaaagcaaagctctaacgactcttcatcctcacaagttgctaataaatgtaaccatatgttgattttcttaatatatttttttggtcaaaacatattatattgataagctatataaatcaacattattcagcttatcactaatttgagttaacattgtgtttatgtttttggttccgtataaccattagtcgttcttctattcatccaccaacacaaagttttattgaaagtttaactataagtagtgaaagttttgtattaatcttctagactgcagagagtttgcttctaatccttctcttcttgcttcagcagaatcatattttcagtgtgcagatgcttcgtaatggcccaatttggatcttttaaccattggcccattaccgttccatccaacaaaatatacttgaaaaggaagaaatatatagagtgatgagtacattatataaaacattttacgtgaccatgagtatgatctgtgttctttgttctccattacaaacatctaatagtttctgcatcaagtaactaactaaatcataagctccacaacatgaggaatcacttcattgcaaatgatcatagcatctaaagcacttccatcttcaaagatcctccgtaagattctgcatccatgctacctttttcaaacaaaaaaaattggcttatgacttatgagttaatttgatgacaatgtgacaagtacataaagtcataaatcgtagtaaaattcagattttacaaaaacttgtgagataaatcgcagtaaattcaaataatctgtgtctaaatcataagctcctatatctcaatatgtatctcattaactacataatttgattttctttttctttgtttctaatttggtgccgatatattctttaatattgccatagttttctttttcaatttctttataacaaaagtaaataaagtggcctaaagtcttcataagacgaaaccggtatatagaaagaccgtagtccgtaacaacaacataaaatttcataccaagaacaagttacatgcaacaaaaacaacaacaggagatcgaacatcgtctggatagacattgcttgcctagattgattacttagtagggtttgagattattcctagcaacaaacaaacttggggaagaagaaaacaacaacacattttgaaatcacagactcaaccaccagtgaagagcttattgaatttcaattcttcaagagatttcgtgagaaaatccttttgcaataaggattgttacgtagaatcgagtgaggccttatgacttcaacgagtgtggcatgaagtgaaccctatatatgattattccacaaaatcttgatcattctccaatcacaatgttagagttaaaagaaacttataaacttgaataggctttgtaccttggtaacagcaagagcagcttggatgacaaagttagcataagggtcttgaattagaatatcaaaatgaggaacagagatgagttcgcgcacgatctgaggacggctctctggacaatgtgttaagcatctttccaccatatgactactaaatttctgcattgaaagctctacataatgacctttcaactgcgcaagcatcgcggctatcgcagaaaaatccctcagttcaagaacaaattggacagcatagttcctgcatttgatcaagaaaaaagaattgcttagattgagtctctaggtttaattcttgtttcataagatattgagtttacccataaggatcttgagctaggaagagactgtttcttgagatttcggttacaagcttctctctttgtagtccactggaataagcaatgcacttttgtaacacacaacatccatgtctatgtgtagcgatatcgatacagaactttgtagcatcttcaaagatgaactataaagagtgattatagcagtattcatgttttgagcctaagaagagtgaaaaaaaaaaggataagtctctttgtttacctcgttatcttctgtactaaggcactgcaagcaacgttgaatcacatgattcccattcaaatccctaatgagattaagaaatccaggcctcaaagctgatttcaccagagaaatctgcttccttgtcttgattgattccactaatctctgaacaactcgagtactttaaccacacacaaaacaaaacaatcaaaaacaaccctaattagcttgacatcaaattgattacacagagaaatctcttacccataagcgttgagagatattcgaataagctgaccaggttctgaagtgaccatgagtatgatctgtgtcctttgttcttcattacaaacatctaatagtttctgcatcaagtaattaccaaaaggatccatcataagctcaacaacatgaggaatcacttcactgaaaataaccagagcatctaaagcacttccatcttcaaagatccactgtaagaatctgcaaccatgttgatctttagccataaaataaacatatccctggaattcagatactttaggcagactctcattagggttactgctaattccttgatgatcaaacaatgctccaacaccgctttttccatgtaccggaacagagtaattgttcatgttacaactctgcattcccagattccaagaattagaaatttgatgatccttttgatcaactccaaaaccagagtaatatcggaatccaccatctccattagcttcatagttaccaaaactgctcctctgagtttggtgatgagtcttgtcttcttctccaacattcagaagatcgaaactttcgcatagacctaaatcatcaccaccaaaattatacttggtcatcaagccatcgagtggaggagaagcgaactgagacgaaccatcctcagaagaacacaacccgtttgagaaataactcgaaagcgagtaatcagacggagatcggagacagaacctactcgaactgttgtaagatgagtgatcaccggaaaagacataatgattacgataaaacttgggagattggggatgtggttctgtttgaagaggagaagaaggagaacgtgaaagagacgaagcttctccaaattcacctctcatcattatctctgtttctcgtttattctacaaaaatcacacagagactaaggagaaacagaacaaaatatgtattttatttgtcagaatataaggttttttaattgtttttcatggtgtttgatgagagacgagctcactaatggagaaagggagagagcaaagagaatgaagggagtgttaaggtttgttttgttaacagaagttcttataaaatttctgtgtgtttttttttcttttcttttctttagtaagtgattaagataaatgtttttgtaactttttattaagtcaactgaattgaatagactatgcgattaaatgggctagattttctcattcttactatttttggcatatatctctgaatcagattacccaaattatttaaagttataagtggacgttttcaatcaaataaaaaaagaaatttgaatattttaatattcgtattttattttaagaacaaaagcatatctttgtaaagttgttaatcttttttgtccacatattagtgaaataatcactctaaataaaataaaaagaaataaatttaccaattaaaccttcttcacttgaagattttaaagtatttatatatatatagaacctgtgaattttaagttttaatcaaaaaaattcgctttttaacatcagctattcaaactattttaaataaaatatcttgtagaaaataaaaatattgtttttgttagattttaaaatgacaacaacttttacttcaaaagtatttcgactagaaaaaaaagattgctacgtacacggacaatgcatgattacacatgacaagtatattattatatcatcagttacatgaagtagatatattgcatggccacatatctgaattataacacgtcatgtagttaacacaataaacatacaattccagtacactgataaatttactccggcgaccatatattgtctgatactttgtgtagctagcaatatttttttctttcgactataccaaaaggtgagaaattggtaaaaccataaacgcttacaacaaacaaaatctcaaatattgatactgcactttcttttggtcaaatattgttgttgctattttccaggtgtataattgatagaattttttggttagatccaacaatatagtaatatagttatatatttagtatttagtaattaaataatattaactaaatatttataaaatatagctatatatatatatatattcgcaagaatcgctggtcaaaactgaaattcatcgcttgtagtttattacgatggttaagtataatttatcttttgtaatttgtatgttatctttgttaagcttatacaaacgaacaaaaacaaaacaaaaaaaaaaaaaaaaaaaatgtaaaaacgtcaaaggaatttgatttcgtgtaacaaattatatgttcatacaatcatacatatcatctttattttcggaaacttcgcggaaattattgaacattccttattatgatcatcgatcctattagacagaccgtagtatagctgattataggctctagaagtggtcctccttaagtcaacaagtttctaattccggttagtataatctgagtcaagccataagcatgactaggaatatcattaatttggtttctaaattaggaaagaccacgaaaacgatagcttctgacacaagctactcactttttagccaggtagttgcttattatgactttccttagttacttcctcgcaatttcctctcttcgcgtcaccatccaaagcatcatcagttgattctgtgtcaacgtcaagcactaaagcttatacttgcgtcgattagtagtcttgttcttaagtaatcagattttgtatttgggtcaatatatactcgggcttgaagcatatcatgtgcatgtcttttccacttactgtttgtataattggcccattaagcaatcgtatttgtttgttacacgaaaaccaatcagtctcaaattttcacaatagtattattataagaaagatacttaaaattcacaagttttaattttacaaaaggattaacaaagatcacttcttccagcttcgactacgaaacagaggatcttgaataccaccgacaacccaagtttcctttgcgatatcattagagagtttgtaatagtttgtgtcgtaattcatcactaccaaattcatcttcttctcttcctccattaatgatctcagatccttcttatttcccactctgtccttctcttcttcttcttcttctccgctctgttttactctgttatcaccttcctctgtttcttctttcttctcctctgaccaattcttaaccggtgcagatctacaccgcatcagcaacaacgcgttcggcggcgggaccgcagtttctacatccgaaaaaacgttttcctttccgtcgacacactcttcattgttttgcttttcgtgtaaaaccataagccatttagagaaaactgtccctgaactttcatcttcatcttcttcttcatcctcctcttcctcttcctcgtcttcttcttcatcatcagagattatatcaaccggaggaaacgcaccaaaacatcgaaaatcgaagtcgcggaggcaagtcaaaaatcccatgacatctctcttaatcccaaagaacttactctccgacttgcttctatgtatcttctctatctccgccatcaaagactgccaattcttgcctccaccatcgcgtttacttgaccgcactttgatctgaccagcacacgtgactttcggcgacgtaggttcttcaactacctcccttccgccaccgcgattctgacgtactccaccgccgctgctagagagcttactgatgctacgacggtggtgaggagcattttgacggcggttaaaggaagaagaagggctagaaatggatttagaaggtaaagacaaatgtgctcttgatgggaaacaaaccatcaaatctgctgagtaaccagaagactttcctcctcctcctttgatcatcttttttagttgttatccaattcgattctctcttcttcttcttcttttgtgttgtatataggatcgatcttgaagagagtggtttagctttttctcttttggtttaaaaatttgctttcctcttccactttttcttgagaatttgtttatttttaagcctttagcattcttgtgctttgacagcttcgcaagctttatcttttgcgggaaaataatactttctttgccatctcaaatcttatttttgccatttctttatttaatcaaaaactactgagcacaaactgataagtattttattgtttttgttggtagcatcgaccatgtgtaatatgattattgaatgacaagtgacaacttcacatgcttttattaactatagatttttgttatatagttaacgatcagtaagtttgatgtcagaacgaaaagaatattgttaagttcacgaatcgttgctatagatttgttttgtgatttcttctttgcattttacatatattaatttttttaacgattttgatattaagcagaaagcagtataaatgatgttttaaaattaataaactttggaaccatatgaaatttatccaagacacataagtttaacaaaaagttaactaagcagtgtatgaaattattatttaacctatagcatagccaaacaaacaaacaaaaatgacctaaacttatttactttaacatgcaaagaaaataaaattattgatcgaatatcgcatatattatagtgccaatataaatgttttgcctaacacttctaattttttaatgattcagatttagtcatcattcgtacctatggctatagtcgagctaaattccgcacttataagagatattctgttaaattattcgtttcaaataacaaaatcttattggtaatcatgtaacatgaatggaccagatcgtcgatctaacaaaccccatgtttatatagtttggcagcttttgaaatttataataacgtgattgaattagtgtcagtgactaattaacaacgttcttttagtcaatatgattccactcagtggctacaataatgattacccgaattgattaggtgattctaatgataacagaatcaattatttatcgattgatcatctcttaaaagagaaggaatccaagactaagaccattgttataaatttatgtcactgctcataagtgttttttaatagaaggtaatgatgttttagcggctgaaaagaacaatagttacatatgtatgttttgttttaatggtctaaacaagaattaggtttggtaaccgaccgattagcataaaaatcccacataagttttaccaatcattacggaaacatgatttttgtttaatcattcgtcatttcttttatcctggactatatgatcataatttgtaagagcttatacacctttatagctattagtgcatttgtttttaatcttctaatgtcaagttatggtccgagttatatctagtaatgaagaattataacacaatgtgtgtaaaatgtctgatacaaaagaaactccataaattagatttgtgaaaacttaatctacaatgatgagaaaacaattagatttgtgaaatctctaacgaacaaatgactatgtcaaatggcatatttaaaatccgtttacttttcacatcgtttaataaatttagtatcaaaataagtcaacaaaagatgaaataacattaaaatcaatcaaagagatatttttgtacaaaaatctatttttggtgaatataattttaattccctaagaggattgctgctatgtaaatgtagatgaatccaaatggtactgaagtttgtgttttgaagtgtctaaacttccaatcattcccaagaagaactaaaacacccctagcattgtgtgtgcaaccaaatttccatttcataaatctataattctatttatctcatcatcagctatatccttatctactaatacacctagaacatctattgtatcgttaagatgaaaaaaataaaataactcgttgaaagtttagaaaaaaatatatctacgctaatgaattgcagttttcaatctcttgaatgaatttgccttttataacaaataaataagtaaagaggtcattgaaaacgattttttctttttaataaactcatgagaaaaaagctaacgtggtcgattggtgaacaaggattgtagttgacgacgtttttgttactttcttagaaattttctgacgtatttcggcatcattcatatttcatgccatattattgtttgttttttttgtcacaaggatccaaatccatatgctcccatagatttaccaaatttgtagtgaatagccaactttgtacagtgtaatagtataaaaatacacacgttaaaaaaaaagatcatttttacaaatgaaaaaatacaaaaaagcccacaaggcccattacgagacccaacaaaaacttaaaacgaattcatctctaaagcgttcttcttgcactttaacaaagcgacgaccgcttcaccgtacatacaatctccgacgaaagcctccgtcgccaactcagcatcatctccaacttcaaaatccgctccgctcggtcgaacaatcacaagcgtagcagattctaaacagataccactcttaagtttaagagacggcgcgtgtctcatactcatcctcacgctcgggacaacactcctcttattttttaccacgcgctcctcgtcttccacacgcgcctccgtatttcttaactctttaagcccttcctcgttcatcaccaccgtcccttctctttctttgtcacgcataactaaactttctatctcctcatgctccttcacgacttctctcatcaagtaatgacgagacgaagcagccatcaacgcgcttatagtccacaccacgcgcgtcttcagtccagtcacgaactcggcgtctgactcaccttctacggcgacgggagaagacacggtaccggcggaacggaacgcgacgatgacgcagcttttgagtgttttcccaaactcagctttccacttaacggctgcacctttctcgagctttacatcgccgccgggaagctctacgtccagatttcgaatccggtcgaaccgggagagaatcttgaaggggagactcggagagagggtggttattgtgattggtttagccggtttggataaaagagaaactagaccgttgaataaagatcggaaaatgcttgtgacgacgggtgaatcggatactgagtggtcgagtcggagggtgagtgactcagactgagggacaagcgagttaaatctttttgaaagagagctgcatcgaagtaaggttttgacgtcaccgactttgttcaagatgtcgacgatgatcgggtcaggaagtccatcaaaaacgtccatcttacaaaaccttttgcaaacaaaaaaaagagagagtctctttgtttctctgtgttttcttctgtttcactttcttgctatgattgtattatgcttggagtttggagagtgtaacaaaggagtttaaatagaggcgtttttggaaaaggaagaataagccaaaaaccaataacaaaagtaaattcattttccggcatgtaggaccattgccgtcttttaatactattgtaattggtaaaaccaatttgctcgtttgatgttttcaaatggagagatcgaacggtattcaagcggttttgatcgagggtccacggtgatttgacattgtttaccattatctcgatccattaccggaaatatccaagaaagtatcataaaatagaatcttatatagtggatttatatcttttcatgtcaatttactatcataaaatttattactgaaagtattaagtatagtagttactgcaaaaatcgacaaacggaaatttgattacaaaaatcacgacgaaaagttaattttggtttttgattacattacggtagaaattttataaattaatattcgataaattaataacacgataaattaataaattatattggtataaatcgagctaatataaaattaatcaaaatcgataaaataataaaataataattttaaaatgattaaacttgctaaatacggctggctatatgaaaagatttcaataagtaatatattcgctagtctactatcatttctaattaataatttacaataactgatttttagaaaactagctattacaagctattcaattggtttaattttctgttaattaattggtcgtcatataatttttcagataacatgtcatttaaataattagtgatatttatttttatcaataaggtataattaaatttatagaaatcccatctatcaaaatataccataatatacatcaactagattccattgttaccattaatgaatcaaaatacctcataatcaatgtacgatgaatgtaaaatttgaactttttggcattcggaagggtcacattatataatactatatatacaacataatttaaatagtatcaatgaggacattcccttttctttaatgaggaatattaccagcaataaaaaaattgtaatgctccgtctatacacattttaaaagttttgaattgaaaatagtatattccttgtcatataattttaaattaatgatcacttgtaataaaaaaatgtccaacaatgtttataacgtcacttgtaagttttaatgttaaaaccactaactaaatgatggtggtatttgcccaaaaaaaaaaaaacgatgatggtctagtgattttctttcgtggtcctctggtcgatgaatcctatttgtggtttgtgaacttgtccactttgcttttgtataccgtttaaaaagcaacaaatattatgcattcttcaaatttgttcacaaatatgagtttgttccaagacagaattagaaacgaatgatcccaaatggtatataaaatcaaagattctttcaactggatataatatcgcagacggaatattaaatcgaagtggttcgttgaattcttgttatctgattggtttaaacgatagaatatgctttagtaggaaaaataatacattctgtcgacatcattttaatttttgattccctgagctattcaggaaataaaaataatttataggtcttgaaatttaaattattagttttaatactcaatatataataccaactcgaacatttttaattgcaatatgtgtaatttataggaagtggataggaattatactaatttagttccggtacaactcacgcttgaaaacgactaaactatagattaagacgattttaatcattagcttattgagtataaatttttatagttttaatgattcatattttgttggaaacgcacggccggatactagttttatatagtgtttaccagaaaacgtcaacattaattgaactcgaacaataaaatatagctctgtgagttattaccttcataattattaaaattacaaagaacaaaatttaaaaaacagatgagcccaagaaatatatatataaacaaatttgtatgtgaccatatatatctactttcatatatagtttttgttcaactgtgaatcgcaaatatgttacaaaagtattattctaaaatcattttttctagaactagaagagactagacatgctgattagtaatcaaaataatgtccaaacagttgggctatcatggccaatgagacataaaatttgattacgatgataataagcagacaggtggagttttatttcaggcaaaaatgatacgtccgttttttttttttttgcattgatagaaattgtgtaagcattacatgtattgtttactatatttcctttctgttatgtaagtataaaaatatacgtaattgtattgctagatggatcaaaacgtacaattgttaccttgtaagacttacttatcataactaacatgcatagagtatatactcatgcttaatttatgttagcaagcctaaaaagaatagttaggctctactttcttttattttcttctatttccatctcattaacttttgtttattaactttgaatcttgttaacctataaattcaacgaaacatgcttcttaattcatataaaaaaaaatcattagaatatcttacaagaccattttaacgaaaaattaatcttttcagtattattcattgaaacaataaatttaaaatctaaaaattaaggtctccatttttattttgctaagagtcccatatatttcaggacgggttataagaattaagaacacgaaactcaatatctcttatgaaccagttcttcttcttattctccaagtgtttgtttcttccactttaccaaacgctccagaaattctttaacctgcatcacacattataacattgcagttagtataattagctagtgactatgaagtataaatattatattccattaatacattgtttcatgaaagatcaattatacctgagatgggtcttgaagagagtaagaggcgtacgtttccttaatagtttttgagacgataatcccaaaaccttgtcccctttcacataaaacctataaatatgtttatgacatcaaaattatatccttcatatgacatcgaaaaaaaatcgcactcttaattcggcacggtgttgttttggtttcaacgtaccttaaatgcatcttcatcagtacggtcatctccaatgtaaaccggtaaaacatctttagattctgctatccctattttagttaaaccaaacatattttcagattaaaggatctaaaataacattatcaaaagtatgaattacgaaagtccaaacttcagaaaagacaaaaaaatcacacctaatgagtttagcaaaaattcgagagcctttcccttgtcccatttgatggaaggtcggagttctaagacctggtttaatgaatgaataattacggttaaatacataaagactgacacaagacagaaaggtatcatcatttaaccttctggcttatacattacaaatttacaataatcaactaaacgccatgtattaataaacagctttcgtgaatagtcaaatgttacctttctgccttgtgtcagtctcaatttcggataatcaatgagaaccaatctcacttgctcagctaatgcagcccatccctgtcgaacacgaacgtgtttaaatcattccgtacggtcaaattgataatattcttgaaaaccactttaacgaaaacagaaaacccttgttcttaaaagtgcgattttgttttaaaaaaacagttaatcataaaaaaatataacgttggttaaccattaatgtataccgtttcatcgacccgacgaaaatgtactgttagacaaaacttgttgtgctcgaccgtagctccagggatagattttgtcttttccttcaaaacattaaccacctaaaatcgtataatcaacaaatcagtttcttgtttttgtttcgtcacaatatcacgtcactaaagaaaaaaagaatttaaagatgacgaaactacaaaatgaacctcgtcaatcatcggtaaatagtcacttgcaggttgaaacatcacttcttcttggttactctgggatgatttcattaatcagaacaaattttctctctcaatttttccaaaagaatactaatagaaagacacaaaaataacctgatcggtatttgtcggacccttaatgtccatgccgtggctcccagcgtagtgaataccagtgagtttcacaaaactctgtacctgaaaaaacaaaatcatatcatatatgttatacaacttatgatataagtcatgcaggcagcaaaatcaaatagtgtcgaatatataagttgatggaatttactttgtcagtgcttcgtccgctgatgatcgctgtcttgaaatatgtagccacttcctttacaacttctcgcatctgtaagatatattttagctcaagaactaaactcaaactatatttaaactcacaattacaaaaaaaaaaaagatggaacatgaagcaagctgatatatactttaacaaaaagacatgaaacaagatcaagaaaaatacctcgtcggttatgtaggctctgtcgtgatcttcagtgattagcgagagagttccgtcgtaatcaagaaacataataatttgtttgccttcagcatcacgcatgatttgttcgaacatatccaatgctgacggatgaagagcctaaatccaaaaacaaattttactgaattttatatttgaagcagctcaatatgtaagtcaattaatagattactcctaatattttggttcatttttataactggaccgagaatcagaaaaattagaaaattaaaactaagaaaaaaataccagtaaggaaattcagaaatgagcatcagacaagaacatcagatttgaaagattaaaacgtaaattcttttaaaatttatccaaacaacaaagcttcataaaacaaaatgacgtacaatccaggagcttctctcgtcatcgttctcggatacatgttcatcagagaaggaagatctgacacgggtcggggacatatcccttaaggaatcaaccaaagtctcgatctttccggaaatatccgtaatcttcatgtcagtgatctgagagaggtaagagtaacacagaagctataatctattttctcagttattgttgcacaaactactctttgggctcaaatatacggttttggtagcagaatataattcaaagccaatttatagacgatggcatgcgcatagagatgattccataagtatattggtcatataatgttaaaaatatagaaaataaattcataatttggacttattgatacctaaaacatattttagtaaatgagtaaattgaaacctctcatttctttgactatatatatagagtttaccaatgcacatggagtttccaattgtgttactgttaaaatgttcatgcatgaggaaattgacccatttaagatgatattctcctcttttttggtatcaatacttttgacttttatttatatagacacatatttattagattatgtatcacaagattttttctttctggattctgcaaatgagtttgactaacatttcataattaaattcatctttcaagaaaaaaacaaatcatacttattttttctctttacaaataataaataaattatgggaatataaaaaaaaatattgatatgggccttattgatactcagagcccaagcccaatttggataaacaaaaattaaaataaagcgctaaatatgcaaatgattaaaacgacaaatacgaatacactatacgacgtcgttcgtaagtgtagcgtcggcgttgtccgtgattcttctctttagcttatttttggggaagacaattccgagaaaatagagagtagagagatcctaaagagtcaaaagaggtcaggtgattgattaacccgttgaataatctccttctcccgttgaatcgggtcgaaatagttgaactttaagccaaaccctagcttgaggaggaagaggaatggtcggcgtgatgaacagattgaggaatctggacgcttaccctaaaatcaatgaagatttctacaggcgtactctttctggtggtgttatcaccctcgcctcttctattgtcatgctaattctcttcttctccgagcttcgtaagttcatttgatctcccctgttttggttttggatccaatttgattctaggaagcttaaaggttgatactttgtagaattagagctccaaagttttgatttttctttgtgggttttgattttgattgtgtttttgttttgttttatttgtgggtttgtttggtttagagctgtacattcacccggttactgagactcagcttcgtgttgatacatcaagaggagagaagctacggattaatgtaaaactttgttcttttgcttactagtttttgtttaagggagtgcttttaataacttgtcatatacgatttgtagtttgatgttacattccctgcgcttcaatgttcgattattagtcttgattccatggatatcagtggggagaggcaccttgatgtggtatgtcctggtgaattgttttgttccattacgtttgtttttttcttttcaaattgagattatgtgtgtgtttactttgtctgattttggattctgttcgtttgtatggtgcagcgacatgacattattaaaaggagattagactcttctggcaatgtcatcgaggcaaaacaagacggaattggtcatactaaggttggtttttctatggttttgaaatttttcattttcatgtgtcatctctgatctcattgcaagaagttttaagagattgaaagtgttgaagttctgtcttgtttgcttcgttatgtctctaattacctaatgttattgtttatccatagattgaaaaacctttacaaaaacatggtggaaggttggaacacaatgaaacatactgtggttcctgttttggagcagaagcggtaagcttccctaaattattctaagaatatgctctgacaagcgatattggactttaagttgcagtagagaatattcaactgagttctttagtgttgattcagttaatttacattttagtttcttctatggtggtgaaatgttttttatccttgttacatgttgtggttgtcattgcttacatgttacagtcagatgatgcttgttgtaattcatgtgaggaagttcgcgaagcttaccgaaagaaaggttgggccctctcggaccctgaatcaatcgaccaggtatactgacgttccttcactaacaacaaaattgggttgatcttggtacttagtttgaaacaaatagtgacaccttgtttggcactaaaatggatatatctaaagaaaccatgggtatctggtctttcgtttcagctatccccacatctagttgtatgatattcttactcatcatttcatttcagtgtaaaagagaaggctttgtgcaaaaggtaaaagatgaagaaggtgaaggttgtaatgttcacggtttcttggaagttaacaaagttgctgggaactttcatttcattcctgggcaaagctttcatcaatccggttttcaatttcatgatatgttattgttccagcaaggcaactacaatgtaagaaaagttttatttttgtttcattctctctttataagctcatatttcaaatgggtcttgactctattatatcattacacagattagccacaaggtcaacaggttggcctttggagactttttccccggtgtagtgaaccctcttgatgggtaaaaactcaattatatagccattactcgcacctgttatcgctttttcaataatcctatcttctgaaacattctcttggttctctcagtgtgcagtggaatcaggggaaacagagtggcgtctatcaatacttcatcaaggtttgcttcatttgtacattatatctatagacaatgctctcacctgggacaatagtttaggtacaaaattttgagattcctaaaaggctcattattagctcaggttactgatagagaagtacaaagacattaatacattatgcttgttgaccaatgcaataagaatttctttatcggtagcttttgcatgctagaaagattgttgagcgtagggataaagaatggattgtggtgttgaatttcaggtggtaccaagcatatacaccgatgttcaccagaatacaatacagtcaaaccaggtaaatcccacatccccaaatctctatataaaaatctttgtcattttcttcttgtaaaatctaacctatgagtttttgtttttaacagttctctgtgacagaacatttccagaacatggaagcaggtcgcatgcaatctccgcctggtgttttcttctactatgatctatcgccaattaaggtctgttcgttttttctttttctttttccaagtcgtgttcttaataccaacggagactatatctctagaaacattttaacttttgattgttggctaggtgatatttgaggagcaacatgtggagttcttgcacttcctaacaaatgtttgcgctatagtaggaggtaatcaatatatatatcccttctccattcaatttaaacataccctactgatatgtttatcatcaaattcaaaactaaaattatacctttgatttgcaggtatcttcacggtatcgggaatagtagattcgttcatataccatggacaacgagcaattaagaagaaaatggagattggtaaattcaactgagttgtttgatattctccacactttcttgatcagctactggagaatcatctctacgggttttacagttagacattaggtttgaatttgtgacaatgcgatgatttaaagaattttgtagtactgtaagatattccaggatctgaactttgcctttcactattcactatctcttcataggcaacatacaaagtgtaaaatgttgttatcaccgattgaaacgaatgttaatttttcctatttaatttgagctcatttgtttaaagtgtagtctaaatctgaagataccgatcttgctttatgttattaaactaaagccttgtttttttaagtgtctacgtttgttgataatcagagaaagtggtttcttagattagcttaaagccatggattgaaatacactaaagttgattcaggatgcttcctcatttacagtctaagcaacacttccagaatttagttattacgagaagtgagttacatgttttgtagatttagaaggagtttttgcagtttcataccaatcaagtttttatagttaaggaatttagtttcttctactttgatcgttgttcttttgtgccaatttaacttgaactaagaaaatcaaggaactacaaaaattacataagaaatctcacacggtcgaagcatgccaaaaaaaaacagcttggaccgacgcagagattaacactaattaacatcaaagtagataaacttatttgatattaacataacaaacccccttaataataataaaatctctgcaatgaccaaaaactccatcgcagagagctctaaagtccctaaaatacccctatggcaacatctaatttacaagactcgaacactgaagaatcgaatcccaatcgatctcgtacgacggatacttctccaacgcgttctcgttccacggcggctgaatctcctcctccgtatcaccaaacgtcagctccgacaacggcgaagaagatccaccagatccataactctccgttaacagcggcgaagatccggcgctagagtagtcctcctccggtagtttcactgcgacggttgatgaacgtttccgagaagaagacttcttcgttgatctcacctgtttctgcgtcgtctcagctaagttttgacaaatagcttcaagcttagcgtcgactgatgattgaagaggttgatactcgtcgttatgacggagatcagggaaattaagccgcgcaaaatctcctcggagcttatacgccgccttgtcataagctaaagcagcttcctccgccgtgtcgaatgttccgagccaaagtcgagttcgattcctcggtaaacgaatctcagccacccattttccccagtgacgttgtctcactcctctgtatagcttcgtcggtttagccgcggaagtaccggtttgtttcattgagaccggtttaggactaagatggtgagaaaatgagtggagatccgacccgtatgaaattggagcgggtagagagaacgcaaacgcggatgaatcgttggaagggcttttgataaaaggtaaaagcgcttccattaattcaccaccgaatggatcagattgttgaaacgttttgttactgtaaaaatccatagaagttgtcatttctaataaaaagaaatttttttcccttgttcttgtaaaaaaagtaaagaacaggattttttgttttcaagaaaatcgaaaaagaggtttataaaataaaaaacctctgtgtagatttctgagaggagggaattaaaaaaataccctcacaaacgattaattctacaaagaaaaaaaaacacaagaagatcaaaaataaaaaaagattgatctctttaagaaaatacaaaccaagaaatcagttttcttctatacgaaagacagattactaacagaaatgaatcaaagtagcgggaaataaacagatctaagggggatggatttgtaaagaataaaagttaaggagaaaaccagaaagtatatcaacttttttttttggttacactcaagtttttttttttttttgtaagtgaataactctcagcctcaccgatacacttatctcattagcttggctcttgtttatataggaggcgtggcgtgacttcttttttccatcctcctcatatttctcaaatttatatgtttaattaattttttcttttgttattttatgtactatttcagataagatcatccatgtttacgtactccaaataatatatattcaatttcaatcaaacattgtttgtaagttgagttttaacaagttttgttttagaatggttaatttttacaagttaaaatgtttctacaagtttattctataatcgaagcgttttaattttacaatcatagtttgatggagaatcatttcattatattacattcacaccggctttatgggacgtttcttccataaccatattaatcttttttctattcaaatagaagtgagtggacgtacacaactccataaattttaaaagattagttaaaaaaatggttgtctactcatttagctagacgtctttctaagcggttgaaactaatgtacacgagcacttcgattccagccaaattgataaaattgaaatcaacatatttttacgatttatttggtagaggcgtccaacaattggtccactagtccagctagtagatttagaattcttttgtatatatgcgaaaacaaaacttctgaaaattttcaataaaatggaactgagagaatattaagaatgagattatccaaattaatagtatatattgaagtatatcaaaccgaaaaagtataaaaataattattcggaggttccgaatgtgacacacgtagacttcatgattgttaagcaataattttggctcgcaatgtaatgatgatatcatgttaatgagtggtttagacttttatttagataataaatcatacaagattaaaaaagaagggtctagagggttagaatgaatggctgagaactcctcaaatgtcaattccgtattatatcatccatttaattagtttattaaacatttcatcatcttacgatatcttatagagttgcatcacttaatttattgcttcgtgtaatcgtgtacaaatgtcactacaatcaatacggcgtcaatttgcaaggttagactatggtgtcatcattttataatgatcaatattttgagggaagacgcgcataaggaggtaccacccatgtggatggctcgtgtccgtgttaccagttcatctttacgatgctgatttatctcgtttacatgtattatcatatgcatgtatatttcgtacttgcttgctttggtgaacattgcatatgtgtaataacttgtctaagcgttatttttcttatactttgttatgtatttttgataaaagtcaactttcagtattgatatctacatttaatgcaaaaactgaataagaaaaagaccaattagctagaccataaattaaccactcatatagctacaaacctataaaactatggttaaacaaattgtaaagaaagaaaaaaaactctacgcatgagaaaagggaaaagcaagaaaaactccaacgcatgatttcataaccgtaagccgagcgtgtccacaggggaaatgaaatagtcaactacaaaatcattactcaagtcttagctgtatgtaataactgacagctttttgctgcctatttttctccttttgaatttttctttttattcaaaatcatatatatatgaaaattggcctacactctccatataaatgatacatcatcacacaaaaaaatgacatgtgtcattctatattaattaaataaaaaaactagcaaaactaattgagaaaaaattaaaagtcttttgttgtgttaatctcactcttaaatgaattttctaaaaaacattcgataaataaaaagtcataataatgtaccaagcactactttcattttattctacttattttattaaaaacatttaatcaataatcattaatctataatggctaaaaatttacttgtgttgtagtttagatgtttgctacctaacctcatattaatttagtaattttagttaaatattttattattattatattttgtgaatttgatttatcatatgaacttctttcggtacattttgtgtgttaagataattttgtaacattgatatataattttttcacgtaatagtcatcctagacattagacataccaaaaaaacaacaacatgtgactttatatgattatatggtagggataagaattaaaatgttgacttaaattactagcatatcaggatgtgattgtgtactagataacgagataatatatggaataaagaattgtttgttacaattaagttagacaagttttaaaatacataagtaatataactacttatatcagtatatcatttactgttatagtatgtgatcatgatagtgaaatattagaataataaatatataaatattcatattgtagttgaattgatattttgagttatagatgaatctaatcataaaaaataataattatattaaatggatgaatttatcaaaatgaacatcttttttttttgtcaaacaatcaaaatgaacatcaaaatcaacaaaaaaccataatcatatttttccgacaattttaaaaacaaaaatcgatgcgtagcatgggtgttcatctagtttatttaaacaataatactttattagtgtactctcaagttctctgacattttttttttattgggggcaaatgaaatgactgacatttttgcattgttgttccttaacttgtctataaaagtagttgtttgatagctagattcactgcatctaaatcaagtaatataatagtacatacatgtcatttttaggatttttgagaaatatttgtaaatcgtaaagaaaaaaggtagatccgatttgtgactaatttggtcgaaaagaaaagaaaagaaaagaaggtggatctgattggatttttgcttttggtatgaacttttgcaatttaatgctcataacgcggtttccgtcaaacgcgtccgttttatctgtcgaagtcaaacaaccgttgcgaatctgccacgtgttcaccctcaaaggtccattttgtactgtttatctgactagctcaccttaaaaggcttattaaactccacgtgtctttttgacctcttgactttgaatgatcttactagtttacaattgtattttctcacctaatttaattaacactaatacgtaaaatgagaaatatactcacctaattttaatttatattaatgcataagatgagaaatatagtagtagtagaacaagttggtaaaatacaaatgcatgtgaaaatgcgtgtattgggtgaagtgaaagtagagaaaaatagatttgctaatttatttttcctttggtgatatcgaaaggagggtgtcgttgtttttcgatcagttgcacgttgttctacgagggaaagaggaattgcatgtggattttaggtgaattgtctccgttaatttttgcatgacatatggccattgcagactatttattatacaaagcttatgtgattatgtcgtatgtttttgtacaagatggtaagaaaaaaagcttctcaaggatgtattttgttctcattaatggactttttacgttgtattacaaaaaaaacaccaataaacagaaacgataaatcatactccatagtataggactccttccgtaaacgtgcttaaaatatacaaattgttattttcgtattattaaatatattttctaaattcgaaaatttgagaaaaaaatatatagttgtgtatccatctaaatacatgtcatttgctaatgcatttccttgatatgttgagcttttggcataaaaagacttttgccattgttgctaaacacttgttgctttcctttacttttgtgcaatcacgtaagtcctgaccatctacctatatttttaaccgattaaatttaggttaatcttatcatttatccttaaaatatagagtaaatttggaaaaataccctctttttgtttacactttgaaaaatactttttccttcatttttacttttaaatatgtaaaatcaaacttaataacgactaataatatctctatttcaaatatcaaatcaatttatttgtaataattaaatatttcatttttacaaaatcttaatataactaataattccaaaagattattatcttaaatactattttaaaacaataatgaataacaacattctaccaatgttaagttatgatttttataaagtcatgtgttattgttgtggtgcagattttgatgattcattattattgaaaacttataatatagtttacttttcaaaatcattcaacgaaaattattgaatagaagaaaagtttggtgatatgttgagctgaaaaatatgcttggaatgttggagattattttattttatatgatataacaaatattaagtgatagactttataatatttttagatattatcttattgattttttatattaaaaataacaaatcagctttgtgttaatatatatgtatatataatattatttcaaatttagttaaatttttttctctaaattcgagtttagttttgatttactaaaatatagctttaaacttaaattacacaaattgtcatttaacatataaaagattgtagttttcattaaaattagaataaaggtatttttcaaagcataactcaaaaacagggtacttttcaaaatgaccctaaaatataactataacaaataaaaagaaaattatgtgagaaaaaaaaactgaatagaaatttgaaattaatcgaacaatatcactcttctgtactaggatcaaagttttatcatggatctccattataatggcgaatattgtggatcaccctccgaaaaaaaaccatccctaaaagctcaactaaaaagaacttccaaaaaaaaaaaaacagcaaaagaagatatgaaatagatcaaaactaaaaccaaacaaaagaaatagatcaaatcatattaatgggctacaagtacaagactaggcccatgagacctgttaatttgtttgaaatcacatgtgatttaattaataactataaatataaattcaatttcaataatatttcaatgatcaaatattacaatatgaaaatgattaataatcaactattgtcttataaattaaaaaatagtttaaaactctcaattaattcaaagttcttaaataacaaaatgcttatcttagcaacaaaaaaaaaaaaagcttatctaacctaataaatttttcctttttgggtataaaatgcagttggcatgacgtacgagaaacatggttggtaatgtcagagcggttagaccgtcacattcacatttaatcatataaccaaatatcaaatcaagaagtcaaaaccgggtttaattcccggtctatttcactaagtcgacgttagatcaagaaatactttgaaaaggtgttctcaatcgcgcgtcacgtgtctctcagctctcatcacattgtccgttagccgcctgaaaaatcaatctactacttttcttacagcgagactttcattgatttttttcagaccgacgcttaagactcgttggtctcaatttatgctcttcaataccctagattttaggttttgactcattcgatccgatcgcatcgctcgctgatcactctaattattttttttcttttccaggtgagtatgttctttaacttttgatttattgattctagttatctaagagtaagatcaaggtcagatgtgaattagttcgtcttgcgtaaatcttgattcttttcaaaaaatgtattgtttttgtgttttctgtctttaagaaatggttatttgatcatatcatgtacttcgttttaagtaatcaaagcgagcatttgtatctagttaacatcgttattagcttaataacttcttaaccacggctaaaatctacctctgttaatgcctttattcttgtaatcatccctgtttctggccaaagaattaacaatcaaattacagtgtataaatctctgtattttgactatttatttttctctaatcaattagtttggttgcaactttgctcttgaatttcagcaagatatgaattctgattctaataaatcatcttcaaatggatttgagaaatctttgacaccagaggagtatctaaacaaggtatatgatgatgatgataaggggaaccattagcagctctgtgatatttcatgcgtgtatcaattttttttttgtcttcttttgatataaagattgtgtgttttgacaacatagataaatgaagtgaggacattactagggccattgactgagaagtcatctgagttttgttcagatgccgccattactcggtatttggctgcgcgtaacggccatgtcaagaaagcaactaaaatgcttaaagaaacactaaaatggagggctcaatacaaacctgaggagattcgatgggtatgtatttacatattcgtggacaataaatatcccatcagtttataatatggttcttatttgtcatgttatgtgaaatggttattataggaggagatagcacgagaagctgagaccggaaaaatataccgagctaattgtaccgataagtatggaagaacagttcttgttatgagaccaagttgccaggtttggcttcttctccattttccttccaaagctctgttgctatatacatgtcgattaatatcttttttgggtttactacagaatacaaaatcatataaagggcagattagaatcttggtgtactgtatggaaaatgcaatcttgaacctaccagataaccaagagcaaatggtttggctaatcgattttcacggtttcaacatgtctcatatctccttgaaagtgtctcgagaaaccgctcatgtgttacaagaacattaccctgaacgcttaggcttggccattgtatacaacccgcctaagatttttgagtcgttttataaggtacatttcaaaatctctctatatgcaagtccttatgcatcatgaagctttttgacataagaggaaattgtttaatatgcagatggtgaaaccatttttagagccaaagaccagcaacaaggtgaaatttgtctactcagatgataacctcagcaacaagcttctggaggatcttttcgatatggagcaactcgaggttgcatttggtggaaaaaacagcgatgcgggtttcaattttgagaaatatgctgagagaatgagagaggatgatttgaagttctatggaaacaccacagtgtcatcaacctcagctcatttgactaactcagattctgaagtttcagactctgagatgaagtatttggaggacaaagaagatgagactatagagaatggaactttgcaatctcctttagatacaacaaaaacctaaacatgaaatcctaaagttgtagaagcttctggagctaatactatgctggagctataatttttgttgttgttgttacacaattaagaccagtaaaagtgcagattcttaaatgtttcacagaataatacttgtttgcttaaagagtttggtaacaacaacaaacacaacatcaacaagtgtttggctagaaagacggaaacggtcacattttgaacattatccttcaggtaacagtggtggttatgacacatatgaatgaagaagaaccagaaaaaaagaacaaaatcagaagttatgtattctttgtaaacgcctctaaggtcctaagcttgtgggaagagagttgagtagatgaagaaccaaattttctagtttacttcaggcacagagtacttcactatcgtcctctagcttctgtctgtattgagccaatctctgcaaccacaaagaaacactcagaatcattgaaatttgaaacagagaaatctaaaaagatgaagaagagagaaatgatgcataaccttggtataagcataaacaccagcttctgttggaccaaccgggcttccccgcttcatgaatttgccttctttgaatatgtagagaagaggtatacctgtcgatagctctagacttatcacctaagaaccaaaaccatcaagacaatttcagttattcatcagaaaaattgcataaccagtaatcaagaatggatatgtaactagtctttttatcatacctcctggcaagtcaatttgtcaagatacataatgatagaccgcagcgagttcccgtgagcagctatcattacgttctttccagctgcaagcttcggttcgatctgcaatttgacatccaacattactagacaaactaaggagaaaagttagcaagggacttaataaagaatcctcattacattgtcctgaaaataagctactgctctctcagcacacatctccaaactctctcctttgggaggaggaatatcataactcctacgccattcgtgaacttgctctttcccatatctctcggctgtttcttgcttgttaagaccttgtaattctccatacctacatccaaaaacgttttaaagcagataaagcttattatcagttcaaagctcaatatgttgagagacagtgaaagccagatatatttatacattctttcattgagctgccaagcaggtatgacaggaatggattggtttttagtctcatcactaaaaacttgactccaagttttcgcctgttcgctttcatcgtgcaagatgatcggtaccttcttacgacggtgttgaatcatagcaagcattgcagtcatctgagcacgaatcaaagaagatgtaaagataacatcaacaggaatgttactaatcctcttccctgcttcaatagcttcttcaacacctttctcagtcaatggcacatcaacacaaccagtaaaaagattcttctcgttccataaagattctccatgcctaatcaatatcaaagctgcttcatctaaaccatcaaaacacacaaacttgtatttagataaataatcattaaccaaagtgagatttgaggaattaaaaaaaacagagcatatacttacttgatttcttttgagaattgtcagggattgtcttggaaggagacaagagagtgttgtcataagaaactgatgatgccattgctttaatcttgcaaaagtttgtctttttcgatgtaaagctcagtgaagaatcgatcttgaatccacattgagagattgtagaagaaggagaagaccggagagaagcaaatgaaacgactgattggtgagacgtagcagtagccattctggagaaaaaaagaaaccaaattttgtggtagattctataattagcaaactaattatcgtgattaaagatctaaaaaaactcgatagtgaaaccctgagtaactctgtgatcatagcaaacacattagcaatttaatttgattgcatacagatctaattgggaagaaactataagcaatgcttgaacggagacaaacctggttctagttcaatgtcgatgaaaccaatgacgagtagaaaattacccaacagaaaaaaacttgtttctttttctctttcactacgacaagagagacagatgaacttgtcaatgcccaaaaaggaggattttatgagtttacataaagcaagctttagacgatttatatttcttgtttttgtcaactttctatttcttgttttttttgcatttaattttcgtaagtccaaaaaaatcgcaaacttaagacgtaaaacaacaaaagatcggcttccttaggtagtgacaattgagacagtgaggacaaccaacacaaggggaaattattttcgcaattataaggaacaaaatacgtttgttttattaatttaaatagcattttattttcatctatgtatgttctcttctctttttgttgttgtatccaacgaagtttcctgtggacttaaacatcgaaggatcgatggttgtgttttcttttgccaaacaaaggtactgaaaatgttgccaacaatgctttattgtagacttgtactatgtaagatatacgatttaaataagtggaatggtatagtatggaatttgttgcgagaaggtttctagtcggaaatcgaatattgaataaatttgtgtcagcaacctctcgtggagttgtatagaccataatagtataatacgtttcacttaattaaaaatatatactaaataatacactacgacagcaaaattcagcagatgaagcacctcttcaaagccttcaataaccaccccaaatcattgcctttttttcttcttggtctagatggttcggtttgaggaaaatgattatcatatcataaaacctattaaagcttaatagaaaatgatactacaactttacataataactaataacatatgatctatactctttagagagagatgagatagattagtattttctcaaaccggacttgtttgaacaatcataatatagttataatttataaataaataactgatcaaataaagaaatttttataatataatgtgaaataatataattagatgagatatgcttttttggtccaattagatgagatattctaacatcattttgcatgacatctactaaaatttgctgattcaatttgacaattggcaaaaagatgacatatgtctaatgaatcagaggtgctataatagaatatgcgatctgaagatgcttttgcccaaacaaacaaaattgttttactaatggaggaaacagtgtttgagactttgacgcatcattcatcaaatacaccaaacaaaaattgatcacaacaaaaataatatactaaaactcagatgctcatcgcttcaaataaggctgtcaagcagggttcatgaagcccaacccatgtcaatgatagagatccatcaatgtgaagtagataggctttgggaggcccatttgaactttcttttcttcatgacctagagaaggtattgggagagacaattatcgagttttgttgtatgctattaattatgaaagggagtattctaaataattcatacagtaattggtatgcatgaactattataaagtttaatgagctcgatcctcacatgatatgttccctatcttgtctttgcttattttagatgggacaactcaatccaaaacaataagatgatggctcaataacacaacttaaataaagcaagtctagaagaaaaggaacacagaagttttggctttatataaaggtagaagacagactctattcaatgatttttttgttttaatcgccaacaacatacgttatgttgggtaaatatttagatggtaattcacaacgaggacattaacaccaacaaactaaattaactttgatatttttttgaccatagaaccggttgaaaaataaaagttatgaacttattggttggtttttcctaaagaatattttgcttaaaacaagaattcttttatgaagcaaaaggagagcattagccattaggaatctatcaaaactgagacatgcaaaaaagtaagaatctcttaaaatgttacaatgagggaccagtcaatgctaggctgaataggtatgagattccttacttgaccaaaatcatattcaaatattcatttttttttgtttcaatacaacagaaaatgaa

SEQ ID NO: 1144 - DNA, 40951 bp, Arabidopsis thaliana
gcttggggtttggcggcaacgggaaaggagtttctatgggtgatgcggccggattcagtagccggagaggaggcagtgattccaaaagagtttttagcggagacagctgatcgaagaatgctgacaagttggtgtcctcaggagaaagttctttctcatccggcggtcggagggttcttgacccattgcgggtggaattcgacgttagaaagtctttcatgcggagttccaatggtatgttggccattttttgctgagcaacaaacaaattgtaagttttcttgtgatgaatgggaggttggtattgagatcggtggagatgtcaagaggggagaggttgaggcggtggttagagagctcatggatggagagaaaggaaagaaaatgagagagaaggctgtagagtggcggcgcttggccgagaaagctacaaagcttccgtgtggttcgtcggtgataaattttgagacgattgtcaacaaggttctcttgggaaagatccctaacacgtaagattaattgaaaacgtaagattgtcataaaagtgtggtatacatataataatcaataagtagttgcttttactattttcacttttcactatgtgtaataataccctggattagtaaaatggattgagatattggtaaaggaaagtgtatgctaagcattatcggaagatcccttaataaggaccgcataaactatatttcataataaatttcctattaacataaaagaaatctaaatacaaaaaccatagactttatttaaaaaatttggaagaaaaataataatcaagaactagatatttataacactatctaaactctatcacaccctaagaaacatcgttttcacgaattattgccttataggaccactagtctggcctttattaggtgaccaacgtcaagtagataaacatttatcttctgctggcagtacatcaattatacaaatatagcaagattgcttatgcccccgggtacgggaaaccttcgcacgtggcaaagatcgacagtctctacgtgcaagaatcatggtctcgccatctcactgtggagtcctttaacacctagctaaagtgtttccagatcaatcacatacatatccatctttgatctttttgtttttggcatacaagaaaagaaaatggcgtctcatgctgttacaagcggacaaaaaccacacgtagtttgcatacctttcccggctcaaggccacatcaatccgatgctcaaagtggctaaactcctctatgccagaggcttccatgttaccttcgtcaacactaactacaaccataaccgtctcatccggtcacgtggtcccaactcccttgatgggcttccttcttttcggttcgagtccatccctgacggtctaccggaggaaaacaaggacgtcatgcaggatgtccctaccctttgtgagtccaccatgaaaaactgtctagctcctttcaaggagcttctccggcggatcaacaccacaaaggatgttcctccggtaagctgtattgtatccgacggtgtgatgagctttactcttgatgctgcagaggagcttggagtcccggatgttcttttttggacaccaagtgcttgtggcttcttggcttatctacacttctatcgcttcatcgagaaggggttatcaccaataaaaggtaagtaaaaggttattattagtttaggttttcatcacaaagtatattattattattatttcattaacaatttacattatctatgacacctagaacagaggtacctataatacagatacgtaagaagtaccgtcgtctaggcctttttctgtcattgttagggcgaccaagaataactcatccttactctgaaattaatctatagtattaattgatcaaaattaaatgcatcaaaaatttgcatataatacggtgcttgaatgtttttatagtaaatattgagatataaaattatacttataaaatggaagtggattatggcagatgaaagttctttggacacaaaaataaattggataccatcgatgaaaaacctaggacttaaagacatcccaagctttatccgtgcaactaatactgaagacataatgcttaacttttttgtccatgaggctgaccgagccaaacgcgcttccgctatcattctcaacacattcgatagtcttgagcatgatgtcgtccgttctattcaatctatcatacctcaagtgtacactattggaccgcttcatctatttgtgaatcgggatatcgacgaggaaagtgacatcggacagataggaacgaatatgtggagagaggagatggagtgtttggattggcttgatactaagtctccaaacagtgtcgtttatgttaatttcggtagcataacagtgatgagtgcgaaacaactcgtggagtttgcttggggtttagcagcgaccaaaaaagattttttgtgggtgattaggccggatttagtagccggtgatgtgccaatgcttccgccggactttctaatagagacggctaaccgaaggatgctagcgagttggtgtcctcaagaaaaagttctttctcatccggcagttggagggttcttaacgcatagtggatggaattcgactttggagagtctctccggtggagttccaatggtgtgttggccgttctttgcggaacagcaaacaaattgtaaatattgttgtgatgaatgggaagtggggatggagatcggtggagatgtgaggagggaggaggttgaggagttggttagagaactcatggacggagacaaaggaaagaaaatgaggcaaaaggccgaagagtggcagcgcttggctgaggaagcgacgaagcctatttatggttcgtcggaactaaattttcagatggtcgttgacaaggttcttttaggggagtagagagactacaatttattttagatatgatcgttacaaaattatgttatgtattgaaatttaataaagtgttatcatatatataatgatgaacaagtatctgtttaattattaaccagataaaataagtgttgttttgtttcaacagtaaagattatgcatacttgaattcaataataacgaaacaacatcacttatatcaaaatttcaattttatttcacagtcttataaatcgttggccttattttatgttttggcttgagtgttgaaatatgccactagttttgacttttatttcacctacacctcaataacatctcatcttttgaataaaaaatattatcattttgttaggctttatacataataaatacacaaattcggcctcgagatcgcccacttggaaatcttcacatgcgaggcagatctttcgacagttcccacgtgggaaaatctgatcataaggtcgagccaacacattgttaataatttctataaaacggagtcctataagcgtaaaggaatcatattcctatcaatcaaaaatacaaatcgactttcatattttctctgcataagagagaaagaaaatgggatctcatgtcgcacaaaaacaacacgtagtttgcgttccttatccggctcaaggccacatcaacccaatgatgaaagtggctaaactcctttacgccaaaggcttccatattaccttcgtcaacaccgtctacaaccacaaccgtctcctccggtcccgtgggcctaacgccgttgacgggcttccttctttccggtttgagtccatccctgacggtctacccgagactgacgtggacgtcactcaggacatccctactctttgcgagtccacaatgaagcactgtctcgctccattcaaggagcttctccggcagatcaacgcaagggatgatgttcctcctgtgagctgtatcgtatccgacggttgtatgagcttcacacttgatgctgcggaggagctcggtgtcccggaggttcttttttggacaactagtgcttgtggcttcttggcttacctttactactatcgcttcatcgagaagggattatcaccaataaaaggtacgtttgtattattaattttggattgatgatttaatccgtgtttttaaactgatttacgtgttataatattaagtttagcgtagaaacaagaaaccatgagataatcaatgcgaatcgtatattttacgtgtatatacacacgaacaagattagtcaaggtgaacaagttgttggcttttatctatataatttcgtaactgggatgctactgtgctagttaaagggttttggacttaccaaaaaaatcccaactagagaccccaactaataaattatacaccaaaaaagaggtccacaatagggacaaataataaatttgtcaaaaaaaaaaaagtatccctaaatttgtattttctcaaaaagaaaaatataatcatttccatacttttgtgattgtccaaacgaaataccgatagtgaataaaaaatacaaaccaataaagaacaatggtcataaaatacatcaataacacaaactaataaactttgtcaacaacagagaattatagtttgggttaaaacttatacaccgtcaaacccaaacgatttctatatattaaaaacaaactgtaaatcagaactttcaatcgaataaagatgaatccagaaaaaatcatatccttttaggttttcccgattcccctatttgaggcactaaaaatcacaatgattgcgaaacataattaatagtcatatatggtggctgtaactagaatagtaggataacttgcaaaataaaataaaatcaaactggataaattaaaataaaatttaaattccaaaagagagcacatacttggaaaagtaaactctatgcaattagccattccatatatcattgtatttagaccactttttgtctgacatctttgacctataataaccttttgctggctctgatcctgtatacagtatcaatgttaatgcatccaaatttgcatctttaattgtagttaagaaatcttgagatgatatcgagttctgatcaataatatggtggtttatttggcagatgagagttacttaaccaaggaacacttggacacaaaaatagactggataccatcgatgaagaacctaagactaaaagacatccctagcttcatccgaacgactaatcctgacgacatcatgctcaactttatcatccgtgaggctgaccgagccaaacgcgcttcagctatcattctcaacacgtttgatgatctcgaacacgacgttatccaatctatgaaatccattgtacctccggtttattctattggaccgttacatttactagagaaacaagagagcggcgagtatagtgaaatcggacggacaggatcgaatctttggagagaggagactgagtgtctggactggctaaacacgaaagctagaaacagtgttgtgtacgttaacttcgggagtataactgttttgagcgcaaaacagcttgtggagtttgcatggggtttggctgcaacggggaaagagtttttgtgggtgatccggccggatttagtagccggggatgaggcaatggttccaccggagtttttaacggctacggcggaccggaggatgttggcaagttggtgtcctcaagagaaagtcctttctcatccggccattggagggttcttgacgcattgcgggtggaactcgacgttggaaagtctatgcggtggagttccaatggtgtgttggccgttttttgcagagcaacaaactaattgtaagttttctcgtgacgaatgggaggttgggattgagattggtggagatgtgaagagagaagaggttgaggcggtggttagggagttgatggatgaagagaagggaaagaatatgagagagaaggcggaagagtggcggcgcttggcgaatgaagcgacggagcataagcatggttcttctaaattgaactttgagatgctcgttaataaggttcttttaggggagtagagactagtaaatatggatttcaagaaaaaagggatttaagcacacaagagtagaccattgctcacaaagaacctctttatttcccaaattaattactcatttactcataatcaaataaacatcttcttattcatcacaaaccaataaaacttactttcctcagttcaaatatttcatactattagactttgttttgataaaaaattgttctactaatggtttaaaatttcatgttcagatttttttttttttttttttttttgtcggtcatgttcagaatataatacttggtttccttaattgtctttataataaatgatttttttgtctgattaatacatatagagttatgagtagatattttgtaactactattaatttgtcttcaaatgaaaatagacggagtactttgataagaaagaaaaaatacacctctaacaagttacaatgttgtgacacctctcgagtcatttctttagcatcttgtacatatataaacgcctaccgacaatggagtcgtgttaacttccatcattatttttctcttgtggatacgttttttttttaaaatggcatctcctgctgtccatagcaaacaaaaaccacatgttgtttgcgtgcctcacccggctcaaggccacatcaacccgatgctaaaagtggctaaactcctccacgcgagaggcttccatgtcaccttcgtcaacaccgtctataaccacaaccgtctcctccggtcccgtgggccttacgcactggacggacttccttctttccggttcgagtcgatagctgacggtcttccggataccgatggggataagacccaagatatccccgccctttgtgtgtccaccatgaagaactgcctcgctccgttcaaggagcttctccgacggatcaacgatgttgatgatgttcctccggtgagctgtattgtatcggacggtgtgatgagctttactcttgacgcagcagaggaactcaatctcccagaggttattttctggacgaacagtgcttgtggtttcatgacttttctacacttttatctcttcatcgaaaaaggcttatctccgtttaaaggtacaaattattttcatttttatatattattgatttttattcacatacattaaaagagaaaataacccttaataatgcatttgccaatttacactagcaaagtcgtgtaactcgtgttgtatccaatagattactaattaatattgatggtggatttgatagatgaaagttacatgtctaaggagcatctagacacggttatagattggataccatcaatgaagaatcttaggctaaaagacatccctagcttcatacgtaccactaatcctgacgacataatgctcaatttcatcattcaagaggtggagcaatccaaacgcgccagtgatcattctcaatacgttcgatgatcttgatcatgatcttatacaatctatgcaatctattttattacctccggtttatacgattggaccgctccatctcctagcaaaccaggaaattgacgaggttagtgaaataggacggatgggattaaatttgtggaaagaagatacagaatgtttggattggttggacagtaaaacgactccaaacagcgtcgtttttgttaattttggatgcataacggtgatgagtgcaaaacaacttcttgagtttgcttggggtttggcggcaagtgggaaagagtttttatgggtgatccggccggatttagttgccggagagacgacggcgattctctcagagtttttaacggagacggcagaccgcggaatgctggtgagttggtgttctcaagaaaaagttatttcccaccctatggttggagggttcttgacgcattgcgggtggaactcgacactcgaaagtatctctggtggtgttccgataatatgctggccgttttttgccgagcagcaaacgaattgtaagttttgttgtgatgagtggggagttggtgtcgagattggtggagatgttaagagggaggaggtcgagacagtggttagagagctaatggatagagagaagggaaagaaaatgcgagagaaggccgtagagtggcggcgcttggcgaatgaagctacggagcataagcatggttcctcggttgtgaattttgagacggttgtgagaaaggttcttttaagggagtagataatagagagtacaatgaaactgttattttaaaaatgtaagatggcttatataaaagtatgttatataactctggacgagtattgttttcagtcttttcaatcgtatgttgtgataacctacatgctcataattttaggtacatatgggaattacaatttacctggaaattgtggaattgttttgtgatattgcaccaaaatgtgaaattgcgtcaaccagtcaagtagaaatgtatgtgttcttcttgcatcaacctccaaaaacatataaaagtaatatagctagctgagttatatatgacacagaacattaaaatatctcaatgtctactcttttttacctttatatatggcatggaattacaatattacactaacaagtaataaattatctatataaaaaaaagggaattaacaatgtcgacattagtgtatggagaatggagccatttattagccattagtgtatctacaaatcatatataacgtcacagtttttcttgccagaagaatgaaaacaaaaaaatggcatctccttccgtaaaaaactcaatctttagataaaccaatactatcttttgctaagcttataaatttcacacatagatacaaaagttcggcctcgatcttcgcatgtgacgctgacacatatcttttgttaattcccacgtgctagaatcataaggtctcaccaactcattgtcaattatctttctaaaacgaagttcttataatcacatatacaaatccattttcattttttctcggcataagagagcaagaaaatggaatctcatgttgttcataacgcacaaaagccacacgtagtttgcgtgccttacccggctcaaggccacatcaatccgatgctgaaagtggctaaactcctctacgctaaaggctttcacgtcaccttcgttaacactctctacaaccacaaccgtctcctccggtcccgtggtcccaacgcgctcgacgggtttccttcattccggttcgagtccatccctgacggtctaccggagactgatggcgataggacgcagcatactcctaccgtttgcatgtccattgagaaaaactgtctcgctccattcaaagagattctgcgccggatcaacgataaagatgatgttcctccagtgagttgtattgtatcggacggtgtgatgagttttactcttgacgcagccgaggaactaggtgtcccagaggttattttttggaccaatagtgcttgtggtttcatgactattctacacttttatcttttcatcgagaagggtctatctccttttaaaggtactaattgtttttctattactactgattttaattcatatagttaaaagaaaaaacgtccgtaactaatgcatctagcatatttatctgtctttagcccaaagttgtaatatgttgtatactttaatttagattactaattataatggtgtgtattggacagacgaaagttacatgtcaaaggagcatctagacacagttatagattggataccatcaatgaagaatcttaggttaaaggacatccctagctatatacgtaccacaaatcctgacaacataatgcttaatttcctcattcgagaagttgagcgatctaaacgcgctagtgctatcattctcaacacgtttgatgaactcgagcatgatgttatccagtctatgcaatctattttacctccggtttattctattgggccactccatctccttgtgaaggaagaaataaacgaggctagtgaaataggacagatgggattaaatttgtggagagaggagatggaatgtttggattggctcgatacaaaaactccaaacagtgttctttttgttaactttggatgcataacggtgatgagtgcaaaacagcttgaagaatttgcttggggtttggcggcaagtaggaaagagtttttatgggtgatccgtcctaatttagtggtgggagaggcgatggtggttcttccacaagagtttttagcggagacgatagaccggagaatgttagctagttggtgtcctcaggagaaagttctttctcatcccgcgataggagggttcttgacgcattgcgggtggaactcaacattggagagtctcgctggtggtgttccgatgatatgttggccatgtttttcggagcaaccgacgaattgtaagttttgttgtgatgagtggggagtgggtatagagattggtaaagatgtgaagagagaggaggtcgagacggtggttagagaacttatggatggagaaaaggggaaaaagctgagagaaaaggcggaagagtggcggcggttggccgaggaagcgacgaggtataaacatggttcgtcggtcatgaatcttgagacgcttatacataaagttttcttagaaaatcttagatgagaaaagttctaatgcggtagttaattacaaatatcatatgatagttttggtggtagaccctagaggcctatagatgtgttactcgtttcttttatataattataattggtctttattttctgtttgtaatcagtgtaaattgctatagaataactttagcataataacttttatttttgtttgttgataccaaaatattgttagaatcacaccactaatataaacttcaacaaaaaaaaaacttcatcttttcctgtgcaagatgtactacggaaacaaattttgtattcaagtctagaagagaacacatttcctgtgcaagagaacaagtcctctatacatcttttcgcaccttgccgaccaattggcgaatgagaggtcgctcttgctggaggcggtacgtaggtaaaaggtccttttgggtcagaatcagcgtggcgcccaatatgttatgtatacggcccggcccactctatcctatgggaggtgggaagttaaatagttgtattttaatcatcaatcttatggagtattgacaaagtaaccgaacatatacgcaaaaacgtgtttttatcatcaatctcattaattattacctctaagttttaatagttctatattgcacactaattcttaaactgatctaaagtagatgtatgatctaattaaccggtaaaaagttgtaataatcagctagttaattcaatgtatatattaaaaaaaacttaactttttaacttttggttgagtgggttcatattcagttacttttgtttatatacaaaaattggttttaataagtaagcaacaaagtttaagctgaattgcttggaaaattatattaattcagccataaaacgatataaaatcggaaggatagattgtcacgtgggttatcacttttcacaaaattgacttgtttttttcttaacatgctatcaattagtctaatgtagaagtacaatggaagattataaaaatagtcgaacttattctaaaataatagaaagaatatcaaagtcgacatattatattattccgttaggaagaaagaaaaaaaacatgacaagaatggatagatagagccatctttattttggcagtcaagttaagtcatgaatttggttgagaaaataaaaacgaattagctttttttttttgttgaatgacgagaaagagaattaaaaaaaaatgtcaagattgtacaagttgaggcagttgatcaagaagatgacgttaagtctctgatgttcgtagtcgtactttcaggtgcatccgttggatcgaattctccaccttcttctgatacttgttgtggtgcgtgtgattctgaagagaaaaaaagattcatatcgtaaaaccttttttaacataaatatatagtcaatccacacatagaagttatttgtttggtggcccctctacaaataagtttggataattgcttaaatagagagtggtcccttgtgagttgtgtgactagatcttgagaatcaataatataaaaaggtgacagaactcacatgcaaacactattggtttatgcattttacatacacatatataaacatgcatgacccatgatggaggatagacagatgtgaggagaaaaaatttagacagctcagttcacatggatatgacgcaattatatatatcccatgtgcccaatcattcactcttttttggtattccatttaatcttccgtactatataattcaatctcactagctcttgtttcttacaaaacttattgtttagtacttagtggtcgtgaatcttgttatgatgattaatgcaatttgtacaatggacatgcatggtggttataagacttaccagtggaagaagatagtggcccttgggaagtagggacattagatggagtaggagcctcgacattggatgggtaaattaggtaagatgaagcagaaggtaaacgttgttgttgttgttgctgctgctgctgatgatggtgatattgataatgttgttgatgatgaagatatggtctagggcttggagcttggaggtagtaataaggggaaggcatgatgttggatgatgatggtgatgttgctcctcctcctccgtacatttgctgttgatagtattgtgcctgttggagctgtgcgttgtatagggcctgcatgtaacttatgtttgattaatatcatcaccaacctcatcatcttgagttcattttttatgatctacccctatttcttctacgtcattaacatataatttcctacgtcattactcagtctaaggaagttttctaggtactactaattccaacattcacatacgctagaaggatacgacattttcctagtagatgtctatactaatatacaattgcatgtttataattgtatatgtatgtcatatggagagagatttgaggggagaaaaagagagatagagagactgacttggtggtacccatattcagaattgtaggtgtacctgaaaacaaaagaatttaatgatgctaaaccaattagtctatgtatccaccaaaatacaaaaacctaattatcttacctagacaaatttagtgcatgcaaatttcacagagacatctacatgacatatttcactattattgttctattgcaatgctggtccggctaatgttcatgatattatgtatatactttttatatgacaactagctagtctataagtatttatattacgaatatgatatttacaggctgactccaacttgcgcaaattgaagcattaaatatcatcttctgtctcttaccatttctatcacattggaccatttcatttgtctaagcaaaatttataaatttctttacacactttggtattaaataaacaaaacccattatttttctctttaaatcattcagcgtacccgtatgacggatacatgagctgggcagccgcagcctgctgcaccggagcagccattccggtatagcttgattgtcctccgccttgatactgactagggcttcctccttgtcctcgtcctatgccatcaaaaagtaaataaaaagtttttctattgaatttaaacgattacataaaattattacattgctatataacattcttgaacaatgtagcatttttccttgtatatgtatcgtagaaattcattaaaaattatgacgatagaaaaattggcgtataatatctccaattaaagacaaaaggttatcttttgataacattacgttttgaaaacaaaaataaaaatgttcttcatcatcgtattagtttttcatcattttctcaaaacaatgtatggattagtcccatcaaacaattcagccaagaaaagtaagtagatcaatgatatcattaaagttcacatttcaaagaaatatggattgagttaacgaacctcgaggcgtcgatggtcggggccgtccaaaagacgcaatattgcaatttgcctttcgtccatcgatcaccggattcggatcagcgacggctctcgtcgctgaatccgagtctcgaaacgtgacctggaccacggagatgatgacgtgtcaaaccttgagaatccttaaaatggtggggaagataaaagaacttacaaaaccgtagcctttagattttccggtagccttatcggtaatgatgacggcttcaagaatctctccgaactgatcaaagtaacggcgcatttcatcggtgggagtctcccatgctaaacctcctacaaacactttggtgtgagtcgtgtctccgaacggtgatcggtaatagcttgtattagacatatattataaactgtttgttgatttgttgatgatgatggttgtgatgatatacaccgataaaaaaaatggtttgaataaaatttaatgaatgaatatatgaaaatggggtctgtctaattaaaacatgagccaagaaagaaaagaagaaaagattgtaaatgagggaaagttagcttctttatatcgtcaaatgccaaagaaacgactttttcattttcctctctttatattttttggttgcaaattggaactcttaaacgatgccgtattttgcctctgaccctactcttagagatggatagagagagacttggtaagttaatgtaagaaggaattagattttctttggggttttgtaagaagagtgacaaggcaagcactgagtatgtcttcgctggctataacttgccaggttttaacattatagctcttccacaacttttctttttttcctccattaaaataccttctttaatgttttctaataatatagtgattatggcagattatccgtaaagtcaaggtattattccgagttgaaacagagttttactaatcacgcaattaagttgtttggaatcaggatttttttacttcacaattttaaagtcaacgataaatatatatttaaaaagagttagatcagaaaccctatttgacatatagcgttgccatgcaatctcgacataactattttttatttattaactaaattttcttaataattcgtagccaaatgtaaagtaagtatgtaatgtgaatcaaagataagaattagataatactagtaatgatgtttatgctaatcagatttcaaattccttttgtgattttagtggaattccattgttatatccaccaaagccataaaaagtacataactggtgaaaagatagttttgtagtttgagtatatatatatcgatccctgtagagatttctcatcccccatttagaaaattgactatttaatattagactaaaaaagacggcaatatatagatatatacatatgactatgagtagctataaaatattaatataaatccatatccaattgtttttattagtaccaagcgtaaaattaaattgagagttttatatgaatagagtacatacagttttgatcgttttgatgtgattgtataattatgtccattaatattcgagtagtgaattagttatgagttctgacatgaagttagagacgacgttttaatcacaacatgcttcttgcttcattatttgattctgtgtcaaaaacattcttcttgcttatgattagttagttttatttatcaatttatcaaaaaaaaaaagactataactcgctaaaacttatcagatacactattttctgataataatgattttttttagggagataacaaaagaaaaatacatatacatgcgttcacatacgttcatatgtaaatatagttataaaaaaaaaagttaaataaggctatagacatgtatatgtaaatgtagttgtaaagggttatctaattatatgaattaaagtggagggcaaaagaattgagaagatcacatgaaatgagcagagaaaccagctttaacatagtcccccgcacgcatgcagccacccaataacgaccatcccctctttttatctaatgaaaacattaaaccccaccatcatcatctatttcactcccatatgcctttaacatttcagcaatatcggtgtagttgaccaaaaaaagtgattagtaagttacgttttcattggtctactagaaaactggttttgttaaacgtaatgtgaatcatgtacatataaaattgctgaatatttaagagaagtttacatgaaaatgctttggtagatgacaacttttttcagtgagccaatacagatattttgttaaagagagaaaaggttgggccaaatttgccagcatggctaaagaggagacaactggagttggagtttaaagaagaaacagaagagaatccgtgaactggcagatccctccacgtgtatctctccttctgtcattcttcatttcttccctctccattatctattcttattttagctgtctctcttaacacaaaaactaatttggtcattcattagaaagctcacatgtaacattttcaatcttctgaaaacttcagcattttgacatggtaacataaagatgatcaaagtaattttgaactactagtgttatgtagtattacaagttattaattcagcttgtattccaaaggggtggtggcgcagttggctagcgcgtaggtctcatagctactgagtgatcctgaggtcgagagttcgagcctctctcaccccattactctttttccttttttcataaaacccatgctaggctcagtttcaatagctttttattacctggaagcccacatacattcgtaatacgttattgatgcgttagcgttacaaaggccgaatcacctttttattcagttggtcaagaacaaaagttttttgacccattataggcccatttactatttctatctagtatctacaatcatccacacggtttcttatttggcgattgcactgatcatgttctagattacatgcaattatatatgttcatacttgtgaataccaaagtttcggttaaatttcacgtgctttactcagttacttttttaaccggcaagattacattaatcttgcaaatcaaatcagaattcgacattcatgagagggatttatttcttagtcaaacaaaagaggagttttttttttttttttttttcattccagaaaagaatcaaatatcaacattttaaagatagtaatttcttgatgacaaaaaaaaaaaaaaatagtaatttctttataaaaaaactacaaatatgagctcaattcaattaaatcaattggtataaccggtttaattgaaaattgtacaaaaccgaaccgaaaagctaagagcgagtctaagcgagagagcaaaagagaaggcactggaagttatcggaatttgcatctttttgattccgccgttttgcgtctgacgtgttcacggcggcaacctccatggacgacggtgacctcggtaacaaccaccataacttcctcggtggagctggtaatcgtttatcagccgaatctttgccgttaatcgatacgcgtcttttgtcccagtcagaacttcgcgctctctctcagtgttcttctctatctccatcttcttcagcgtctctcgccgcttccgccggtggagacgacgatttgacaccaaagatcgatcgctccgttttcaatgagtccgctggtagccggaaacagacatttctccgtctccgccttgcgcgccaccctcaaccaccggaggaacctccttcgccgcaacgtcagagagacgattcttcccgtgaagaacaaacgcaagtcgcgtcgcttctcagatctctgttcaatgtcgattcgaatcagagtaaagaggaagaagacgaaggagaggaagagctcgaagataacgaaggtcagatccattataacagctatgtttatcagagacctaatcttgattcgattcagaacgttctgattcagggaacctccgggaataaaataaagaggaagcgtggacggccgaggaagattcggaaccctagcgaagagaatgaggttttggatttaactggtgaagcatctacgtatgtgtttgtagataaaactagtagcaatttgggaatggtgagtagagttggtagttcaggaatctccctggattcaaattcagtgaagagaaagagaggtcgtcctccaaagaataaggaagagataatgaacctagagaagagagacagtgcaattgtgaatatttctgcgtttgataaggaagagttagtagtgaacttggagaacagagaaggtacaattgtggatctctctgcattggctagtgtttcagaggatccatacgaagaggagctgaggaggatcaccgttgggttgaagacaaaggaagagatcttaggtttcttggaacaattgaatggtgaatgggtgaatatagggaagaagaagaaagttgtgaatgcttgtgattatggaggatacttgcctagaggatggagacttatgctctacatcaaaaggaaaggtagcaatttgttgctggcttgtcgcagatacataaggtataataatgtttatgttcttcactggttctgtttctagttggattataaaatagacctagtattggctgtggaattggttatagcaaaactaacactttgttactattgaagatatagttttataggatttggtatatgatgttttagtttctgctgctagacttttgattgtccctcttgtttgtttctccatcttcttgaacatgataaaagatgtttacatgaattaagggctgctactgaaattgcttatagttcgtttgtgtactctctgccgttctaggattctagctgttgttatcacttttagttcaggattctgaaaattttctcttttgtttttgattatatagccctgatgggcaacagtttgaaacctgcaaggaagtctccacatatctacgatcacttcttgaatccccaagcaagaaccaacattattacttgcaatctgacaacaagactctaggacaacaaccagtgatagctaacgaatctttactaggtaactctgattccatggactctgagacaatgcagtaccttgagagtggaagaaccagcagtgaggtgtttgaggaagcaaaagccgtagagaatggcaatgaagcagatcgagtgaaaaccagtctgatgcagaaagatgataatgcagattttctgaatggagttgaggacaacgacgatgatatgaagaaaagagatggtaacatggagaatttggcgactctatcgaattcagaaatgacgaaaagcctaccgacaacgactaatgagcttcaacagtatttcagctcacaaatcaaccgagttcagtgaccatttcttttacctggaacaaattgttttctcattctagttcagattttatattttatgcaaactaaaagcgtgttgtagctaactacaggatatagaatttgaaagggccatgtacaaaacatttgacagaaaccaaattttttcttcaaaagaaaatttctttgagtttcaatctgtgattgatttggatttggatttggattggcataaaaaaaatctatgatttggattgtgttatataatatagaaaagaacacaaacccttaaaataatggacaagaggacatgtctttctccgtttatcacggtcagcgtcgttaaccttttacgttattgactagatcggggtttaataagaaacatatattagttttaggttctttctgtgtaaaaactaaacctttgtggctactttataatttataaaacttatgtttctgagttttgttgactaaaaaaagtagatccaacggctgatataataccactatgagaggatcctagggttactactaatctcgaaatcaatcaaatcaaagcatccatttttgattcagacttcagagagacagagaaggaagaagaagaagaagaagaagaaaaaactatggagaatgagagggaaaagcaggtttacttggctaagctctccgagcaaaccgaaagatacgatggtattttccgatttctggatctctattcagaaaatgatttgttcatgtttctgaaaaaatccgatcttttattgctccgatcgaaattgtttttacatttccatagattttctttgtagccctttaccgatttgtatgtttctgggctgttacttgatctggacttttagatgcgacctttaagtaatttcttgtttaatgttgtttagatactctgatcactcttgatcttatcttgatataattttatacttactgttgtcgaatctcttagcatgaaaatgaaatagatctacgtttttggaagcaaattcaaagatcggatattttttttttgttggtgatgatgcagaaatggtggaggcgatgaagaaagttgctcagcttgatgtggagctaactgtggaagagaggaatcttgtatctgtagggtacaagaatgtgattggtgcaaggagagcatcatggagaatactatcttccattgagcagaaggaagagtccaagggaaatgatgaaaatgtcaagaggcttaagaattatcgtaagagagttgaagatgagcttgctaaagtttgtaatgacatcttgtctgtcattgataagcatctcattccatcgtctaacgctgtggagtcaactgtctttttctacaaaatgtgagtgtcatctttattatactctgaccattcatgtgatatttgtgtgactaagaatgagatcatttccgtttgactaaagttaaatgtttaagttattacatagctaccactcttgcttgtgttcttcctgaaatgatgatgattcatgaacttttccttgtttcactgttttgactttacgtgtttttttttctttctatgtaggaaaggagattactatcgctatcttgcggagttcagttctggtgctgaacgcaaggaagctgcagatcagtctcttgaagcatataaggtcctttgatcatgtttatttgttttcttatttttgtgccacccctcttatatttgagctgggaataacctaagacaagtcttgcttttttcgtactgggaatgtaggctgctgttgctgctgcagagaatggtttggcacccacacatccagttagacttggcttggcgttgaacttttcagttttctactatgagatcttgaactctcccgaaaggtttgtttttgtattttggattgaacataatagtggaatctgtggtcattttctgacactatgaaactatgtattgtacagcgcatgccaattggctaagcaagcattcgatgatgcaattgctgaacttgacagcctcaacgaggaatcatacaaagacagcactcttattatgcagctacttagagacaatctcaccttgtggacttcagaccttaatgaggaaggaggtattcttattttcttttgtttccctatctcatgatcaaatggtttccttagaatcaaatgagctgttaagagcgttaccttggagtaaaaatgttgatgtttgggaactcgtaaccattaaccatctgtctatatttgaattaaaccgtcctttatgcatgtattgctatgtagatctttcattttagttttgaaagcctcaacaaaaaacataccaatctaccatctcatagttattggattctagctaatcttgtaaaagttatatgtttgtagcagaaaacattactagtttcttgtttctcttccaaagctttttcactcaccttttttttttcccctcttagatgagagaaccaaaggtgctgatgagcctcaagatgaggtatgaaaagccagttttgttataagttaagctacttactgatttttccattttgcattgacaattagaccactcatggaattactgaatcattgcagaactaaatcctctgtgagaagagaaacgactcttgctgcatcctgaatcttgaagtgaagacagtaagtgtcgttgtttgttactcgaatgtgtaatttttaatctatgtctttcttgatggtgttttccagattcttgaacttttcacaacacaacactgcgttgcgtatcttcaaccctcttatgatgtggttgaattctgttttacgcttagtttgcttcttttgttgttgaattgagccagcaggcatgatttgggtttttgtttatcagaatattaggcgtatcatggtctcaaaattaaaaaccaaaacagacaaagctttattcgaagtttgtaataactaataactccttgcaaaaatcatgaaagtctgaattcaagaggctcttaataatttgcataagtgatcccaaacttcacaacttttcaatttgtggatgtttgccctctttgtggccaaggaatcatcctcaagtgtgtttctctacggtggtttggtccgtaagtgtgtgacataataatggtttggttctcccaacatgaccctcaaaaaggatctctatgctctaaatatgggactcttgtaagttgtaattgtaaccaaatgctatcacaaactctctaactcgtaccaacactcattgtgtctaatccaatcgagagccctcaaagtctaaaacatgttaatcaaactgtgaaccagttaatccttatagaatcagatatctttttgtcaaccatctaaataacatttttgtcacgaattgaccacttccctcgagagattttgtagtgttttctttaatatttttatatgtccaatgaataataatttcatacatctatcgaaaacttcaattttgagctacaaatgatcaattcaagtattcacttggcccaacttctaaattctttaggtgagttgttgctagcacaacaaatgctacaactgtcaaaagcaaagagacaacaccttcaaatattaggtttgactaataaacagaggatcatggtgacgatctttgccaactctcaccaaatcaacctgaaaccttcaaaacagatttgatgctattggatccagcgccaataggacacttgtcattagctcatttacttttctattctttaaaatgatgagtgaaatcgaaaagtcttgagcaagaaatacagattacagtttcttcttctccaagcatctattgtttaagagagaaaaagaagaaaagccatggagaatgaacaatcaacgcacgttcacttcgcgagtctctcttcgtcaagcgagcgctacaatggtactttttttccagaacaacttcttgaatcttaacatgccttcacattactcaatactccaaatgttttgttgcagaaacatttgaagagataaagaaagcgatgaagaaaagtgttcagcttaaagcggagctatcagcaaaggagagaaatcttgtatcagtggggtacaagaatgtgattagcgcaaggagagcttcattggaaatactatcatccattgtgcaaaaggaagagtcaaaaggaaatgaggaaaatgtcaagaagcttaagaattatcgaaacaaggttgaagatgagcttgccaaaatttgtaatgacatcctgtccgtcatcaataagcaactcattccatcgtctaccactgtggactcctctgttcttttctacaatatgtgagcgaaaatgtgttgttgtggtgcttgaggcgcaaaagtgttgcactgttttggctatactttatgttctttccaggctggcagacttcagttctaatgctgaaagcaaggaagctactgatcagtctcttgatgcatataaggtccttggctcatgtttgtttttgtgccttgagctcggaacaaaataaactgaacaatatgttttgtgttttggtaatggcaatgttggttgttgttactgctgcagagactggtttggtaccaacagttccagctatacatgactttgaattggacttctgttttcttaaactctcctgaaaggttcctttgcttacatgcatacatatgattatttaatgaaatcggtgtggtgttacttactaacagtctgaatcagtgaaactgtgtgttgtacagtgcataccaattggcaaagcaagcgttcgatgatgcaattaatgaatttgacagtaagtgatgaatcaaacaaggacatgactcttattatacagctactcagagacaatctcaacatgtggactttagacctcacagaaagagaggaggtaatctttttatttccctatctgcctcctctgatgatagatagatagtttcctttggaatcaatataagccatttttgtgaaattttgttagttcttgtactgttatgaggagcctaaactttgattcgaatgttaatgcttgggaacatatttacggctttgtggatctttcattgcttaaacgccaagttgttgaattcaagcaaattttgttgcaagaaaccaattagcatactagtttcttgttctcttccaaatcatacactcaactttttttttgtttcctcttatccaaaagtggtgatgagccccaagaaaaaggtatgaaaaagccagttatgtcaaaatttaagctacttgaagattatatttttcattttggcattgctaatggagttactataccattgcagaactgaatcttgaatcctatgcgagaaaagaaacgactcttgatgcatatcctgagtcaagatgggttggaatctgttttacacttaacttgcttctcctgtgttgaaatttcagaatataagacaccatttggggttttgtttgtcggagtatacctaaagaatcattgcttgtcaccgacgtttcttcattctttctttttatagccaaatgaatactataatcccattggagcactgaggaagaaaactcgagaattgcttggtacatcttcctctatagcagttgcaaacagttccacaaataaaacacaatgaaagtttttcaacgcctaagctaagtctttcaataatgaaacccttttcagtgataaatttctgcaactatttgcaacatctcaatctctgaaagactttgcttagaattataacaacaaaacacaaccaaattgtagtaaactgatccatcttatttttaatccttccaaggataatgacatttaccaacaacaatgataaggataacttttgcttattttgtttggcaatgtaaatctcttacaaatagcaaacactttggttaacatatatatatgcaaacctaatccaaaagtactttcacatatttgtaaaaacatcctaatatttatatcccgatgattaaatataacaaatcaaccaattataataacaaaaccccccatcacccaccacaaaactccattccccactccttttttgttcattttcttatcgtctttaaaacacacaatttacacaacgaacgcacataagctatagcaagaagcagctaatcacaaattgaaacttagaccggtcctaaaccgaaccagaatcatcagagtcgaatccagtgaaaacaagcttttttgtcctgatgaatctttgattgaaattattatataaggaacccatctccccgtaagtatcctttcagagagtttgtcatctgaatcggaccacgacacaagatatgtcgtctttactctctcttctcaatgcttcagctgttaattcctttgccgctttctgtggatctttcactcttctcgctatctccattgcctcttcatttgtcatcacctattaacatgatcattacaacaaaacaatcagacaaaaatggtctcaaaacactcatttaacaagagatgaataatatatacagagaacaagccattattaccttccagatgccatcactagccaagagaagaacatctgtctggctatctacagtagcttcttttatgtcaggctctgaactcaagtgtgtcttaagtcccttatctccaaaagcacgagacacagctaattgaccattcacccgaggaacatcacctgttattaaaacatcacagccacatcatcctccttgtcaacaaaatcattctatcttcattaaacattcaatactcaaaataagttctttacctggtagattggatacaaatccacctctatcttcaatactcgacctttcagtacgaggctcatgatctgtactcatctgcgttatagcgccaccatgagaaagaacagctcgtgaatcaccaacattagctatccacaactttctcccattaatcaatatagcagtcacagcagtagaaccaccacgacccaagtcagaactattcgatagaatcgcttggtccgtcttctcataagcttttgcaatagaccttcgaggatcaacccaaaactctccctgcataaaaaaaacaatacacttaaagctatgcacatgttcattaacccaagaacagtagaacagtaacctttttttttgtttttacctccttaaggatattggagaagagacgtttctgcaagtaagcagggacactatcacccatatgaccatcataaatagcaaaaagacccaattcatggtcttggatgttgataaagttagcaacatgataatcttccattggatggttagcttttcctttcactagactaaaaccatacttgatcatcccttcatcacttcttcctttacctgatcgtgatgatgattgtcctcccacaacctaaaaacccacaccaataagatcaatcaaaacacaaagctctcagatctttcacttctaagacaaaattatttcatctcataacaaaaaaaaagaaattgttatatagccaaaaattcgataatcattacctcagaagcggaagtgaagcaacaaaattttcccattttttttgaatcgaagaaaatttcttcgatttttgcaacctaattgaaacttgcggagatttattcaaataaacaaaacaatctgcagaaaaaataaattcagaaagcgaaattaaaatcttcattgagcagctgggagatgataagaaagaggggatttttacctggaaattaaaaaccctaatttggttttcaatttttttttgtttgaggtactctcaacgataaatctacaaagtctatgcgacgaagtcttcgctctcttttcgtttatgtctttttcctacgcgaaattatatatatatatatatatatttttattcagttgaaagaaaaataaaaattgaaagctatctgtatttttttaatattgcatcaacgtccttcatatatataaatatttactttacgcctcatatgaatgaattttaaattgtgactataatagatttcgattatttaatttgggtaacaataattgcttaacctttaaattgtagttttgtttaggtgatgaatttgtaacatacatttgcgttgtattaaagtaaaatgagggtgtagatatgacaataggaactttgggataaaagtgagaggttttggaattttgggggtgaaggttaagataaattaggggaagaaaaggagagagagaaagggatggagcaaaaaggagtgatctggtcaaagaaaataaaaaagctgccatttaaaaattttagtcttggctatttggcatgttgacttcctcttcctttacatttatgtcatctccttaacaatccctattttatttttttatatgcgtttttactattcagacatgaaaaaatgtgcgaaactatttagaaaattcatatatattttattcctgatatacaaatatccagaaaaataaaacacaatcctttggtttttgatatttattaggacgtattccgcaagagttttatttaatattacaaaatataaaacatttttgcttagagagattattatgagtaagtaaaaagtaaatgaatgtttcgttttcacacaaattaatgcatgaaattagcagtttcgtagaaaaacatatccattttggatttgatggcataacgattgcggtaatttttacattttctttatacaactaaaagttcaagaacaattatgaagtgcttaattgagtaaaatataaaatatcaggtctcttccccattaccagaaatctcaaagtatcaacgaatgcgacaagaaagtggaaagggtcaaaggcttcgacgcgtttactagccatctttttgtttctccatttaatgtgattcgcacacatttcatgactttttgacccttaatctagtttatttaatcaaacacacatcaatttagctaccttagcttccttatttatacatacaattttgattgctagcctaaaacaaacgatttgttgcttaaaataataaacttgttcgtctaaacctccgtgatatgttcctctaaattaggttcataggcccctagtcatgtacagtagaacatcatgtactcattttcaattgtgggccttttatgagcccattttcttactatgtaaagtactggtactgtatgttaatgagcccaacagcacaagaatgtgaaactagatacaatgtatgagtttgtatatatatacaaatactgatagttttattctatgcttatatgaatggcttctgatctacatgatttgtactgctttccactttcttccttgtgattcttctcaggtctcagagagcactccgcttggaatcagtgttctgtgatgccaataattcaacagaaaactgttaacctcaagagcaaatgaaccactaataacaccaacgtataccaaatctacaaatatagaaacagctataaagatgacaaatagatttaacacttttgattgatgcaaaggttttatcaatgttttttgaagacagctactggatcagaaacagattgcggattatttctcttaacaacatttacaagtttttgaaacactaggatatagttattccacgttataaaaatgagatagttgatgcaagcagcaaaatgtttatgtaaatcggtgagcaagctttcacaaatagtatgtatctgaaagtgagagagagatagggaactgactttgtgtggtagacttcaatcaaatgcatagggatcatcagcatatgggttgagggaaccttctgaaaacaagtctccaatatttgcagagtgaggatgatcggccattgctgtttcctgcgcttaaaagaccagaataatatgcagttaaatcagaaatgtttttagaaacctagcatcatccataacttcttggcctgaaaacttctacattatactcgcatagacataaagcttggttaagcagccctaagtctgacctcctattgttccattatgtctgtcagttaatctattttactattaaggaaggtgtgacgaaatgaatataaaacgttttgtgaaaatatgatttttctcctatcatcaaatctacttttttactctctgcttcaacactagttgactgatgtgagggtttgttcatttcaaagcatcagttaaaagtagtgtatttgtattttaccttcgcgatgattgtgggggtcatcaatttgggtgtcaacctagtactgcgtctttgtggctcctgttgccaaacaatgtaaagttagatatcttgaatatgtctatatagcaggatggacaagctgacctgaaacattgttgtctgtcttgtttttctccgtttaggtatcctcccattattcgtttcaacctcatactcacgatgagttacctgccaagttgaaccacaagccaaacaatgaggttgatttcaatgtaaaaatgcaaagcttcatatgtttaccttgctatgatgctttggatttgtcgcttccttcaatatatttgacacagatgttacttttgcctttacaaaaggagattcctgcgtttgatgatccatgagaaagtgttaatgtgttgccttgacgaagcggaaacgaaaagaagaagaagatatttatgattctctgactgttcgtcataattttctgtcctcaccgttatatgctcgcttctcttattaccaccaagacgagattctttcactttgaccgacgaatgtgaatagtcctacaaggtaataaacaccatgtcaatctcttaccctgtttacgttatgaaaataaagaaaggagaacttgcattgtcaactgaatgttgtatatcttaaagtgtatagataacgattaaggaagaaaatgaagtccaatctaaccttgtttgagtttacttcttgctcctcaggtggattgtcactcatcaccttccactgtaactgcaccaaagctctttgcctctcttcctgcaaggttagcccataagttaaactcataaagattcatcttataatggatcttaaaaagcacttacttttttcctttgaagatctaattcttcttgcagcttcttgcagtcatcttcatactgacacttgaatgctttcaactgagcatcatgctcactcttcagagctgttatcctctggataaatatacaaaatattcgaataccagaggctccttattctttcatctgtttgagctatgaatttatatctgtgtgtacctctttcagttcattttcagcctgaatctgattttgtctcagttcctggtcatacttggctttgagattgagctccttactctcgtgctcctcccgaatattgagaatctggggaacacgcagcttttctgagttaatatgcaaagtaattttaacttccatgctgtcagaaataaacttccaaacagataatgcatacaagaaatacaagaacgtttcggatttgattaattcattcaaagctcatttggtgatggtcagaaccatcagatattttggaatttattgatgctatcagacaattggaacaatgcatgaatgcagtaacatgataagatgtggtagctttagcttagagattcgcaaagaagccttgtccaaaaagttcataaatcatttccaacatacccgagaagaatgttcctcttgaatggttagcagttgcctctttgattcttctttgcaatctgagagtcctttatcatatttagtggacagctctttgataattttttcaacctggagttagaaccacaataaacatcatcaattgttcagaagactaaaacgaaagatactgtagtcattataccttgtccttttcagaattaataatctcatgcttctctacatcatacttcctcctgatctcattaattgcctaaaaacaacatagagagataaattaattgctttagtgtctttgcatattgcattcagattcagctaagggcctcacgattcttattctactaaatatatggaaacattgctacagatatacctggtcattcctctgtgataattcttttaagtgccttgataattccaactgtttactttctagcatcaggtcatattgcttctttgcttctgcaagcttagtttcagcagttgcgagtagctccttgtcctgcagtaggattcatatttgatgagtactaaaaaaccttaaacctatgtcccagaatttactttgtagaccttaatgatttgttggtttatattcttctcgttctcattgcactggaggattagatgccctttctcctctataatggtttggagctggttcacctctttcgccaataaatctgcctgcagctgatggctctcactctctttctgcaaagtctctagttccccaacttgtctttgtgcatctgcctgcagtttctcgtacttatctttgctttcaatctctaatgatgaaagctttattgacaattctttctgcaatatatacaagaaaaatatagtattacaagaatgcattagatacagtgcatagggatataaaattattttataccttcttatcctctgatgtccttacactttccaataaagtatctatttcctctttcaacttcgaaatcactgattctgtttcagcattctttaaaaccagtccttttgcttcaaactccaatttatcaatggtctggcttgcagagcagcgtaccccagaaagttgagatattaaagattccttatcattctggagctcaactattttttcacttagctcattgcctgaagattccagagcttctttttcggcagctactctaaataactcgccctggagttgatcaaacgatctctgagcacgatctgatgcaagatctctgtcttttcgcaacaacataaagtgggtatcatataggccacttagtttatcaaacttttccttgaaggtcagattctttttgtctaattcagtcagctcagctatcaaatagtggactaattcatctagcttcttaacctcctgctctgagcggacaagtttttcaaacagttcatctgaactcaactgaacattcgtcttttctttctccaacttctcctggatactaacaaggtgtatgacctcgtcttcttttgttgttaactcaagatgtagcttttccagttgggaattcaatttttcaattttgagttttctttcagctgcggttgtttccaactctgttatcacagcatctgccacagaagaagcactcagtaagaagatacaattgttttatatcatgaaagtctttcagaaacattgctttttcccatctactgcgtggccacattttcaagctcttgaaatcatagtctagaacaagactaattcaaccatcatttttttactgcatgtgaccaatggcattgtaaatttaaaacgaaggagaaatgtacctttcttctcaatgagactggcagttccgcaccgttcagtttgatagaacatttccttgtgttgtttctcgagtttgagctcctccaattccttatctcctgcatttttaactcaaagatgttacaaacttggataccaattgcgttacaggtcaaaacatagaataatgcaacaacttactgcttgtgatttcttctttagcagcatctaatcttaaagacatgtctcgcatttgctggtttaaagagtttattgcttctgaactagtattgaatttggtctcaaaaaaacctttatccttctcagctgcagatgcaagttaggaaacagataaagcaacacagcgtatataagataattcacaaaaatcagatggctgtatgatcatttactcttaccatcctgaacttgagaagccaaatgctgcagagtctcagtaagttgatcacacagagtcttcgttgaagagaacttagattccagtcctctccacagcttctcatcttccttttgcctaactctgagcttagcattctcattaaaagcgctctgcagtttctcctctaaggcatagacatgctccattgactttttcagcttacaattctacaccattggaaaagcaaatttcctttcaaatatgtctatgccattacctcagacgaacaaaccaagagcttgaacctcccaatcacaaattatagttccaatataaacctagcaatatacgcagataatccaagctatattcataaacataaacctagcaatatacctcacatgcacatccatcgaatttaagttcctaaacacaaacaatgtataaagaaaacaggatagcttccaaattaccgccagttcgagatctgttctcatcgcagcctgatccttcaccagtttctctgttcaacaaacgtgaaattgtcggtatcatcataacagtacgatttgagagaggcggtgaaataaaacaagagaaaaacctgctgtgagtttcaaattcgagaaacttccggaggagacggaatcctgaggcggacgagtggagaagaagtacgtcttcgccgatccaggcaacgatcggagttgatcaaagctcttcatcgccggaaaccctaacttctgcatctctagatcggagatcgagaaagtaagctacaaaaatgacgaatcaatccctcgctcttggtctcacactctctcgctctcaatttcttgcgcgcgctctcgaaattgtgtgagcataaaatctgaaataaagttatttataccgatgaaggcgactcattcccccaacggtatgctgatgtcagagactcagaatatcgcaggggccacttggcatgatcaacggctgcgattgattatcaacgagctacatttcaatctgaccctgtttcttttttttggacgccatttcaatcataaaaatgggttcgtgtataataaactataaagttgtacagtttgataataatcttcacctatgtaatgataaattctgattataattaatctatacatataatctgatgaaaatatagtaaatgttgattaatattaatatagctcttcttgtttatcaaattttggtgtttaaaagagtacaagtattaaacgaaactttcaaaagtcacataaacgaactaaccatgggaccaaaactgcagacgtgcatgttaaactttgcagtcgcaaggctaagaattgcaaacaatgaagcctagaaagcctgaggtagatgctaggacatagactgagaggaaaaatcaatgtattgtggttgagactgcttattagtaggttctaaaacgcaagtacatgaacgatagaggacttagttaaactcttttgtgcaatgtatttgatatattgatctagtgaggatccatatcagtcaaaaagtagtttctgtaaatccagattgaaagactatcaacaagagttttattccttgaatcagttctgcctgcattcacgacatgaaagcatccagcacacagaaacccaaggctttggatagaatcatgaatccatcatattcaaaactagcatatatggagccataagtcgagcttgcactatatcaaccacatcttttgtaagtagtgagatttgacaaattcagatgctaagctcagtgctttatgagcaagaggatcatgatcacccataagcagaagggttaagagagaccaacaatgcaatccaaattcacaagatgcaccaataataaagaacagtgaccaactacttgaaacaatactcaaaatcagggtataaacttttttgcaatcaggcaccattctttgataaaacacaattaaaggattcaaaacgacaacaatggatgattcaaatggaatcattcaattgcatatctcactaaaaggttcacatcatcagaaacatcatagattgaaacttacaaggaaaaatctcacaatcaattaaacctcgtcttcatggagaagcatatttgggattcctttattaaccggaaacttccgtccagtctcagggcaaacaagcgcgccttcctcaaggtggagctcgagcaacgcgtggtggagtttcttaaggaagggctcatctgatttcagcaccgcggcgtccggagattcctccggtaactcagcgtatcccatggaacgcgcaccttccaccagagctttccactcaatcttcgcgaacatgtgcctgataaaatcgggattgaaatcgacttccttctcaatcacgttcccagcttcgatccgtagaggaaatccactggtgactcctttgatgttgcaggaaagcatgttgtgcgttatcaacctcatctctagtttctctcttgcttaaccctaagaggcagaagtgaagaagaaagaagacgaagaagaagctaatgcggccgagggtttttgtttttgtttcactgcgtttgattttaatctcagccgtttattgtgccacgtgactcctacgatattttttagtaaccaagtaagattcacgctattctctagcgcgtgaagcatatttcaaaattttgccgttagtcgaattaatcgacttctccggtataaaagaccaccgacgtgtttggcgctcaactttatttcagatttttttcacacaattcgagagcgcaagcaagaaattgagagcgagagcgagagacgaagagagcgatagatcgatttcgtcatctttttcatttcaattttatctccgatctagagatgcagaagttagggtttccggcgatgaagagtttggataaacctcgatcgttgtctggatcggcgaatatgtactccttctccaatcgtaagcctccggattccgtttcctccggaagtttctcgaatttgaaactcactgcaggtttttctcttgtgcatttcgttccgcttctctaaattcgactgttatgatgatttcgacaatttcacggttgtttaacagagaaactggtgaaggatcaggctgcgatgagaacagatctcgaattggcggtattttggaagctatcttgttttcttcatacattgtttgtgtttacgaacttaaattcgatggatgtgcatgtgaggtatattgctagggttgcgtttatgaaagtagttttgatctggaggtttgagatcttgttttgttcttccgaatagttagcagattcatatttcacctcaatttgaaagaaattttgcttttccatggtgtagaattgtaagctgaaaaagtcaatggaacatgtctatgccttagaggagaaactgcagaacgcttttaatgagaatgctaagctcagagttaggaaaaaggaagatgagaagctttggagaggattggagtctaagttctcttcaacaaagactctgtgtgatcaacttacagagactctgcagcatttggcttcccaagttcaggatggtaagagtaaatgatcatacagtcatcttattttgtgaaatatcttatctatgctgtgttgctttatatgtttcctaacttgcattctgcagctgagaaggataaaggtttttttgagaccaaattcagtactagttcagaagcaatagactctttaaaccagcaaatgcgagacatgtctttaagattagatgctgctaaagaagaaatcacaagcagtaagtcgttgcattattctatttatgacctgtaacgcaattggtatccaagtttgtaacatctttgagataaaaatgcaggagataaggaattggaggagctcaaactcgagaaacaacagaaggaaatgttctatcaaactgaacggtgtggaactgccagtctcattgagaagaaaggtacatttctctgtccttttgaattcacaatgccgttggtcgcatgccttagaaaaacgattgttgaattagttttgttctagactgcgatttgaagagcttgaatatgtggccacacatttctctgtgacgttcatgatttaaagcatttttgtcttcttactgagtgcttcgtctgtggcagatgctgtgataacaaaattggaagcatctgcagctgaaagaaaactcaacattgaaaacttgaattcccaactagagaaggttcatcttgagttaacaacaaaagaagacgaggtcaaagatcttgttagtatccaggagaagttggagaaagaaaagacgagtgttcagctgagtgcagataattgttttgaaaaactagtcagctcagagcaggaggttaagaagctagatgaattagtccaatacttggtagctgagctgactgaattggacaaaaagaatctgaccttcaaggaaaagtttgataaactaagtggcctatatgatactcacataatgttgctgcaaaaagacagagatcttgcattggatcgtgctcaaagatcatttgataatctccagggcgagttatttagagtagctgccacaaaagaagctctggaatctgcaggcaatgaactaaatgaaaaaatagttgagctccagaatgataaagagtctttaatatctcaactttctgggctacgctgctctacaagccagaccattgataaactggagtctgaagcaaaaggactagtttcgaaacatgctgatgcagaatcagcgatttcgcagctgaaagaagaaatggaaactttattggaaagtgtgaagacatcagaggataagaaggtataaaattattttctataaatgcactatagctaatgcatttttgcaatgttaattttttttcttgtatatcttccagcaagaattgtcattaaagctttcatcattagagatggaaagcaaagagaagtgcgagaaactgcaggcagatgcacagagacaagttgaggaactagagactttgcagaaagagagtgagagccatcagctgcaggcggatttattggcgaaagaggtgaaccagctccaaaccgtcatagaggagaaagggcatgttatcctccagtgcaatgaaaacgagaagcagttaaaccagcaaatcattaaggtctaaaaaatgacttctaagtcatggctttaaggttttaaaatcgacatttttagtactcatcaaatatgaatcccactgcaggacaaggagctactggcaactgctgaaactaagcttgcagaagcaaagaagcaatatgacctgatgctagaaagtaaacagttggaattgtcaaggcacttaaaagaattatcacagaggaacgaccaggtatatctgtagcgatgtttccatatatttagtagaataagaatcgtgaggcccttagctgaatctgaatgcaatatgcaaagacactaaagcaattaatttatctctctatgttgtttttaggcaattaatgagatcaggaggaagtatgatgtagagaagcatgagattattaattctgaaaaagacaaggtataatgactacagtatctttcgtttagtcttctgaacaattgatgatgtttattgtggttctaactccaggttgaaaaaattatcaaagatttgtccaataaatttgataaagaactctcagattgcaaagaagaatcaaagaggcaactgctgaccattcaagaggaacattcttctctggtatatctttgaaattaccttttatttaacagatcatactgtttttccacatattggtaaatcatttaacgagatttctcgaaaaggttctttacgaatctctgagctaaactaccacatcttatcctgttactgatttcatgcattgtccagtccgatactatcaatgagtgttattagattccaaagaaacctgatggttctgaccatcctcaagcatgaaggttcacagcttagaatgaatcaatcaaactgggttgagttgttagatttaataacagaaaatgaagatatctgaaatcaagttcctgttttcttgtatgcattatctggttggaagtttatttctgacacatgtcaagcaaagttcgaattattatggaaataactgagaaaaactgcattttacccagattctcagtcttcgggaggagcatgagagtaaggagctcaatctcaaagccaagtatgaccaggaactgagacaaagtcagattcaggctgaaaacgaactgaaagaggtacccacagatataaattcatagctcaaacagatgaaagaatatggagcctctggtattcaaatattttgtatatttatccagaggataacagctctgaagagtgagcatgatgctcagttgaaagcattcaagtgtcagtatgaagatgactgcaagaagcttcaagaagaattagatcttcaaaggaaaaaggtaagtgctttcttaagatccaatataagatgaatctttatgggtttaactaatgggctaaccttgcaggaagagaggcaacgagctttggtgcagttacagtggaaggtgatgagtgacaatccacctgaagagcaagaagtaaactcaaacaaggttagagtggacttcattttcttccttatctatccactttaaaatatgtttcttaaaataacagaaacagggtaataactggaaaagttgtatccgtaactagatatcgttagcattgcaatgtatggttgacagaatgtttactgttttgtagaactattcaatttcgaaagattctcgccttggtggtagcaaaagaagcgagcatataagagtgaggtctgacaatgataacgtacaggtaaactgtagagaaacaaatatatagttttgttcgttactgctttgtcaaggccacatatataaacacttcctcatggatcaaatgcaggactctccttttgtaaaggcaaaagaaacacctgtgtcaaaaatattgaagaaagctcaaaatgtaaacgcaggaagcgtactgagcattccaaatccaaagcatcatagcaaggtaaatatttgaaccttttacatctttacacttttacatcaaaatcaccctcatcgtttggtttgttgtttaacttggcaggtgacacatcgtgagtatgaagttgaaacgaataatgggagggtaaccaaacgaagaaaaacaagaaatacaaccatgtttgaggtaccttttccatcgaaacaagaaatatctggaacatattctagaaagctagcttgccactctttttcaacaggagccacaaagacgcaggactagggctacacctaaattgaccccccaaagtatcgccaaggtaaaatacaaagtcactacttttgctgatgcttgaaatgtataaacccctatcaagtaaacttagtgctgaagcagagagtaaaagagtaaatttgatgatataggaaaaacatcatactttcagaaaaggcacaatagttttttttctgtaacttgatttattctaccttatcttccttggtaataaaatagataatctgacaggtgagaataataggagctaagacttagagctgcttagccaactgttaggtctatccaagtataaatacagtgatccttgtgctatggaaagtccggcacttagaaatgtagaaatttgttttaagtcaagaagttatggatgctgctgctaggttctaaaacgtgttctgagttaattgcatattatgcagggcacaggaatgacgagtcatgctcgctctgcaaatattggagacttgttttcagaaggttctctcaacccatatgctgatgatccctatgcatttgattgaagtctacctcgcaaagtcagttcccttcactagactatctctctcactttcagaaacatactctttgtagaagctt

SEQ ID NO: 1145 - DNA, 105863 bp, Arabidopsis thaliana
gaattcatagtatatatttataaaaatgcaaattcttacatgcataaggatgaggagagaaaataaatcacaatcctaatggaacccataaattacgttaccaccctttaaacaaaactatttcataacaaaagtaaacatgcgttgtgaaataatgatatgataggcatatattaaggagtggtattagaataaagaagcgattaattgatattgagaagatagcttatcatagcttatcataatcgaatttagatgttgcattgtggtaccaaagtggtggtatatattaccttatacatatcagcatttcgcatgaaccatatatgagtattaattaggtgccatatgcagctagtctttctactacacgccacagaagtaacacgtaattaattatgtgtatcggtttatgtaatgccgtaaactatgtgtttaatgtgtccaatcacgtcttatcatctatagtatgcgtttgttctttttgcattatatgtgtattaattaggtagacactgagattcgtatgatacgttcaaccgaatcgcataactctatatgaatctaaagtccacttactcactacaattaatagtttatggtagctgttgatgcacgaatcacacaagtacgaaaatgggatctctagggaaggaagaagaatctttctattaatgacgagcccgcgacttaggcggattggacggattacaaatgatgatttcttcaacgagcataaatggagtaagaacgagccgattgtagatgaaagacgagcttgaggccggaagacgatcttccgaggaagaatagagtttattcgttttatagctgaaccttgtaaaaggttgcctacgtacccttagaaagggatcaagccacacgtagttcatattgtgataaacgagctaggccattattggaggaaggtcggcaggtaattgacgagccggcagatgtgcgacgagctggatggcttctcgagacgtgcgagtaggttagttattttgggcgggcaggtcggagagacacttcggacggacgagtaaacgagttactcaagatggatgggcagacgaggtactttggacgggtgagctgacgagctgcttgatacgggtgagctgacgagctgcttgagacgggtgagctgacgagctgcttgagacgggtgagctgacgagctgcttgagacgggtgagctgacgagctgcttgagacgaaccggctggcgggatacttcggacgggtgagctgacgagctgtttgagacggaccggctggcgggatacttcggaggggagagctgacgagctgattgagacgggtgagctgacgagctgcttgagacggaccggctggcgggatacttcggaggggagagctgacgagctgcttgagacgggtgagctgacgatctgcttgagacgggtgagctgacgagctgcttgagacggaccggctggcgggatacttcggacgggtgagctgacgagctgcttgagacgggtgagctgacgagctgtttgagacggaccggctggcgggatacttcggaggggagagctgacgagctgcttgagacgggtgagctgacgagctgcttgatacggaccggctggcgggatacttcggaggggagagctgacgagctgcttgagacgggtgagctgacgagctgcttgagacggaccggctggcgggatacttcggacgggtgagctgacgagctgctctgtgtctctgcgtgtccggcggaatccccctttgacaagacatgctattccgtatttatagccttctgcgtgtaggacactcctccaggattttgacgagcctaccctcttgacttaacattctgcttaggcctttgacttggatttgggccttgggccaagcaagcccaaatcttacccctaacagtagctgaaatggatcacaacgtacctaattccgatttctatatctagtgtacgtattgatattctttagcaatagttttggaaaatataatctgagtttagtgtactcgttggctttattacttttgaattttaataatagtctattttaaccataagtactagcatatactaaataacttgatctacacaataaaatacagaagattgattctcaaactatttctctctctctctctcacagagaatctccaatggcggctcccgtagtggtcgctcctgcgataaatcttcagcatatggacctacctgaaggaaatgaaggtaataaaaaacgattatattctcagaagcaagatataggggtagcgaatttggggtaataaagaaattgaaattgaaagtatcaagaaacattggtgagtttgggaattggaggaatgtatttaaaattagagtagatctgtgaatttgggaaatcgaggctacaatctatggaattggtaacagtgtagaaatcttagaaaagttatgatctatggaatcttagaacagtgtagaaatcgtagtacagtgttacagatctatggaatcttagaacagtgtagaaatcgtagcacagtgttacagatctatggaatcttagaatagtctcctagatctatggaatttgtacaattaaggcaagatttaaaaatttcagaataaaacagttgcttataatatatatataaatctcatatgtttggttgctatttttgacagatgtagcagctgtgcttcaaacatcaacacagcgctggctcaacgctgctgagtggagcattctttataacaaccacaacctattcccagaatcaaactcatttaccatacctattgaagtagagggactttacagagttgacaaccgctttaatcaagacagcaatacgtggagaaacacaagtgctccctccacttgcaaaaatgctatcaacttctacaatgttaggatcgccactggcttgtacaggtttgatgatgatggggacattgtgatggacgctgaagttcaaggagggtgggtcctttgcagaaaaaccgtgaggaacagaggtgggggggtacttacttttgcacactacatgtgggttttagtgtgagtaaaaactatgcttgagtaaaaactatgcttgagtaaaaactatgtttgagttgatactggaaaaatctaaacgaacttgtagtataaacttctatgcttataaacataagcccaaattagctaaatcatttttaattcatatttttaagatgctacaggtaaatgctacaggtaaagtcatagctacattatttacttcactatactatccaattgagagaataaatgatcaaaaacaaagaggcgcaaaaaaactaatattaaaatatcaagctaggaaagataaacaaagttcaaagactcagatgttaatgaaacgaatgagactgatggcccaaataatccaaatagatcctagattatatatgtcggaagactaatttcaataagtataaacacaagatatttgcggatttatattgttagactaaaatgcaaatgaagtgtgaaaaggtcaagaatatgcaacacttgcgtagtcgtataagaagacattagagtggtcatataaatgggatattaattcagagaagttttaagggtaggaaaaacaaactgtttaaacaaaaaatcatgcttaaaacatctgttacatgtaaaaaaccgagaaattaaaaccaagacaaaaaaaacagagtatgtgaacttgccttcaattgggtaaaaggctggatctgagataatctctaaaagtaaagccagatctgtaaaatataataacaaagaacagattaaattgatgaaaccggacaacacaagaagaacaatccatctttttcagatctgaagtagagatggaaaaaaaacttgccttttcctatgaacagatgactgcggatagcagatctggagaaaatatataaaaaatctcaggttaaaatcgtgaaacaagaacaaactgatcaaataagaaagaaggacataacaaaaaacttagcttttttaatgcggatctgaagcatatgggtagagagccagatagggtttgagaaatcgaagagaggtaatgattatagcagtttagtgtttctcgatggagagagagagagagagattgagttttttattttggtgagagacagagaggcggacgagtggtgtttatttggagctttctcgattaacttatttttattctgagttcctgttttacccttgtaaccctatcacatctcataaggtttcgaagacttggcttttgtcttaaaaagttctcggattctcttttttattcgaggaaacaaaacaaataataatataataatcctaattatttttctggaggagagaagccttgttttgggctggaagaatcattgaagtcactcagattagaggacttataaataagccttattgtggagattacttgggctttgttgagaacttatgaagcacatctttgtatttatttcattttgtctatatatgtagagatctatgttaagaagtttatatgcgaaataccttttaaaaaataaatcctatcaaaagtccggacactgtctttgtgttgatttactttgttctcattaggtcttgaagtgcttggatcagtttgtaatgaaaatttaccatttctattcgaaagtgaattgatggttatgagaactcgtatgacgcagtgtttattcctacatatgcatccgaagaatcgtcattcaatcataataatcttgcatctatattatgaggccattgtggtacacgtttgagtcatctctacaagcctgtcttcgatcgtcaattcaagatgctgaagattcatatgatggaagatatgattaaagatggtgaagagaagagtcttgacactttcgtgatatccaggcaacttaccactttcactgatctcacggtttgtctttctacaaggtatcaattactaagttaatctttttgtttagggctgggcatttggctcatccgtgatagttgaatttaaagtgagacttgagcacttaagaggaaaatcaattcctatagcgtaattcatctttctcgctccatcttcctttgtttttttggcatcttaaactatggtgttatcaaaatggcagttgtgcacattgctgaaagttaatcaatggtcagactataaagttaatttccttatgtctatgaagaaaacaaaaatttaatccacctttttgggatattattttgttgatcagaagcttgtttaatgataattttcttttttttttcagaaaggatcgtgtgaccattaaattgaaaacggtatatatgcttatacgatgactatactatatatgcttatacgaaaagatgactatactatacatttgtcgaattagatgcttatacgaaaagatgactatagctgagtgtaaaacctggctgcttaatatcccccacatcattaaacgttacttagatatatttctttaagtcaacaactaatgaagtaataaaagacctagaagccatgaatgaatctgcgtcaaagcatccaaaatgatggtgttctcgtactattcgcagtctatctcaattgatagcgatttcctcatcaatccagcgccacttatatccttgaccgtttcaaaaccagctccgggtcgaatcagcgagtcgggtcaacatcacctgaacagaatgttcgcgaggcggctcacttcgttcttcgaaggatcttcaacctccaggtacccaaaatgttacaattagaatctgatcgattcccctttagtagagcattaaaccatttgtccaaataacttccctcatagtctttctcctgattcggactaagttgaaacttgaagtttaggggatgattaaacctttgttgacgttagagctaagaccattggaatagatttctaatctctgtagctactactttgaccataatttctaatagttttgtttttttggtcaaccatgtcttaatcaattagggtcctggctaattgcaagtccttgattcatatgaattgtattcaagtatgcatctcgattgattgttagaatctctttatttcacaatcaatctagtctcgacttgcttatatacaagactatgtaatgtaatttctctcttgttatgtgatcagactgagtcgttatgcggcaccatcgaatcttattcacgtaagactagttctctagatgagtaattttttttggttttgtatatatttgaaaaagctcctccttgcttctttgtccttgccaggagtaatttttgattcagcaatagctaatacattacttcttagctgcctacagtctggtcttttaagtcttttatcttgtttaaagtttgaaaattggtgattttctgagttgctattgttagattgggttattccttgttggctgctctgaatatctcacttagatcccaaatatacttctgtgatataggagttttcagttttggggaagagtcgtagagatgtacatttgctgaagcttctattgaaatggcagaatcgaattcgataccttccgttgttatcaattcctctaaacagaatggtcctatcatcgtgattgataattacgacagcttcacttacaatctctgccaggtttcatttctaacacaatctcaaatcttactaggctcgttagatttttgatgtgaaagcagctgaatttgcattttgttagaaatgtattcaagtatatgcattgtgattgaatgttagaatctcattagttcacaatccaatctactttcgacttgctaatagataagactatgtaatgttgaccatctgttgttaatgtgatcagagtcgttgctatgtcgtgccatcgaatcttattgtcgaaagctcctcgttgcttgtttgtcgttgtaaggagtaattgttgatccagcaaaagctaacacatcacttctttgctgcctaaagtctggtcttttaagtagaatctttaatcatgttcaaagtttgaattggcgatttcctgagttgctatttttgactttagatttgttattcctagttgaaatatctcgctttctcatgagattttggctgctctgaatatctgacttaacgcacatagataccaaatatacaatttgatcatgtcttacttctagttctccacgcagaatagtgtcaggtgcatactatttattgtgatcgttctcttgatatggtttcttctgctttagtataaacaaaattttgagaattgctatctatttctacagtatatgggagagctacaatgccattttgaagtttaccgcaatgatgaacttacagtagaagagctgaaaaggtaagaagaaactatatgcattctgtttaaaacgtaatctggctaatcgactgatgttcattcctttatcattctctccctcttgcagaaaaaatccaagaggagtgttgatttctcctggacctggtaaatattttggcctctgaaatttctcctataattatatgctggagaagtggataacacttttcttgaatttgataggtacccctcaagactctgggatttccttgcaaactgttttggaactcggaccacttgttcctttatttggagtatgtatgggtttgcagtgtataggagaagcatttggaggttagttgcatataaacaagacatcttattttcccgtatcagtgttcaaacatggttttgttctttattctatgcatccacagcttaaatgcaattttgtttgaacattgattaggaaagattgtgcggtcaccatttggtgttatgcatgggaaaagctcaatggttcactatgatgagaaaggagaagaaggcttgttctctggattatcaaagtatgaatcaaaatcaattttttttgtgtgttgtctaatatagttaatcataagtctgtaaaaatgtgtaataaaacaaatctggttggtttcagccctttcattgtaggtagatatcacagtctcgtgatcgaaaaagatacatttcctagtgatgagctcgaggttacagcatggacagaagatggtctggttatggctgcccgtcacagaaagtacaagcatatacaggtaaaacccgcacaagtgtgtactgtaatcttattgccccctccattcaaaacagaactcttgaagtcttgtaaacattgttcacagggagttcaatttcatccggagagtattataacaactgagggcaagacaattgtccgcaatttcatcaaaatcgtagagaaaaaggattccgagaagctgacgtagactagcctgaatgagaaaatctgctgtgttcgaatagtgcctccctgtaataatatttgccaatgcaaaatgttccttgccatcttcccattgtttctatcataaaaattcgacttgttcctccacttttacttaatttgtgaaatgtggaaagcagaaagctatggttatttaagcatgcctagcgacaaaaattgccgagggtctttcagtttttatttggttcctagctaagcacctacccaaaatgtgtctagtacttctttcactacaggacgaacctgtaaaggccagatagtattcataatggtgtaagaaacacaacatacatgagatgagatcagatatcacttttcgtatatataagatatgtatgagatatgtactccataattgggactaacttagaagtaaacgcagaaacagactaacttatatgagatatgtactccataattgggctaacagtacatgaaaccatgtcatgctttgcttaaggatggtgcaagtgaacaagtgactagaacaatgctttgataaatttactagcagacgacaatgcaagaaacaaataaggtacctaaccatctcactgacgaaaagtaagaaacttaaaccatgacaagagtaagtttgagaagagaaactaaaagaggagaaagataacatggaaatgtaactgagaattgactagcagtcttgagaactgcaaggaacagaaaactaaacatgtctttctttccttttgcgctgttggttgacttgcactaaactcggaaggtaagtagacgagcagacaagcgggggacgatatgtagtcggaatatgcccggttctgggacaaggttccccgacattgggagctactcctagagtcacaggtttaaagaatccatcctttccactgataaaagcggtgtggtaacgagcgctctcggtgcttaggtatccgtctagatcgaaaaccacagcgactttctcatcctcgtcaatgaagaaggtggcacccatatcattgtcaaaccgaacaccagtgagtgccaatggtctcatatccactgtcaaaaacttgctccaggacacagagttgggctcaatactagtagtaacccaaaactcaactgtggtaaaccgatcatcactgtgaagaccctcattatgatatagcaccgcgagctgctggtctctaacacaagagagggtcacagtcgcatcgatagtagagtgaaacggaagaggcagacgcagaccaaatgtctctgttgtaaaatcaaaacagagtaagaaatcttcaagatcgattatgtcgccatcttcatcaatttcaccactgctgctatcctcatgcgcaaaaaagtaggtatttcccttcacagaaacgccgtagaggggatgattagggtccatttccccgttgggagtgacctcgagaaccctccatgaattagagcgcaagtcgtagatttcgtacctgtaaacggaaacgtttcttgtctgcaccatcctcaagattttgtggttacggttgatgtcgtatccaagagcatagctgtctcctatgttggattctgttctgggtctgatccatcttgtttgccccaaataagggttccaaaccacgaccctcgagttgtccttagccacgcataacaacaagccgtcgcagtgatacactctagatatctcgacttgattaagcaaatctacctgctttatagatagatccatcgtgtcttcttcttcctccttgctgcgacggagatggaatctaactgaacagacctttgaatccatcgtcataaaccccaaaaactgcgccgctgctttacccagaacccgatctttggttaaagcgttccataatttgcaagtggatcgcaccgctctcagagatgttatcggaatcctcgtgaggatcttctcccctaccagcttcggtggaagatcgcacatactcgttctcttcggttgaagatcgcacattctcgttctcttcggttgaagatcgcacctcctcctcctcattcttccaattttcgaccacaattgaaaattagggttctcctctctcgtaagtaattagggttcttctctcttaatacgtatcctaatacgttataatgtacaacaattataaatacgagtaaaaaaataaaaataaaaaaggagaggaatttaccttttcctaatgtgaaaaatgtatccaagtcaaattctttttcgttttaaattattttattatttttattagttctgttccattttcttttattttcagtttcaatatgttaaattggtacagagtaaaactattattgaactacaacttaagtttcaattcaatttggttttggaacagtttgatcggttaaaatgtccctatgattagtacctaaaatagtttaatgttacaaattttactgtattcacaagagtaatgatcttccattgaacaaacaaaaatcccacattggtaccatctttggataacgaatccaaaaagaaacagaaacgatcaaggcttttgcgggatatggttgacaacgagcacatactcttcagtccatggtaaggtgacgtgctaagtcagtgtgcagtgcatgacccgcctgcatttgaaagataatactattgttttcttttctcgagaaaactataagatgttttttttttttcttttttgtgcaaactataagatgttaagctagtattatttaccttatatgcgactatgtgagccacggggagtcctccatttccgccccgtgaaacaagggagaggtcaccgattaggtcaagaatcttatgtcgacatgcttcatcatcaaaccgcagaggaggattcatccatccatgctcagcgctgcattagagacagtttcagttgaatattgtgtccctttagtcatcaatatgcaagattatttacctacaaactatggcgttatccagagaacctcctttaatgagccctgcttcacgcatacgctccacctgcaaacaaaaccctcagacacagatggttgaagaacgaacaccagtttactgattccaaagctcctaagcaacaacaatggatctaactaacctcttcatagacacagaaggttcttgatgatgcgatatcctttgcaaaagaagactcatggataggtctccaagaaaaccattggcagcctatagcaggcacctgtaaagttcatcatcatacacaacagaccaagtcaataacaatttatgtacaagcagaaaataagtcaaaatgccattagactgaacctgtgggaagtcgataccacaagtgatccgagtctctagagccggaaatgcagcaacaaaagtatcgttcttgcaaacatacacaggcttgttcacatgtgcgaccatcttctctacactttcaccatcatggttttgagccgcgtttatgccaactccttgtatcgcatcgacccattctttagctgatccatcaaaaatagggacctgtcacttggttagtgttgcctacactcatcatctcctccagtgtaccaagtctataaaactaagagctacactgcacagcaagatgttgacaatctctatagcatacaaatccagtcaaaatagacaatacgagacattgattcgacctatgattactcaaaatgtatgtattcaggtaacaaacctcgacttctcgatcatcggaactttcgctctcgatttgaatcctgcaattatcaactcccttcgcctcaagagctgataacaaatgctcaacggttcggattttgagctcatctttcaacagcgtcgtgcaaagaggcgattcctgagcaaattcaatcgacgcagggatgaatctggatcgaaactcgaagaacctaccagctccggcgatctccggatttagcttcaccgtcgagaacttaccggagtgcagagattttcctttcacttccacagatcctgcgagagtttgctgtaatcgtccactctacagtattgaaccccaagacaaaaaaaacacactcaaaatgattccaatggataataaagtcgcatatacatgtaagcgtgtgcgggagagaggtttactggattcaaggagactgtcggcgacgacgcggcggaggagtatcggatccaaatgacgagaaacgacggcttagtggctttgacggtgacggggagtctcattgattcaacgtctgattaattttaaccatgcccggattattgatttaagtaagtactaggatatactaaaccggaatcaagaaacaaataatgtatagtaaaccggaatcaaaattcatgttatgcaaatatcccaattgttccaccaaaaaccattttctttgtgtgatgcttttctcaatttcacataatctccatttttgaagtcttaatcttctaattatcatcaaatctacctatataattaaaaggagaagtacaaagtaaagaatgcctaaaaaatttagaaatattacagcaattgcctctaaattatggcataaagaagcgattaattgaaattgagaagaaaacttatcataattgaaaaatctgatagttgctccaagatccacaccaaacactatgatcattcgtccctttttcttttgcctgtgataccttggtagatttgagtcaaacttggaacataataaaacatacattacagagatgatccgacttcaaaacccacttgtttcactttgttgtcctctccaaaaatgtgtaccgtggtttttccttggtctctaatattatcacaacacacgaccactctcttcttctcgtcgaccaagaaacttccgctttccccaatacaacgtttaggctgcaaatccaaagctaagaccatgctccacgacaccacttgtgtctcaccaatcttatttgtcacccatatttctgcctttgatttaattccgcgttgcgataacatggaaagtttctcttctctaacaacggatagagccagagttgcataacaaggatacttattcggaagacatagacgttcaaatctttctgtcgtataatcaaaactgattaagaatttgccaagccgtttctcttcttcaccactagcaatccagtaagtctttcccttcaaagacacgccacgaccaatataccctaatttgaagtccaaagtggcatcaataatcctccatgaattggagttaatttcataaatttggaattcgtggtcgtagccaaaaccagtgtgtgccaatatattgtagctattattttggtaggatccgagagtatagttgtcatataagtcatgggttgaatccaccttgtttgaccagtacacgggttccataccgcgagccaagtattgtcctccttggtgacgcagacgcataacaataagccgtcgcagtgagagactttatatatctcgaattgatcttgatctagacaactaggatatttagggttgattagggtaaattcaactgtgacttttacatgtggaagtctatggagatcgacactcatcgagcgtaccctaagccctttagacatgtgaatcagaaactgctttgggcctttatccaagtgttttcttgtgaatctcctatccttgaataaacagttccatcctttgcaagtagaccctaactgtttcaaagacatagctggaacgcggtagagtatctcttctaacaaatgctctggaagttccgacatcattgtcgtttgatcaaatgttggttagggttttgtatagtacttcacgtttatataaatccatgctcaggcgacgaacaatttaagttacttttacggcaagtcaacactctttaattcgtttcctataaaaagcgtctttcttattctcttcaatcttcaatatatgaaagagctgaggaatatggaaatgaaagacccgaaaaaatggaatatgcacattatgacaaatcactatgtaaatgtttgatttacttagtgaaaagtgcaacatcttaacttaataaaattatcttataccatcttaactatttttttttagttttattttcttttaggattatgcttcgtttaattaaattgttcacactgtaaggttggactgaattcatagtatatatttataaaaatgcaaattcttacatgcataaggatgaggagagaaaataaatcacaatcctaatggaacccataaattacgttaccaccctttaaacaaaactatttcataacaaaagtaaacatgcgttgtgaaataatgatatgataggcatatattaaggagtggtattagaataaagaagcgattaattgatattgagaagatagcttatcatagcttatcataatcgaatttagatgttgcattgtggtaccaaagtggtggtatatattaccttatacatatcagcatttcgcatgaaccatatatgagtattaattaggtgccatatgcagctagtctttctactacacgccacagaagtaacacgtaattaattatgtgtatcggtttatgtaatgccgtaaactatgtgtttaatgtgtccaatcacgtcttatcatctatagtatgcgtttgttctttttgcattatatgtgtattaattaggtagacactgagattcgtatgatacgttcaaccgaatcgcataactctatatgaatctaaagtccacttactcactacaattaatagtttatggtagctgttgatgcacgaatcacacaagtacgaaaatgggatctctagggaaggaagaagaatctttctattaatgacgagcccgcgacttaggcggattggacggattacaaatgatgatttcttcaacgagcataaatggagtaagaacgagccgattgtagatgaaagacgagcttgaggccggaagacgatcttccgaggaagaatagagtttattcgttttatagctgaaccttgtaaaaggttgcctacgtacccttagaaagggatcaagccacacgtagttcatattgtgataaacgagctaggccattattggaggaaggtcggcaggtaattgacgagccggcagatgtgcgacgagctggatggcttctcgagacgtgcgagtaggttagttattttgggcgggcaggtcggagagacacttcggacggacgagtaaacgagttactcaagatggatgggcagacgaggtactttggacgggtgagctgacgagctgcttgatacgggtgagctgacgagctgcttgagacgggtgagctgacgagctgcttgagacgggtgagctgacgagctgcttgagacgggtgagctgacgagctgcttgagacgaaccggctggcgggatacttcggacgggtgagctgacgagctgtttgagacggaccggctggcgggatacttcggaggggagagctgacgagctgattgagacgggtgagctgacgagctgcttgagacggaccggctggcgggatacttcggaggggagagctgacgagctgcttgagacgggtgagctgacgatctgcttgagacgggtgagctgacgagctgcttgagacggaccggctggcgggatacttcggacgggtgagctgacgagctgcttgagacgggtgagctgacgagctgtttgagacggaccggctggcgggatacttcggaggggagagctgacgagctgcttgagacgggtgagctgacgagctgcttgatacggaccggctggcgggatacttcggaggggagagctgacgagctgcttgagacgggtgagctgacgagctgcttgagacggaccggctggcgggatacttcggacgggtgagctgacgagctgctctgtgtctctgcgtgtccggcggaatccccctttgacaagacatgctattccgtatttatagccttctgcgtgtaggacactcctccaggattttgacgagcctaccctcttgacttaacattctgcttaggcctttgacttggatttgggccttgggccaagcaagcccaaatcttacccctaacagtagctgaaatggatcacaacgtacctaattccgatttctatatctagtgtacgtattgatattctttagcaatagttttggaaaatataatctgagtttagtgtactcgttggctttattacttttgaattttaataatagtctattttaaccataagtactagcatatactaaataacttgatctacacaataaaatacagaagattgattctcaaactatttctctctctctctctcacagagaatctccaatggcggctcccgtagtggtcgctcctgcgataaatcttcagcatatggacctacctgaaggaaatgaaggtaataaaaaacgattatattctcagaagcaagatataggggtagcgaatttggggtaataaagaaattgaaattgaaagtatcaagaaacattggtgagtttgggaattggaggaatgtatttaaaattagagtagatctgtgaatttgggaaatcgaggctacaatctatggaattggtaacagtgtagaaatcttagaaaagttatgatctatggaatcttagaacagtgtagaaatcgtagtacagtgttacagatctatggaatcttagaacagtgtagaaatcgtagcacagtgttacagatctatggaatcttagaatagtctcctagatctatggaatttgtacaattaaggcaagatttaaaaatttcagaataaaacagttgcttataatatatatataaatctcatatgtttggttgctatttttgacagatgtagcagctgtgcttcaaacatcaacacagcgctggctcaacgctgctgagtggagcattctttataacaaccacaacctattcccagaatcaaactcatttaccatacctattgaagtagagggactttacagagttgacaaccgctttaatcaagacagcaatacgtggagaaacacaagtgctccctccacttgcaaaaatgctatcaacttctacaatgttaggatcgccactggcttgtacaggtttgatgatgatggggacattgtgatggacgctgaagttcaaggagggtgggtcctttgcagaaaaaccgtgaggaacagaggtgggggggtacttacttttgcacactacatgtgggttttagtgtgagtaaaaactatgcttgagtaaaaactatgcttgagtaaaaactatgtttgagttgatactggaaaaatctaaacgaacttgtagtataaacttctatgcttataaacataagcccaaattagctaaatcatttttaattcatatttttaagatgctacaggtaaatgctacaggtaaagtcatagctacattatttacttcactatactatccaattgagagaataaatgatcaaaaacaaagaggcgcaaaaaaactaatattaaaatatcaagctaggaaagataaacaaagttcaaagactcagatgttaatgaaacgaatgagactgatggcccaaataatccaaatagatcctagattatatatgtcggaagactaatttcaataagtataaacacaagatatttgcggatttatattgttagactaaaatgcaaatgaagtgtgaaaaggtcaagaatatgcaacacttgcgtagtcgtataagaagacattagagtggtcatataaatgggatattaattcagagaagttttaagggtaggaaaaacaaactgtttaaacaaaaaatcatgcttaaaacatctgttacatgtaaaaaaccgagaaattaaaaccaagacaaaaaaaacagagtatgtgaacttgccttcaattgggtaaaaggctggatctgagataatctctaaaagtaaagccagatctgtaaaatataataacaaagaacagattaaattgatgaaaccggacaacacaagaagaacaatccatctttttcagatctgaagtagagatggaaaaaaaacttgccttttcctatgaacagatgactgcggatagcagatctggagaaaatatataaaaaatctcaggttaaaatcgtgaaacaagaacaaactgatcaaataagaaagaaggacataacaaaaaacttagcttttttaatgcggatctgaagcatatgggtagagagccagatagggtttgagaaatcgaagagaggtaatgattatagcagtttagtgtttctcgatggagagagagagagagagattgagttttttattttggtgagagacagagaggcggacgagtggtgtttatttggagctttctcgattaacttatttttattctgagttcctgttttacccttgtaaccctatcacatctcataaggtttcgaagatttggcttttgtcttaaaaagttctcggattctcttttttattcgaggaaacaaaacaaataataatataataatcctaattatttttctggaggagagaagccttgttttgggctggaagaatcattgaagtcactcagattagaggacttataaataagccttattgtggagattacttgggctttgttgagaacttatgaagcacatctttgtatttatttcattttgtctatatatgtagagatctatgttaagaagtttatatgcgaaataccttttaaaaaataaatcctatcaaaagtccggacactgtctttgtgttgatttactttgttctcattaggtcttgaagtgcttggatcagtttgtaatgaaaatttaccatttctattcgaaagtgaattgatggttatgagaactcgtatgacgcagtgtttattcctacatatgcatccgaagaatcgtcattcaatcataataatcttgcatctatattatgaggccattgtggtacacgtttgagtcatctctacaagcctgtcttcgatcgtcaattcaagatgctgaagattcatatgatggaagatatgattaaagatggtgaagagaagagtcttgacactttcgtgatatccaggcaacttaccactttcactgatctcacggtttgtctttctacaaggtatcaattactaagttaatctttttgtttagggctgggcatttggctcatccgtgatagttgaatttaaagtgagacttgagcacttaagaggaaaatcaattcctatagcgtaattcatctttctcgctccatcttcctttgtttttttggcatcttaaactatggtgttatcaaaatggcagttgtgcacattgctgaaagttaatcaatggtcagactgtaaagttaatttccttatgtctatgaagaaaacaaaaatttaatccacctttttgggatattattttgttgatcagaagcttgtttaatgataatttttttttttttttcagaaaggatcgtgtgaccattaaattgaaaacggtatatatgcttatacgatgactatactatatatgcttatacgaaaagatgactatactatacatttgtcgaattagatgcttatacgaaaagatgactatagctgagtgtaaaacctggctgcttaatatcccccacatcattaaacgttacttagatatatttctttaagtcaacaactaatgaagtaataaaagacctagaagccatgaatgaatctgcgtcaaagcatccaaaatgatggtgttctcgtactattcgcagtctatctcaattgatagcgatttcctcatcaatccagcgccacttatatccttgaccgtttcaaaaccagctccgggtcgaatcagcgagtcgggtcaacatcacctgaacagaatgttcgcgaggcggctcacttcgttcttcgaaggatcttcaacctccaggtacccaaaatgttacaattagaatctgatcgattcccctttagtagagcattaaaccatttgtccaaataacttccctcatagtctttctcctgattcggactaagttgaaacttgaagtttaggggatgattaaacctttgttgacgttagagctaagaccattggaatagatttctaatctctgtagctactactttgaccataatttctaatagttttgtttttttggtcaaccatgtcttaatcaattagggtcctggctaattgcaagtccttgattcatatgaattgtattcaagtatgcatctcgattgattgttagaatctctttatttcacaatcaatctagtctcgacttgcttatatacaagactatgtaatgtaatttctctcttgttatgtgatcagactgagtcgttatgcggcaccatcgaatcttattcacgtaagactagttctctagatgagtaattttttttggttttgtatatatttgaaaaagctcctccttgcttctttgtccttgccaggagtaatttttgattcagcaatagctaatacattacttcttagctgcctacagtctggtcttttaagtcttttatcttgtttaaagtttgaaaattggtgattttctgagttgctattgttagattgggttattccttgttggctgctctgaatatctcacttagatcccaaatatacttctgtgatataggagttttcagttttggggaagagtcgtagagatgtacatttgctgaagcttctattgaaatggcagaatcgaattcgataccttccgttgttatcaattcctctaaacagaatggtcctatcatcgtgattgataattacgacagcttcacttacaatctctgccaggtttcatttctaacacaatctcaaatcttactaggctcgttagatttttgatgtgaaagcagctgaatttgcattttgttagaaatgtattcaagtatatgcattgtgattgaatgttagaatctcattagttcacaatccaatctactttcgacttgctaatagataagactatgtaatgttgaccatctgttgttaatgtgatcagagtcgttgctatgtcgtgccatcgaatcttattgtcgaaagctcctcgttgcttgtttgtcgttgtaaggagtaattgttgatccagcaaaagctaacacatcacttctttgctgcctaaagtctggtcttttaagtagaatctttaatcatgttcaaagtttgaattggcgatttcctgagttgctatttttgactttagatttgttattcctagttgaaatatctcgctttctcatgagattttggctgctctgaatatctgacttaacgcacatagataccaaatatacaatttgatcatgtcttacttctagttctccacgcagaatagtgtcaggtgcatactatttattgtgatcgttctcttgatatggtttcttctgctttagtataaacaaaattttgagaattgctatctatttctacagtatatgggagagctacaatgccattttgaagtttaccgcaatgatgaacttacagtagaagagctgaaaaggtaagaagaaactatatgcattctgtttaaaacgtaatctggctaatcgactgatgttcattcctttatcattctctccctcttgcagaaaaaatccaagaggagtgttgatttctcctggacctggtaaatattttggcctctgaaatttctcctataattatatgctggagaagtggataacacttttcttgaatttgataggtacccctcaagactctgggatttccttgcaaactgttttggaactcggaccacttgttcctttatttggagtatgtatgggtttgcagtgtataggagaagcatttggaggttagttgcatataaacaagacatcttattttcccgtatcagtgttcaaacatggttttgttctttattctatgcatccacagcttaaatgcaattttgtttgaacattgattaggaaagattgtgcggtcaccatttggtgttatgcatgggaaaagctcaatggttcactatgatgagaaaggagaagaaggcttgttctctggattatcaaagtatgaatcaaaatcaattttttttgtgtgttgtctaatatagttaatcataagtctgtaaaaatgtgtaataaaacaaatctggttggtttcagccctttcattgtaggtagatatcacagtctcgtgatcgaaaaagatacatttcctagtgatgagctcgaggttacagcatggacagaagatggtctggttatggctgcccgtcacagaaagtacaagcatatacaggtaaaacccgcacaagtgtgtactgtaatcttattgccccctccattcaaaacagaactcttgaagtcttgtaaacattgttcacagggagttcaatttcatccggagagtattataacaactgagggcaagacaattgtccgcaatttcatcaaaatcgtagagaaaaaggattccgagaagctgacgtagactagcctgaatgagaaaatctgctgtgttcgaatagtgcctccctgtaataatatttgccaatgcaaaatgttccttgccatcttcccattgtttctatcataaaaattcgacttgttcctccacttttacttaatttgtgaaatgtggaaagcagaaagctatggttatttaagcatgcctagcgacaaaaattgccgagggtctttcagtttttatttggttcctagctaagcacctacccaaaatgtgtctagtacttctttcactacaggacgaacctgtaaaggccagatagtattcataatggtgtaagaaacacaacatacatgagatgagatcagatatcacttttcgtatatataagatatgtatgagatatgtactccataattgggactaacttagaagtaaacgcagaaacagactaacttatatgagatatgtactccataattgggctaacagtacatgaaaccatgtcatgctttgcttaaggatggtgcaagtgaacaagtgactagaacaatgctttgataaatttactagcagacgacaatgcaagaaacaaataaggtacctaaccatctcactgacgaaaagtaagaaacttaaaccatgacaagagtaagtttgagaagagaaactaaaagaggagaaagataacatggaaatgtaactgagaattgactagcagtcttgagaactgcaaggaacagaaaactaaacatgtctttctttccttttgcgctgttggttgacttgcactaaactcggaaggtaagtagacgagcagacaagcgggggacgatatgtagtcggaatatgcccggttctgggacaaggttccccgacattgggagctactcctagagtcacaggtttaaagaatccatcctttccactgataaaagcggtgtggtaacgagcgctctcggtgcttaggtatccgtctagatcgaaaaccacagcgactttctcatcctcgtcaatgaagaaggtggcacccatatcattgtcaaaccgaacaccagtgagtgccaatggtctcatatccactgtcaaaaacttgctccaggacacagagttgggctcaatactagtagtaacccaaaactcaactgtggtaaaccgatcatcactgtgaagaccctcattatgatatagcaccgcgagctgctggtctctaacacaagagagggtcacagtcgcatcgatagtagagtgaaacggaagaggcagacgcagaccaaatgtctctgttgtaaaatcaaaacagagtaagaaatcttcaagatcgattatgtcgccatcttcatcaatttcaccactgctgctatcctcatgcgcaaaaaagtaggtatttcccttcacagaaacgccgtagaggggatgattagggtccatttccccgttgggagtgacctcgagaaccctccatgaattagagcgcaagtcgtagatttcgtacctgtaaacggaaacgtttcttgtctgcaccatcctcaagattttgtggttacggttgatgtcgtatccaagagcatagctgtctcctatgttggattctgttctgggtctgatccatcttgtttgccccaaataagggttccaaaccacgaccctcgagttgtccttagccacgcataacaacaagccgtcgcagtgatacactctagatatctcgacttgattaagcaaatctacctgctttatagatagatccatcgtgtcttcttcttcctccttgctgcgacggagatggaatctaactgaacagacctttgaatccatcgtcataaaccccaaaaactgcgccgctgctttacccagaacccgatctttggttaaagcgttccataatttgcaagtggatcgcaccgctctcagagatgttatcggaatcctcgtgaggatcttctcccctaccagcttcggtggaagatcgcacatactcgttctcttcggttgaagatcgcacattctcgttctcttcggttgaagatcgcacctcctcctcctcattcttccaattttcgaccacaattgaaaattagggttctcctctctcgtaagtaattagggttcttctctcttaatacgtatcctaatacgttataatgtacaacaattataaatacgagtaaaaaaataaaaataaaaaaggagaggaatttaccttttcctaatgtgaaaaatgtatccaagtcaaattctttttcgttttaaattattttattatttttattagttctgttccattttcttttattttcagtttcaatatgttaaattggtacagagtaaaactattattgaactacaacttaagtttcaattcaatttggttttggaacagtttgatcggttaaaatgtccctatgattagtacctaaaatagtttaatgttacaaattttactgtattcacaagagtaatgatcttccattgaacaaacaaaaatcccacattggtaccatctttggataacgaatccaaaaagaaacagaaacgatcaaggcttttgcgggatatggttgacaacgagcacatactcttcagtccatggtaaggtgacgtgctaagtcagtgtgcagtgcatgacccgcctgcatttgaaagataatactattgttttcttttctcgagaaaactataagatgttttttttttttcttttttgtgcaaactataagatgttaagctagtattatttaccttatatgcgactatgtgagccacggggagtcctccatttccgccccgtgaaacaagggagaggtcaccgattaggtcaagaatcttatgtcgacatgcttcatcatcaaaccgcagaggaggattcatccatccatgctcagcgctgcattagagacagtttcagttgaatattgtgtccctttagtcatcaatatgcaagattatttacctacaaactatggcgttatccagagaacctcctttaatgagccctgcttcacgcatacgctccacctgcaaacaaaaccctcagacacagatggttgaagaacgaacaccagtttactgattccaaagctcctaagcaacaacaatggatctaactaacctcttcatagacacagaaggttcttgatgatgcgatatcctttgcaaaagaagactcatggataggtctccaagaaaaccattggcagcctatagcaggcacctgtaaagttcatcatcatacacaacagaccaagtcaataacaatttatgtacaagcagaaaataagtcaaaatgccattagactgaacctgtgggaagtcgataccacaagtgatccgagtctctagagccggaaatgcagcaacaaaagtatcgttcttgcaaacatacacaggcttgttcacatgtgcgaccatcttctctacactttcaccatcatggttttgagccgcgtttatgccaactccttgtatcgcatcgacccattctttagctgatccatcaaaaatagggacctgtcacttggttagtgttgcctacactcatcatctcctccagtgtaccaagtctataaaactaagagctacactgcacagcaagatgttgacaatctctatagcatacaaatccagtcaaaatagacaatacgagacattgattcgacctatgattactcaaaatgtatgtattcaggtaacaaacctcgacttctcgatcatcggaactttcgctctcgatttgaatcctgcaattatcaactcccttcgcctcaagagctgataacaaatgctcaacggttcggattttgagctcatctttcaacagcgtcgtgcaaagaggcgattcctgagcaaattcaatcgacgcagggatgaatctggatcgaaactcgaagaacctaccagctccggcgatctccggatttagcttcaccgtcgagaacttaccggagtgcagagattttcctttcacttccacagatcctgcgagagtttgctgtaatcgtccactctacagtattgaaccccaagacaaaaaaaacacactcaaaatgattccaatggataataaagtcgcatatacatgtaagcgtgtgcgggagagaggtttactggattcaaggagactgtcggcgacgacgcggcggaggagtatcggatccaaatgacgagaaacgacggcttagtggctttgacggtgacggggagtctcattgattcaacgtctgattaattttaaccatgcccggattattgatttaagtaagtactaggatatactaaaccggaatcaagaaacaaataatgtatagtaaaccggaatcaaaattcatgttatgcaaatatcccaattgttccaccaaaaaccattttctttgtgtgatgcttttctcaatttcacataatctccatttttgaagtcttaatcttctaattatcatcaaatctacctatataattaaaaggagaagtacaaagtaaagaatgcctaaaaaatttagaaatattacagcaattgcctctaaattatggcataaagaagcgattaattgaaattgagaagaaaacttatcataattgaaaaatctgatagttgctccaagatccacaccaaacactatgatcattcgtccctttttcttttgcctgtgataccttggtagatttgagtcaaacttggaacataataaaacatacattacagagatgatccgacttcaaaacccacttgtttcactttgttgtcctctccaaaaatgtgtaccgtggtttttccttggtctctaatattatcacaacacacgaccactctcttcttctcgtcgaccaagaaacttccgctttccccaatacaacgtttaggctgcaaatccaaagctaagaccatgctccacgacaccacttgtgtctcaccaatcttatttgtcacccatatttctgcctttgatttaattccgcgttgcgataacatggaaagtttctcttctctaacaacggatagagccagagttgcataacaaggatacttattcggaagacatagacgttcaaatctttctgtcgtataatcaaaactgattaagaatttgccaagccgtttctcttcttcaccactagcaatccagtaagtctttcccttcaaagacacgccacgaccaatataccctaatttgaagtccaaagtggcatcaataatcctccatgaattggagttaatttcataaatttggaattcgtggtcgtagccaaaaccagtgtgtgccaatatattgtagctattattttggtaggatccgagagtatagttgtcatataagtcatgggttgaatccaccttgtttgaccagtacacgggttccataccgcgagccaagtattgtcctccttggtgacgcagacgcataacaataagccgtcgcagtgagagactttatatatctcgaattgatcttgatctagacaactaggatatttagggttgattagggtaaattcaactgtgacttttacatgtggaagtctatggagatcgacactcatcgagcgtaccctaagccctttagacatgtgaatcagaaactgctttgggcctttatccaagtgttttcttgtgaatctcctatccttgaataaacagttccatcctttgcaagtagaccctaactgtttcaaagacatagctggaacgcggtagagtatctcttctaacaaatgctctggaagttccgacatcattgtcgtttgatcaaatgttggttagggttttgtatagtacttcacgtttatataaatccatgctcaggcgacgaacaatttaagttacttttacggcaagtcaacactctttaattcgtttcctataaaaagcgtctttcttattctcttcaatcttcaatatatgaaagagctgaggaatatggaaatgaaagacccgaaaaaatggaatatgcacattatgacaaatcactatgtaaatgtttgatttacttagtgaaaagtgcaacatcttaacttaataaaattatcttataccatcttaactatttttttttagttttattttcttttaggattatgcttcgtttaattaaattgttcacactgtaaggttggactgaattcatagtatatatttataaaaatgcaaattcttacatgcataaggatgaggagagaaaataaatcacaatcctaatggaacccataaattacgttaccaccctttaaacaaaactatttcataacaaaagtaaacatgcgttgtgaaataatgatatgataggcatatattaaggagtggtattagaataaagaagcgattaattgatattgagaagatagcttatcatagcttatcataatcgaatttagatgttgcattgtggtaccaaagtggtggtatatattaccttatacatatcagcatttcgcatgaaccatatatgagtattaattaggtgccatatgcagctagtctttctactacacgccacagaagtaacacgtaattaattatgtgtatcggtttatgtaatgccgtaaactatgtgtttaatgtgtccaatcacgtcttatcatctatagtatgcgtttgttctttttgcattatatgtgtattaattaggtagacactgagattcgtatgatacgttcaaccgaatcgcataactctatatgaatctaaagtccacttactcactacaattaatagtttatggtagctgttgatgcacgaatcacacaagtacgaaaatgggatctctagggaaggaagaagaatctttctattaatgacgagcccgcgacttaggcggattggacggattacaaatgatgatttcttcaacgagcataaatggagtaagaacgagccgattgtagatgaaagacgagcttgaggccggaagacgatcttccgaggaagaatagagtttattcgttttatagctgaaccttgtaaaaggttgcctacgtacccttagaaagggatcaagccacacgtagttcatattgtgataaacgagctaggccattattggaggaaggtcggcaggtaattgacgagccggcagatgtgcgacgagctggatggcttctcgagacgtgcgagtaggttagttattttgggcgggcaggtcggagagacacttcggacggacgagtaaacgagttactcaagatggatgggcagacgaggtactttggacgggtgagctgacgagctgcttgatacgggtgagctgacgagctgcttgagacgggtgagctgacgagctgcttgagacgggtgagctgacgagctgcttgagacgggtgagctgacgagctgcttgagacgaaccggctggcgggatacttcggacgggtgagctgacgagctgtttgagacggaccggctggcgggatacttcggaggggagagctgacgagctgattgagacgggtgagctgacgagctgcttgagacggaccggctggcgggatacttcggaggggagagctgacgagctgcttgagacgggtgagctgacgatctgcttgagacgggtgagctgacgagctgcttgagacggaccggctggcgggatacttcggacgggtgagctgacgagctgcttgagacgggtgagctgacgagctgtttgagacggaccggctggcgggatacttcggaggggagagctgacgagctgcttgagacgggtgagctgacgagctgcttgatacggaccggctggcgggatacttcggaggggagagctgacgagctgcttgagacgggtgagctgacgagctgcttgagacggaccggctggcgggatacttcggacgggtgagctgacgagctgctctgtgtctctgcgtgtccggcggaatccccctttgacaagacatgctattccgtatttatagccttctgcgtgtaggacactcctccaggattttgacgagcctaccctcttgacttaacattctgcttaggcctttgacttggatttgggccttgggccaagcaagcccaaatcttacccctaacagtagctgaaatggatcacaacgtacctaattccgatttctatatctagtgtacgtattgatattctttagcaatagttttggaaaatataatctgagtttagtgtactcgttggctttattacttttgaattttaataatagtctattttaaccataagtactagcatatactaaataacttgatctacacaataaaatacagaagattgattctcaaactatttctctctctctctctcacagagaatctccaatggcggctcccgtagtggtcgctcctgcgataaatcttcagcatatggacctacctgaaggaaatgaaggtaataaaaaacgattatattctcagaagcaagatataggggtagcgaatttggggtaataaagaaattgaaattgaaagtatcaagaaacattggtgagtttgggaattggaggaatgtatttaaaattagagtagatctgtgaatttgggaaatcgaggctacaatctatggaattggtaacagtgtagaaatcttagaaaagttatgatctatggaatcttagaacagtgtagaaatcgtagtacagtgttacagatctatggaatcttagaacagtgtagaaatcgtagcacagtgttacagatctatggaatcttagaatagtctcctagatctatggaatttgtacaattaaggcaagatttaaaaatttcagaataaaacagttgcttataatatatatataaatctcatatgtttggttgctatttttgacagatgtagcagctgtgcttcaaacatcaacacagcgctggctcaacgctgctgagtggagcattctttataacaaccacaacctattcccagaatcaaactcatttaccatacctattgaagtagagggactttacagagttgacaaccgctttaatcaagacagcaatacgtggagaaacacaagtgctccctccacttgcaaaaatgctatcaacttctacaatgttaggatcgccactggcttgtacaggtttgatgatgatggggacattgtgatggacgctgaagttcaaggagggtgggtcctttgcagaaaaaccgtgaggaacagaggtgggggggtacttacttttgcacactacatgtgggttttagtgtgagtaaaaactatgcttgagtaaaaactatgcttgagtaaaaactatgtttgagttgatactggaaaaatctaaacgaacttgtagtataaacttctatgcttataaacataagcccaaattagctaaatcatttttaattcatatttttaagatgctacaggtaaatgctacaggtaaagtcatagctacattatttacttcactatactatccaattgagagaataaatgatcaaaaacaaagaggcgcaaaaaaactaatattaaaatatcaagctaggaaagataaacaaagttcaaagactcagatgttaatgaaacgaatgagactgatggcccaaataatccaaatagatcctagattatatatgtcggaagactaatttcaataagtataaacacaagatatttgcggatttatattgttagactaaaatgcaaatgaagtgtgaaaaggtcaagaatatgcaacacttgcgtagtcgtataagaagacattagagtggtcatataaatgggatattaattcagagaagttttaagggtaggaaaaacaaactgtttaaacaaaaaatcatgcttaaaacatctgttacatgtaaaaaaccgagaaattaaaaccaagacaaaaaaaacagagtatgtgaacttgccttcaattgggtaaaaggctggatctgagataatctctaaaagtaaagccagatctgtaaaatataataacaaagaacagattaaattgatgaaaccggacaacacaagaagaacaatccatctttttcagatctgaagtagagatggaaaaaaaacttgccttttcctatgaacagatgactgcggatagcagatctggagaaaatatataaaaaatctcaggttaaaatcgtgaaacaagaacaaactgatcaaataagaaagaaggacataacaaaaaacttagcttttttaatgcggatctgaagcatatgggtagagagccagatagggtttgagaaatcgaagagaggtaatgattatagcagtttagtgtttctcgatggagagagagagagagagagattgagttttttattttggtgagagacagagaggcggacgagtggtgtttatttggagctttctcgattaacttatttttattctgagttcctgttttacccttgtaaccctatcacatctcataaggtttcgaagacttggcttttgtcttaaaaagttctcggattctcttttttattcgaggaaacaaaacaaataataatataataatcctaattatttttctggaggagagaagccttgttttgggctggaagaatcattgaagtcactcagttattatcactatccaattttctattatcttatgtgtaaaatatttcagttcttataattagttattgctgaaacatatcctgattgtatcacaaacatctgcaataccgtttgcttatccataaagccatatccatatggagatgtttttttaacagttaaagtagttctaatccattttgagtacttgtatttgtttcaaaaactcctacaattgtgttgactcctcgtgatgacgaattcatggaggaattggaacaagcagaagcaaacataggaagtaacagtgggcataaatcgtcacggaatgatactgataacgaaggttttaacaatgatgttgaaaagttgtttttcgttgataacgatacagaggaagttgaagcagtcacggaaaaacctgaagatagtatgccctgtggcggttatgataaggagttttggtcaaatttcttaacagatgattatggtggctccaatgctaatgagttgatggcaacaggaggtttagatgtaaggtacgggtctaacaataaggttgtgggctccaatccggatgaagtggttttctgtactggcagcggagtctttgatcacgctatatatgtgaatggggctggcgaaagtataaagacagagcatacaaaaaagaccccacaagttatgaaaggaaagatggtcggtggagttggaagctctcaggaaacgagtaatgaggtcaaaaagttggaggaagtggatgacgaggagtttgacatcccacctttgtttgaggacatcgagtatgaagttgataacttacctgatttggacattgatgatgatggtaaaggtatataccagggaaaagtgtatgcgagcaaagaagattgccaaataggattggctatatttgcgataaagaatcagtttcatttcaagcaaacaagaacaaaatggaattattttgttctcagttgctcagatgagaaatgtgattggagaatattggccactgtaatgaatggcacaggttactatgaaattaagaaagcgcagcttcaacacacatgttcggttgatactagaaggcagtacatgaagaaagcaacgtcaaaggtgattgcatctgtatttaaggcaaaatacagtgaagcttctgctggtcctgttccaatggatcttcagcaacttgtactagaagatttgagggtttctgcgtcatacaaaaagtgttggagagctagggaatcagctttaacagatgttggcgggagtgatgaagagtcttatagcaatttggctgaatatttgcatcttctgaagttaacaaatctagggacgataacacatatagaaaccgaacctgatattgaagatgaaaggaaagagaggtttttatatatgttttagcttttggggcttcaatacaaggttttaagcatctgagaaggattttgggtgtggatggaacacatttgaaaggaaaatacaagggggtttactcacagcaagtggtcaagatgcaaacttccaagtgtatccactcgcatttgctgtggtggatagtgagaacgatgatgcatggacttggttctttacaaagttggagaggataatagctgacagcaacacactcactatattatcagataggcacgaatcgataaaggtaggggtgaagaaggtatttccgcaagcacatcatggtgcatgtattattcacctatgtaggaatatacaagcaaggttcaagaacagaggattgacgcagttagtgaaaaacgctggatatgagtttacgagtggaaagtttaaaacgctttataatcagattaatgccattaaccccctttgcataaagtatctacacgacgtagggatggctcattggacaaggctatatttccctggccagcgtttcaatctgatgactagcaatattgctgaaacgttaaacaaggcgttgttcaaggggagatcgtcacatattgtggaattgctaagatttattaggtctatgttgacacgttggttcaacgcgcgtcggaagaagtcacaagcacattcaggtccagtacctccggaggttgacaagcaaatttcaaaaaacttgacaacatcaagtggaagcaaggttggtagggtaaccagctggagctacgaggtagttgggaagctaggtggtagcaatgttgttgatctagaaaagaagcagtgcacctgcaagagatatgataaactgaagataccatgtggtcatgctttggtggctgccaatagcattaacctctcgtacaaggctttagttgatgattatttcaaaccacactcatgggttgcgagttacaaaggagcagtattccctgaagcaaatggcaaagaagaagacatacccgaagagatcccacaccgttccatgcttccaccatatactcggagaccatcagggaggcctaaggtagcaagaataccatcaacaggggaatataaggttagataaatattttgtaaatctcgtacattgtctaatcttttgaaaaactaaccaaactaatgcaacatgttggttaacatggtaaacgtagaaacctaagacaggaaggacgcagcagaacaggtgctcacgctgcaaaggattgggtcataacaggacaagttgttctaatccaatttgaattaatatatgtatgatgattaagtagttgctatttttttttgtaaaatatttcagttcttattgtaaaactagttgctatgttgtttgtaaaatatttcagttcttataattagttattgctgaaacatatcttgattgtatcgcaaacctctgcaataccgtttgcttatccataaagccgtatccatatggagatgctttttaataggtaatgtagttctaatccattttgagtacttgtagttgatttttttagattgggtcataacaggacaagttgatctaatccaatgagaaattttatttttgaatttaagttgttaattaatgtatgatctgtaactagtttccatgtttttgtaaaatatttcatttcttattgtaagatattcccataaatgttttttcgtttctgtaaacctagttcttgatgtaccaaatataagtatatatgtttatttattgtgttaaaatagtctataattagcatatcttgctaaaccgcaagtctgtgcaatcccgtttaactatccacaaactcttatccatatggagatgatgttttaacatgaaaagtagttatattcatttttagtaattgtagttgtttttttagattattttttgtaaagccattaatttatgtaatgattaaaggtatttttgttgatttgattcaaagtaaagcttgattgcaccaattattaatatattttatgatacaaatctctattcaacgtaattgtatacagatagaactatccaattttctattatcttatgtgtaaaatatttcagttcttataattagttattgctgaaacatatcctgattgtatcacaaacatctgcaataccgtttgcttatccgtaaagccgtatccatatggagatgtttttttaacagttaaagtagttctaatccattttgagtacttgtatttgttttttttagattgggtcataacaggacatgttgatctaatccaatgaaaaattgtattttttgaatttaagttgttaatatttcagttcttattgtaaaactagttgctatgttttttgtaaaatatttcagttcttataattagttattgctgattttatatcctgattgtatcggaatcctctgcaataccgttttcttatccatatggattaaatctggtcatgaagggaaatctgcagctttctctgtcgagacactatcccgagttcgtttagataaaagccctgacttcatcaacatgtcttcacccgactctgttcacttctcattctactccaaatgtcttgcaaaaagaaacccttacgctatgtatctacagagcttgaggctagggttctgttctctcgacatgaaaggcgccatttcattactgaatgattgtaaagatgtcattcctatagccaagcttctttacattgcgctaaaccgctgcgcaggtaatgaagtattagacgcgtttaatactttcaaacgagagaacaagtgttttacagatgtagatatcatggccaagacactaattgaccacatttctgatttggaaccaaaacgattcggatcttacgctgagctctttcattatgaggattatccagactgttgggtcatccatgaattttacaacgaatataatggtgagagatgttcacattgcgtctacttcttcctcttcagagacatccttttgctttcctagtttatttaaaaacatgagtaactcactttcagaatataactatctcttctgtttccctcttttatctagtttattaatgtaatcttattatgaagttgtatttctctcttgtatttaacgtttaaactagtgaacatctttctcgtttatcataacttatagggactctttcgattttggagcatgcatagcaaaattttccgactatactaattccaaaaatacttaagattggttatatctgattggtctggggcttgtggatagacatataaatattcatcggatggaatggggaatggaagaaagttaaacaaatcgtgattgtttagtaactgtatataattatgctcaacactggataattatctataataaacgattataattaaaactaaaaaaaataaaactaaaaaaaaaggataatgatctaactataattgtgctctaaccataatgttcccggatttgtctcgaaccataataatcccagttttaaacctgattgtgggaatattcctgctatacaacagtttctcaatatttcccgtagaaggaattttagatttgtctttcatggtgaaagagaaagataattgttaatatatccatattaattcatccacaacataactgtataaattcgtttgtctgattgaataattcactatgactggttttaacgtatttgtaatcataattagctcgaatgatttacaaatcaacaatagttcaaaatactcaaaattatttatttctcttcgcattgttaactgatataaatgttagatgaacttgaaaataaatggggttatggatggaacaaacaaataatatgatacaaaccactaaaacattcaacagcaatgtagagataagattattttgtaggaatggggaatggaagaaacttaaacactggagagctaaccataattatcttctcataataaacgtaataataattaaaaaaaaaaaaaaaaaaaaaaaaaaaaaaagataatgatctaactataattgtgctctaaccataatgtccccgaattatgctcgaaccaaaaaaatcctagtttaaaacctgatggtgggaatatttccgctatacaacagtatctcaatatttccggtagaaggaattttagatttatctttcatgttgaaagagaaagataattgttaatgtatccatatgaatccatccacaacataactgtattaattcgtttgtctgattgaataattcactatgactggatgacatttatattaagatttacaaatcaacaatagttcaaaatacacaaaaatattaattttgacctctgtttgtaaactgtgttgttgatttgtaaatcattcgagctaattatgaaacaactcaaatcatttgccatccctataaaccgttttccaaaagcttaataatcaacaactaaaaggtgtcacaattattatacaaatgatttgagttgtttcagaactatgacttgcgtttttgtatatgaaattggtttaatggaattcaagtggtagcttttatatttagagttaatatatagtgaatattaactgaacccgtactccccactaagcttcatccctcacgattgtgacctattaagagaaacatccaattaattactctgtttttattactcatttctaaaccgttttgatcagtactaaaacttctctctccatcacatcttactctttcgttattcgcaacaaattgacaaaatgagtacatcatcgaaatgtctacactctatcacacaatctagcgacacacaggttaaatttttcaattttttaaacaatatagtttacattcattccacaaagtatatgtaacttctataaactttcgtcttcgttgtcaacagaggaagattgcaagattatacattccggaaccaattctcgcactaattgttagccacgtttcagaagaaggaattgaggctctgaaaaactggattaaatctggtcatgaagggaaatctgcagctttctctgtcgagacactatcccgagttcgtttagataaaagccctgacttcatcaacatgtcttcacccgactctgttcacttctcattctactccaaatgtcttgcaaaaagaaacccttacgctatgtatctccagagcttgaggctagggttctgttctctcgacatgaaaggcgccatttcattattgaatgattgtaaagatgtcattacacgcagaaggctataaatacggaatagcatgtcttgtcaaagggggattccgcgaggacacttagagactaagagcagctcgtcagctctcccgtctcaaccagctcgtcagctcacccgtctgaagcatctcgtcagctcatcagctcgccagtctcaagcagctcgtcagctcacccgtccgaagtatctcgcctaatgtaaccgtcttgtctggaccaattaactcattccagtagctcttcttgccatcatcataaacaggagaatcttcagggtcatactcgtcaggaaactccccacaaggtaagccagtcacggaagcaaattctagtagtgaaaatctcattgggtgtccaccaaaaactgtccaaaactcatactttttcttagtaagcaactgtctacataacaaggcatgaatgaccttacccgaagtcgcaaccctactaactggcaaatggaataaaggaccaaagcaagactgaagtataaaatctaattcctctgtcccatcaaaaaccttcttgataaaggatagaatatccggtctagagtatacgttcagccttcccctcggataatgatcggtggcgaagagtctatttggaaggtttgaatcccactgagaagatggttcctgagatgtcgaccctgttcattggcaagaaaccagttcaagagataacgattattaacgagtatttgtacaaacgtctgtgcttagctacaaacaattgggaaacatttttcgattcaaaaaaaaaattgcagaaacattcagcgagaagaggatttcttcttctgagttaattggaccaaaataagatgattggaaacgatttgtaccttccattgagtattccgatcagtgagaatcaactggaatgctaatgaatctggcttacgagaacaataaatcgaaatcgaattcgattattgcagagatttgggggaaattactatttggtttttattcagcgagtatagactcgcctgagtggcggattgatggacagcgacggaggagtcgccggattcggagcaggcgacggattgggagcagtggcgatgtggagatacagtaaattagggtttttactgggtaagcggttttttacaatcgtgttggtaaatgaagattttacaatcgtgttggtaaatgacagtaactgataatacgtggttcaaccggaaccggattagagaaaaccggctaaatttgttatgttttattaaaccaacgatttcagggtaaaggggtaattatactgagttaaagtgactaatggttttaaagtgttctattgtgtccaaagttttgaaatagtgcctctacgtgtaatattctcatatttttattctgagttcctgttttacccttgtaaccctatcacatctcataaggtttcgaagacttggcttttgtcttaaaaagttctcggattctcttttttattcgaggaaacaaaacaaataataatataataatcctaattatttttctggaggagagaagccttgttttgggctggaagaatcattgaagtcactcagattagaggacttataaataagccttattgtggagattacttgggctttgttgagaacttatgaagcacatctttgtatttatttcattttgtctatatatgtagagatctatgttaagaagtttatatgcgaaataccttttaaaaaataaatcctatcaaaagtccggacactgtctttgtgttgatttactttgttctcattaggtcttgaagtgcttggatcagtttgtaatgaaaatttaccatttctattcgaaagtgaattgatggttatgagaactcgtatgacgcagtgtttattcctacatatgcatccgaagaatcgtcattcaatcataataatcttgcatctatattatgaggccattgtggtacacgtttgagtcatctctacaagcctgtcttcgatcgtcaattcaagatgctgaagattcatatgatggaagatatgattaaagatggtgaagagaagagtcttgacactttcgtgatatccaggcaacttaccactttcactgatctcacggtttgtctttctacaaggtatcaattactaagttaatctttttgtttagggctgggcatttggctcatccgtgatagttgaatttaaagtgagacttgagcacttaagaggaaaatcaattcctatagcgtaattcatctttctcgctccatcttcctttgtttttttggcatcttaaactatggtgttatcaaaatggcagttgtgcacattgctgaaagttaatcaatggtcagactgtaaagttaatttccttatgtctatgaagaaaacaaaaatttaatccacctttttgggatattattttgttgatcagaagcttgtttaatgataatttttttttttttttcagaaaggatcgtgtgaccattaaattgaaaacggtatatatgcttatacgatgactatactatatatgcttatacgaaaagatgactatactatacatttgtcgaattagatgcttatacgaaaagatgactatagctgagtgtaaaacctggctgcttaatatcccccacatcattaaacgttacttagatatatttctttaagtcaacaactaatgaagtaataaaagacctagaagccatgaatgaatctgcgtcaaagcatccaaaatgatggtgttctcgtactattcgcagtctatctcaattgatagcgatttcctcatcaatccagcgccacttatatccttgaccgtttcaaaaccagctccgggtcgaatcagcgagtcgggtcaacatcacctgaacagaatgttcgcgaggcggctcacttcgttcttcgaaggatcttcaacctccaggtacccaaaatgttacaattagaatctgatcgattcccctttagtagagcattaaaccatttgtccaaataacttccctcatagtctttctcctgattcggactaagttgaaacttgaagtttaggggatgattaaacctttgttgacgttagagctaagaccattggaatagatttctaatctctgtagctactactttgaccataatttctaatagttttgtttttttggtcaaccatgtcttaatcaattagggtcctggctaattgcaagtccttgattcatatgaattgtattcaagtatgcatctcgattgattgttagaatctctttatttcacaatcaatctagtctcgacttgcttatatacaagactatgtaatgtaatttctctcttgttatgtgatcagactgagtcgttatgcggcaccatcgaatcttattcacgtaagactagttctctagatgagtaattttttttggttttgtatatatttgaaaaagctcctccttgcttctttgtccttgccaggagtaatttttgattcagcaatagctaatacattacttcttagctgcctacagtctggtcttttaagtcttttatcttgtttaaagtttgaaaattggtgattttctgagttgctattgttagattgggttattccttgttggctgctctgaatatctcacttagatcccaaatatacttctgtgatataggagttttcagttttggggaagagtcgtagagatgtacatttgctgaagcttctattgaaatggcagaatcgaattcgataccttccgttgttatcaattcctctaaacagaatggtcctatcatcgtgattgataattacgacagcttcacttacaatctctgccaggtttcatttctaacacaatctcaaatcttactaggctcgttagatttttgatgtgaaagcagctgaatttgcattttgttagaaatgtattcaagtatatgcattgtgattgaatgttagaatctcattagttcacaatccaatctactttcgacttgctaatagataagactatgtaatgttgaccatctgttgttaatgtgatcagagtcgttgctatgtcgtgccatcgaatcttattgtcgaaagctcctcgttgcttgtttgtcgttgtaaggagtaattgttgatccagcaaaagctaacacatcacttctttgctgcctaaagtctggtcttttaagtagaatctttaatcatgttcaaagtttgaattggcgatttcctgagttgctatttttgactttagatttgttattcctagttgaaatatctcgctttctcatgagattttggctgctctgaatatctgacttaacgcacatagataccaaatatacaatttgatcatgtcttacttctagttctccacgcagaatagtgtcaggtgcatactatttattgtgatcgttctcttgatatggtttcttctgctttagtataaacaaaattttgagaattgctatctatttctacagtatatgggagagctacaatgccattttgaagtttaccgcaatgatgaacttacagtagaagagctgaaaaggtaagaagaaactatatgcattctgtttaaaacgtaatctggctaatcgactgatgttcattcctttatcattctctccctcttgcagaaaaaatccaagaggagtgttgatttctcctggacctggtaaatattttggcctctgaaatttctcctataattatatgctggagaagtggataacacttttcttgaatttgataggtacccctcaagactctgggatttccttgcaaactgttttggaactcggaccacttgttcctttatttggagtatgtatgggtttgcagtgtataggagaagcatttggaggttagttgcatataaacaagacatcttattttcccgtatcagtgttcaaacatggttttgttctttattctatgcatccacagcttaaatgcaattttgtttgaacattgattaggaaagattgtgcggtcaccatttggtgttatgcatgggaaaagctcaatggttcactatgatgagaaaggagaagaaggcttgttctctggattatcaaagtatgaatcaaaatcaattttttttgtgtgttgtctaatatagttaatcataagtctgtaaaaatgtgtaataaaacaaatctggttggtttcagccctttcattgtaggtagatatcacagtctcgtgatcgaaaaagatacatttcctagtgatgagctcgaggttacagcatggacagaagatggtctggttatggctgcccgtcacagaaagtacaagcatatacaggtaaaacccgcacaagtgtgtactgtaatcttattgccccctccattcaaaacagaactcttgaagtcttgtaaacattgttcacagggagttcaatttcatccggagagtattataacaactgagggcaagacaattgtccgcaatttcatcaaaatcgtagagaaaaaggattccgagaagctgacgtagactagcctgaatgagaaaatctgctgtgttcgaatagtgcctccctgtaataatatttgccaatgcaaaatgttccttgccatcttcccattgtttctatcataaaaattcgacttgttcctccacttttacttaatttgtgaaatgtggaaagcagaaagctatggttatttaagcatgcctagcgacaaaaattgccgagggtctttcagtttttatttggttcctagctaagcacctacccaaaatgtgtctagtacttctttcactacaggacgaacctgtaaaggccagatagtattcataatggtgtaagaaacacaacatacatgagatgagatcagatatcacttttcgtatatataagatatgtatgagatatgtactccataattgggactaacttagaagtaaacgcagaaacagactaacttatatgagatatgtactccataattgggctaacagtacatgaaaccatgtcatgctttgcttaaggatggtgcaagtgaacaagtgactagaacaatgctttgataaatttactagcagacgacaatgcaagaaacaaataaggtacctaaccatctcactgacgaaaagtaagaaacttaaaccatgacaagagtaagtttgagaagagaaactaaaagaggagaaagataacatggaaatgtaactgagaattgactagcagtcttgagaactgcaaggaacagaaaactaaacatgtctttctttccttttgcgctgttggttgacttgcactaaactcggaaggtaagtagacgagcagacaagcgggggacgatatgtagtcggaatatgcccggttctgggacaaggttccccgacattgggagctactcctagagtcacaggtttaaagaatccatcctttccactgataaaagcggtgtggtaacgagcgctctcggtgcttaggtatccgtctagatcgaaaaccacagcgactttctcatcctcgtcaatgaagaaggtggcacccatatcattgtcaaaccgaacaccagtgagtgccaatggtctcatatccactgtcaaaaacttgctccaggacacagagttgggctcaatactagtagtaacccaaaactcaactgtggtaaaccgatcatcactgtgaagaccctcattatgatatagcaccgcgagctgctggtctctaacacaagagagggtcacagtcgcatcgatagtagagtgaaacggaagaggcagacgcagaccaaatgtctctgttgtaaaatcaaaacagagtaagaaatcttcaagatcgattatgtcgccatcttcatcaatttcaccactgctgctatcctcatgcgcaaaaaagtaggtatttcccttcacagaaacgccgtagaggggatgattagggtccatttccccgttgggagtgacctcgagaaccctccatgaattagagcgcaagtcgtagatttcgtacctgtaaacggaaacgtttcttgtctgcaccatcctcaagattttgtggttacggttgatgtcgtatccaagagcatagctgtctcctatgttggattctgttctgggtctgatccatcttgtttgccccaaataagggttccaaaccacgaccctcgagttgtccttagccacgcataacaacaagccgtcgcagtgatacactctagatatctcgacttgattaagcaaatctacctgctttatagatagatccatcgtgtcttcttcttcctccttgctgcgacggagatggaatctaactgaacagacctttgaatccatcgtcataaaccccaaaaactgcgccgctgctttacccagaacccgatctttggttaaagcgttccataatttgcaagtggatcgcaccgctctcagagatgttatcggaatcctcgtgaggatcttctcccctaccagcttcggtggaagatcgcacatactcgttctcttcggttgaagatcgcacattctcgttctcttcggttgaagatcgcacctcctcctcctcattcttccaattttcgaccacaattgaaaattagggttctcctctctcgtaagtaattagggttcttctctcttaatacgtatcctaatacgttataatgtacaacaattataaatacgagtaaaaaaataaaaataaaaaaggagaggaatttaccttttcctaatgtgaaaaatgtatccaagtcaaattctttttcgttttaaattattttattatttttattagttctgttccattttcttttattttcagtttcaatatgttaaattggtacagagtaaaactattattgaactacaacttaagtttcaattcaatttggttttggaacagtttgatcggttaaaatgtccctatgattagtacctaaaatagtttaatgttacaaattttactgtattcacaagagtaatgatcttccattgaacaaacaaaaatcccacattggtaccatctttggataacgaatccaaaaagaaacagaaacgatcaaggcttttgcgggatatggttgacaacgagcacatactcttcagtccatggtaaggtgacgtgctaagtcagtgtgcagtgcatgacccgcctgcatttgaaagataatactattgttttcttttctcgagaaaactataagatgttttttttttttcttttttgtgcaaactataagatgttaagctagtattatttaccttatatgcgactatgtgagccacggggagtcctccatttccgccccgtgaaacaagggagaggtcaccgattaggtcaagaatcttatgtcgacatgcttcatcatcaaaccgcagaggaggattcatccatccatgctcagcgctgcattagagacagtttcagttgaatattgtgtccctttagtcatcaatatgcaagattatttacctacaaactatggcgttatccagagaacctcctttaatgagccctgcttcacgcatacgctccacctgcaaacaaaaccctcagacacagatggttgaagaacgaacaccagtttactgattccaaagctcctaagcaacaacaatggatctaactaacctcttcatagacacagaaggttcttgatgatgcgatatcctttgcaaaagaagactcatggataggtctccaagaaaaccattggcagcctatagcaggcacctgtaaagttcatcatcatacacaacagaccaagtcaataacaatttatgtacaagcagaaaataagtcaaaatgccattagactgaacctgtgggaagtcgataccacaagtgatccgagtctctagagcggaaatgcagcaacaaaagtatcgttcttgcaaacatacacaggcttgttcacatgtgcgaccatcttctctacactttcaccatcatggttttgagccgcgtttatgccaactccttgtatcgcatcgacccattctttagctgatccatcaaaaatagggacctgtcacttggttagtgttgcctacactcatcatctcctccagtgtaccaagtctataaaactaagagctacactgcacagcaagatgttgacaatctctatagcatacaaatccagtcaaaatagacaatacgagacattgattcgacctatgattactcaaaatgtatgtattcaggtaacaaacctcgacttctcgatcatcggaactttcgctctcgatttgaatcctgcaattatcaactcccttcgcctcaagagctgataacaaatgctcaacggttcggattttgagctcatctttcaacagcgtcgtgcaaagaggcgattcctgagcaaattcaatcgacgcagggatgaatctggatcgaaactcgaagaacctaccagctccggcgatctccggatttagcttcaccgtcgagaacttaccggagtgcagagattttcctttcacttccacagatcctgcgagagtttgctgtaatcgtccactctacagtattgaaccccaagacaaaaaaaacacactcaaaatgattccaatggataataaagtcgcatatacatgtaagcgtgtgcgggagagaggtttactggattcaaggagactgtcggcgacgacgcggcggaggagtatcggatccaaatgacgagaaacgacggcttagtggctttgacggtgacggggagtctcattgattcaacgtctgattaattttaaccatgcccggattattgatttaagtaagtactaggatatactaaaccggaatcaagaaacaaataatgtatagtaaaccggaatcaaaattcatgttatgcaaatatcccaattgttccaccaaaaaccattttctttgtgtgatgcttttctcaatttcacataatctccatttttgaagtcttaatcttctaattatcatcaaatctacctatataattaaaaggagaagtacaaagtaaagaatgcctaaaaaatttagaaatattacagcaattgcctctaaattatggcataaagaagcgattaattgaaattgagaagaaaacttatcataattgaaaaatctgatagttgctccaagatccacaccaaacactatgatcattcgtccctttttcttttgcctgtgataccttggtagatttgagtcaaacttggaacataataaaacatacattacagagatgatccgacttcaaaacccacttgtttcactttgttgtcctctccaaaaatgtgtaccgtggtttttccttggtctctaatattatcacaacacacgaccactctcttcttctcgtcgaccaagaaacttccgctttccccaatacaacgtttaggctgcaaatccaaagctaagaccatgctccacgacaccacttgtgtctcaccaatcttatttgtcacccatatttctgcctttgatttaattccgcgttgcgataacatggaaagtttctcttctctaacaacggatagagccagagttgcataacaaggatacttattcggaagacatagacgttcaaatctttctgtcgtataatcaaaactgattaagaatttgccaagccgtttctcttcttcaccactagcaatccagtaagtctttcccttcaaagacacgccacgaccaatataccctaatttgaagtccaaagtggcatcaataatcctccatgaattggagttaatttcataaatttggaattcgtggtcgtagccaaaaccagtgtgtgccaatatattgtagctattattttggtaggatccgagagtatagttgtcatataagtcatgggttgaatccaccttgtttgaccagtacacgggttccataccgcgagccaagtattgtcctccttggtgacgcagacgcataacaataagccgtcgcagtgagagactttatatatctcgaattgatcttgatctagacaactaggatatttagggttgattagggtaaattcaactgtgacttttacatgtggaagtctatggagatcgacactcatcgagcgtaccctaagccctttagacatgtgaatcagaaactgctttgggcctttatccaagtgttttcttgtgaatctcctatccttgaataaacagttccatcctttgcaagtagaccctaactgtttcaaagacatagctggaacgcggtagagtatctcttctaacaaatgctctggaagttccgacatcattgtcgtttgatcaaatgttggttagggttttgtatagtacttcacgtttatataaatccatgctcaggcgacgaacaatttaagttacttttacggcaagtcaacactctttaattcgtttcctataaaaagcgtctttcttattctcttcaatcttcaatatatgaaagagctgaggaatatggaaatgaaagacccgaaaaaatggaatatgcacattatgacaaatcactatgtaaatgtttgatttacttagtgaaaagtgcaacatcttaacttaataaaattatcttataccatcttaactatttttttttagttttattttcttttaggattatgcttcgtttaattaaattgttcacactgtaaggttggactgaattcatagtatatatttataaaaatgcaaattcttacatgcataaggatgaggagagaaaataaatcacaatcctaatggaacccataaattacgttaccaccctttaaacaaaactatttcataacaaaagtaaacatgcgttgtgaaataatgatatgataggcatatattaaggagtggtattagaataaagaagcgattaattgatattgagaagatagcttatcatagcttatcataatcgaatttagatgttgcattgtggtaccaaagtggtggtatatattaccttatacatatcagcatttcgcatgaaccatatatgagtattaattaggtgccatatgcagctagtctttctactacacgccacagaagtaacacgtaattaattatgtgtatcggtttatgtaatgccgtaaactatgtgtttaatgtgtccaatcacgtcttatcatctatagtatgcgtttgttctttttgcattatatgtgtattaattaggtagacactgagattcgtatgatacgttcaaccgaatcgcataactctatatgaatctaaagtccacttactcactacaattaatagtttatggtagctgttgatgcacgaatcacacaagtacgaaaatgggatctctagggaaggaagaagaatctttctattaatgacgagcccgcgacttaggcggattggacggattacaaatgatgatttcttcaacgagcataaatggagtaagaacgagccgattgtagatgaaagacgagcttgaggccggaagacgatcttccgaggaagaatagagtttattcgttttatagctgaaccttgtaaaaggttgcctacgtacccttagaaagggatcaagccacacgtagttcatattgtgataaacgagctaggccattattggaggaaggtcggcaggtaattgacgagccggcagatgtgcgacgagctggatggcttctcgagacgtgcgagtaggttagttattttgggcgggcaggtcggagagacacttcggacggacgagtaaacgagttactcaagatggatgggcagacgaggtactttggacgggtgagctgacgagctgcttgatacgggtgagctgacgagctgcttgagacgggtgagctgacgagctgcttgagacgggtgagctgacgagctgcttgagacgggtgagctgacgagctgcttgagacgaaccggctggcgggatacttcggacgggtgagctgacgagctgtttgagacggaccggctggcgggatacttcggaggggagagctgacgagctgattgagacgggtgagctgacgagctgcttgagacggaccggctggcgggatacttcggaggggagagctgacgagctgcttgagacgggtgagctgacgatctgcttgagacgggtgagctgacgagctgcttgagacggaccggctggcgggatacttcggacgggtgagctgacgagctgcttgagacgggtgagctgacgagctgtttgagacggaccggctggcgggatacttcggaggggagagctgacgagctgcttgagacgggtgagctgacgagctgcttgatacgggccggctgacgagctgcttcggacgggagagctgacgagctgcttgagacgggtgagctgacgagctgcttgagacggaccggctggcgggatacttcggacgggtgagctgacgagctgctctgtgtctctgcgtgtccggcggaatccccctttgacaagacatgctattccgtatttatagccttctgcgtgtaggacactcctccaggattttgacgagcctaccctcttgacttaacattctgcttaggcctttgacttggatttgggccttgggccaagcaagcccaaatcttacccctaacagtagctgaaatggatcacaacgtacctaattccgatttctatatctagtgtacgtattgatattctttagcaatagttttggaaaatataatctgagtttagtgtactcgttggctttattacttttgaattttaataatagtctattttaaccataagtactagcatatactaaataacttgatctacacaataaaatacagaagattgattctcaaactatttctctctctctctctcacagagaatctccaatggcggctcccgtagtggtcgctcctgcgataaatcttcagcatatggacctacctgaaggaaatgaaggtaataaaaaacgattatattctcagaagcaagatataggggtagcgaatttggggtaataaagaaattgaaattgaaagtatcaagaaacattggtgagtttgggaattggaggaatgtatttaaaattagagtagatctgtgaatttgggaaatcgaggctacaatctatggaattggtaacagtgtagaaatcttagaaaagttatgatctatggaatcttagaacagtgtagaaatcgtagtacagtgttacagatctatggaatcttagaacagtgtagaaatcgtagcacagtgttacagatctatggaatcttagaatagtctcctagatctatggaatttgtacaattaaggcaagatttaaaaatttcagaataaaacagttgcttataatatatatataaatctcatatgtttggttgctatttttgacagatgtagcagctgtgcttcaaacatcaacacagcgctggctcaacgctgctgagtggagcattctttataacaaccacaacctattcccagaatcaaactcatttaccatacctattgaagtagagggactttacagagttgacaaccgctttaatcaagacagcaatacgtggagaaacacaagtgctccctccacttgcaaaaatgctatcaacttctacaatgttaggatcgccactggcttgtacaggtttgatgatgatggggacattgtgatggacgctgaagttcaaggagggtgggtcctttgcagaaaaaccgtgaggaacagaggtgggggggtacttacttttgcacactacatgtgggttttagtgtgagtaaaaactatgcttgagtaaaaactatgcttgagtaaaaactatgtttgagttgatactggaaaaatctaaacgaacttgtagtataaacttctatgcttataaacataagcccaaattagctaaatcatttttaattcatatttttaagatgctacaggtaaatgctacaggtaaagtcatagctacattatttacttcactatactatccaattgagagaataaatgatcaaaaacaaagaggcgcaaaaaaactaatattaaaatatcaagctaggaaagataaacaaagttcaaagactcagatgttaatgaaacgaatgagactgatggcccaaataatccaaatagatcctagattatatatgtcggaagactaatttcaataagtataaacacaagatatttgcggatttatattgttagactaaaatgcaaatgaagtgtgaaaaggtcaagaatatgcaacacttgcgtagtcgtataagaagacattagagtggtcatataaatgggatattaattcagagaagttttaagggtaggaaaaacaaactgtttaaacaaaaaatcatgcttaaaacatctgttacatgtaaaaaaccgagaaattaaaaccaagacaaaaaaaacagagtatgtgaacttgccttcaattgggtaaaaggctggatctgagataatctctaaaagtaaagccagatctgtaaaatataataacaaagaacagattaaattgatgaaaccggacaacacaagaagaacaatccatctttttcagatctgaagtagagatggaaaaaaaacttgccttttcctatgaacagatgactgcggatagcagatctggagaaaatatataaaaaatctcaggttaaaatcgtgaaacaagaacaaactgatcaaataagaaagaaggacataacaaaaaacttagcttttttaatgcggatctgaagcatatgggtagagagccagatagggtttgagaaatcgaagagaggtaatgattatagcagtttagtgtttctcgatggagagagagagagagagagattgagttttttattttggtgagagacagagaggcggacgagtggtgtttatttggagctttctcgattaacttatttttattctgagttcctgttttacccttgtaactctatcacatctcataaggtttcgaagacttggcttttgtcttaaaaagttctcggattctcttttttattcgaggaaacaaaacaaataataatataataatcctaattatttttctggaggagagaagccttgttttgggctggaagaatcattgaagtcactcagattagaggacttataaataagccttattgtggagattacttgggctttgttgagaacttatgaagcacatctttgtatttatttcattttgtctatatatgtagagatctatgttaagaagtttatatgcgaaataccttttaaaaaataaatcctatcaaaagtccggacactgtctttgtgttgatttactttgttctcattaggtcttgaagtgcttggatcagtttgtaatgaaaatttaccatttctattcgaaagtgaattgatggttatgagaactcgtatgacgcagtgtttattcctacatatgcatccgaagaatcgtcattcaatcataataatcttgcatctatattatgaggccattgtggtacacgtttgagtcatctctacaagcctgtcttcgatcgtcaattcaagatgctgaagattcatatgatggaagatatgattaaagatggtgaagagaagagtcttgacactttcgtgatatccaggcaacttaccactttcactgatctcacggtttgtctttctacaaggtatcaattactaagttaatctttttgtttagggctgggcatttggctcatccgtgatagttgaatttaaagtgagacttgagcacttaagaggaaaatcaattcctatagcgtaattcatctttctcgctccatcttcctttgtttttttggcatcttaaactatggtgttatcaaaatggcagttgtgcacattgctgaaagttaatcaatggtcagactataaagttaatttccttatgtctatgaagaaaacaaaaatttaatccacctttttgggatattattttgttgatcagaagcttgtttaatgataattttcttttttttttcagaaaggatcgtgtgaccattaaattgaaaacggtatatatgcttatacgatgactatactatatatgcttatacgaaaagatgactatactatacatttgtcgaattagatgcttatacgaaaagatgactatagctgagtgtaaaacctggctgcttaatatcccccacatcattaaacgttacttagatatatttctttaagtcaacaactaatgaagtaataaaagacctagaagccatgaatgaatctgcgtcaaagcatccaaaatgatggtgttctcgtactattcgcagtctatctcaattgatagcgatttcctcatcaatccagcgccacttatatccttgaccgtttcaaaaccagctccgggtcgaatcagcgagtcgggtcaacatcacctgaacagaatgttcgcgaggcggctcacttcgttcttcgaaggatcttcaacctccaggtacccaaaatgttacaattagaatctgatcgattcccctttagtagagcattaaaccatttgtccaaataacttccctcatagtctttctcctgattcggactaagttgaaacttgaagtttaggggatgattaaacctttgttgacgttagagctaagaccattggaatagatttctaatctctgtagctactactttgaccataatttctaatagttttgtttttttggtcaaccatgtcttaatcaattagggtcctggctaattgcaagtccttgattcatatgaattgtattcaagtatgcatctcgattgattgttagaatctctttatttcacaatcaatctagtctcgacttgcttatatacaagactatgtaatgtaatttctctcttgttatgtgatcagactgagtcgttatgcggcaccatcgaatcttattcacgtaagactagttctctagatgagtaatttttcttggttttgtatatatttgaaaaagctcctccttgcttctctgtccttgccaggagtaatttttgattcagcaatagctactacattacttcttagctgcctacagtctggtcttttaagtcttttatcttgtttaaagtttgaaaattggtgattttctgagttgctattgttagattgggttattccttgttggctgctctgaatatctcacttagatcccaaatatacttctgtgatataggagttttcagttttggggaagagtcgtagagatgtacatttgctgaagcttctattgaaatggcagaatcgaattcgataccttccgttgttatcaattcctctaaacagaatggtcctatcatcgtgattgataattacgacagcttcacttacaatctctgccaggtttcatttctaacacaatctcaaatcttactaggctcgttagatttttgatgtgaaagcagctgaatttgcattttgttagaaatgtattcaagtatatgcattgtgattgaatgttagaatctcattagttcacaatccaatctactttcgacttgctaatagataagactatgtaatgttgaccatctgttgttaatgtgatcagagtcgttgctatgtcgtgccatcgaatcttattgtcgaaagctcctcgttgcttgtttgtcgttgtaaggagtaattgttgatccagcaaaagctaacacatcacttctttgctgcctaaagtctggtcttttaagtagaatctttaatcatgttcaaagtttgaattggcgatttcctgagttgctatttttgactttagatttgttattcctagttgaaatatctcgctttctcatgagattttggctgctctgaatatctgacttaacgcacatagataccaaatatacaatttgatcatgtcttacttctagttctccacgcagaatagtgtcaggtgcatactatttattgtgatcgttctcttgatatggtttcttctgctttagtataaacaaaattttgagaattgctatctatttctacagtatatgggagagctacaatgccattttgaagtttaccgcaatgatgaacttacagtagaagagctgaaaaggtaagaagaaactatatgcattctgtttaaaacgtaatctggctaatcgactgatgttcattcctttatcattctctccctcttgcagaaaaaatccaagaggagtgttgatttctcctggacctggtaaatattttggcctctgaaatttctcctataattatatgctggagaagtggataacacttttcttgaatttgataggtacccctcaagactctgggatttccttgcaaactgttttggaactcggaccacttgttcctttatttggagtatgtatgggtttgcagtgtataggagaagcatttggaggttagttgcatataaacaagacatcttattttcccgtatcagtgttcaaacatggttttgttctttattctatgcatccacagcttaaatgcaattttgtttgaacattgattaggaaagattgtgcggtcaccatttggtgttatgcatgggaaaagctcaatggttcactatgatgagaaaggagaagaaggcttgttctctggattatcaaagtatgaatcaaaatcaattttttttgtgtgttgtctaatatagttaatcataagtctgtaaaaatgtgtaataaaacaaatctggttggtttcagccctttcattgtaggtagatatcacagtctcgtgatcgaaaaagatacatttcctagtgatgagctcgaggttacagcatggacagaagatggtctggttatggctgcccgtcacagaaagtacaagcatatacaggtaaaacccgcacaagtgtgtactgtaatcttattgccccctccattcaaaacagaactcttgaagtcttgtaaacattgttcacagggagttcaatttcatccggagagtattataacaactgagggcaagacaattgtccgcaatttcatcaaaatcgtagagaaaaaggattccgagaagctgacgtagactagcctgaatgagaaaatctgctgtgttcgaatagtgcctccctgtaataatatttgccaatgcaaaatgttccttgccatcttcccattgtttctatcataaaaattcgacttgttcctccacttttacttaatttgtgaaatgtggaaagcagaaagctatggttatttaagcatgcctagcgacaaaaattgccgagggtctttcagtttttatttggttcctagctaagcacctacccaaaatgtgtctagtacttctttcactacaggacgaacctgtaaaggccagatagtattcataatggtgtaagaaacacaacatacatgagatgagatcagatatcacttttcgtatatataagatatgtatgagatatgtactccataattgggactaacttagaagtaaacgcagaaacagactaacttatatgagatatgtactccataattgggctaacagtacatgaaaccatgtcatgctttgcttaaggatggtgcaagtgaacaagtgactagaacaatgctttgataaatttactagcagacgacaatgcaagaaacaaataaggtacctaaccatctcactgacgaaaagtaagaaacttaaaccatgacaagagtaagtttgagaagagaaactaaaagaggagaaagataacatggaaatgtaactgagaattgactagcagtcttgagaactgcaaggaacagaaaactaaacatgtctttctttccttttgcgctgttggttgacttgcactaaactcggaaggtaagtagacgagcagacaagcgggggacgatatgtagtcggaatatgcccggttctgggacaaggttccccgacattgggagctactcctagagtcacaggtttaaagaatccatcctttccactgataaaagcggtgtggtaacgagcgctctcggtgcttaggtatccgtctagatcgaaaaccacagcgactttctcatcctcgtcaatgaagaaggtggcacccatatcattgtcaaaccgaacaccagtgagtgccaatggtctcatatccactgtcaaaaacttgctccaggacacagagttgggctcaatactagtagtaacccaaaactcaactgtggtaaaccgatcatcactgtgaagaccctcattatgatatagcaccgcgagctgctggtctctaacacaagagagggtcacagtcgcatcgatagtagagtgaaacggaagaggcagacgcagaccaaatgtctctgttgtaaaatcaaaacagagtaagaaatcttcaagatcgattatgtcgccatcttcatcaatttcaccactgctgctatcctcatgcgcaaaaaagtaggtatttcccttcacagaaacgccgtagaggggatgattagggtccatttccccgttgggagtgacctcgagaaccctccatgaattagagcgcaagtcgtagatttcgtacctgtaaacggaaacgtttcttgtctgcaccatcctcaagattttgtggttacggttgatgtcgtatccaagagcatagctgtctcctatgttggattctgttctgggtctgatccatcttgtttgccccaaataagggttccaaaccacgaccctcgagttgtccttagccacgcataacaacaagccgtcgcagtgatacactctagatatctcgacttgattaagcaaatctacctgctttatagatagatccatcgtgtcttcttcttcctccttgctgcgacggagatggaatctaactgaacagacctttgaatccatcgtcataaaccccaaaaactgcgccgctgctttacccagaacccgatctttggttaaagcgttccataatttgcaagtggatcgcaccgctctcagagatgttatcggaatcctcgtgaggatcttctcccctaccagcttcggtggaagatcgcacatactcgttctcttcggttgaagatcgcacattctcgttctcttcggttgaagatcgcacctcctcctcctcattcttccaattttcgaccacaattgaaaattagggttctcctctctcgtaagtaattagggttcttctctcttaatacgtatcctaatacgttataatgtacaacaattataaatacgagtaaaaaaataaaaataaaaaaggagaggaatttaccttttcctaatgtgaaaaatgtatccaagtcaaattctttttcgttttaaattattttattatttttattagttctgttccattttcttttattttcagtttcaatatgttaaattggtacagagtaaaactattattgaactacaacttaagtttcaattcaatttggttttggaacagtttgatcggttaaaatgtccctatgattagtacctaaaatagtttaatgttacaaattttactgtattcacaagagtaatgatcttccattgaacaaacaaaaatcccacattggtaccatctttggataacgaatccaaaaagaaacagaaacgatcaaggcttttgcgggatatggttgacaacgagcacatactcttcagtccatggtaaggtgacgtgctaagtcagtgtgcagtgcatgacccgcctgcatttgaaagataatactattgttttcttttctcgagaaaactataagatgttttttttttttcttttttgtgcaaactataagatgttaagctagtattatttaccttatatgcgactatgtgagccacggggagtcctccatttccgccccgtgaaacaagggagaggtcaccgattaggtcaagaatcttatgtcgacatgcttcatcatcaaaccgcagaggaggattcatccatccatgctcagcgctgcattagagacagtttcagttgaatattgtgtccctttagtcatcaatatgcaagattatttacctacaaactatggcgttatccagagaacctcctttaatgagccctgcttcacgcatacgctccacctgcaaacaaaaccctcagacacagatggttgaagaacgaacaccagtttactgattccaaagctcctaagcaacaacaatggatctaactaacctcttcatagacacagaaggttcttgatgatgcgatatcctttgcaaaagaagactcatggataggtctccaagaaaaccattggcagcctatagcaggcacctgtaaagttcatcatcatacacaacagaccaagtcaataacaatttatgtacaagcagaaaataagtcaaaatgccattagactgaacctgtgggaagtcgataccacaagtgatccgagtctctagagccggaaatgcagcaacaaaagtatcgttcttgcaaacatacacaggcttgttcacatgtgcgaccatcttctctacactttcaccatcatggttttgagccgcgtttatgccaactccttgtatcgcatcgacccattctttagctgatccatcaaaaatagggacctgtcacttggttagtgttgcctacactcatcatctcctccagtgtaccaagtctataaaactaagagctacactgcacagcaagatgttgacaatctctatagcatacaaatccagtcaaaatagacaatacgagacattgattcgacctatgattactcaaaatgtatgtattcaggtaacaaacctcgacttctcgatcatcggaactttcgctctcgatttgaatcctgcaattatcaactcccttcgcctcaagagctgataacaaatgctcaacggttcggattttgagctcatctttcaacagcgtcgtgcaaagaggcgattcctgagcaaattcaatcgacgcagggatgaatctggatcgaaactcgaagaacctaccagctccggcgatctccggatttagcttcaccgtcgagaacttaccggagtgcagagattttcctttcacttccacagatcctgcgagagtttgctgtaatcgtccactctacagtattgaaccccaagacaaaaaaaacacactcaaaatgattccaatggataataaagtcgcatatacatgtaagcgtgtgcgggagagaggtttactggattcaaggagactgtcggcgacgacgcggcggaggagtatcggatccaaatgacgagaaacgacggcttagtggctttgacggtgacggggagtctcattgattcaacgtctgattaattttaaccatgcccggattattgatttaagtaagtactaggatatactaaaccggaatcaagaaacaaataatgtatagtaaaccggaatcaaaattcatgttatgcaaatatcccaattgttccaccaaaaaccattttctttgtgtgatgcttttctcaatttcacataatctccatttttgaagtcttaatcttctaattatcatcaaatctacctatataattaaaaggagaagtacaaagtaaagaatgcctaaaaaatttagaaatattacagcaattgcctctaaattatggcataaagaagcgattaattgaaattgagaagaaaacttatcataattgaaaaatctgatagttgctccaagatccacaccaaacactatgatcattcgtccctttttcttttgcctgtgataccttggtagatttgagtcaaacttggaacataataaaacatacattacagagatgatccgacttcaaaacccacttgtttcactttgttgtcctctccaaaaatgtgtaccgtggtttttccttggtctctaatattatcacaacacacgaccactctcttcttctcgtcgaccaagaaacttccgctttccccaatacaacgtttaggctgcaaatccaaagctaagaccatgctccacgacaccacttgtgtctcaccaatcttatttgtcacccatatttctgcctttgatttaattccgcgttgcgataacatggaaagtttctcttctctaacaacggatagagccagagttgcataacaaggatacttattcggaagacatagacgttcaaatctttctgtcgtataatcaaaactgattaagaatttgccaagccgtttctcttcttcaccactagcaatccagtaagtctttcccttcaaagacacgccacgaccaatataccctaatttgaagtccaaagtggcatcaataatcctccatgaattggagttaatttcataaatttggaattcgtggtcgtagccaaaaccagtgtgtgccaatatattgtagctattattttggtaggatccgagagtatagttgtcatataagtcatgggttgaatccaccttgtttgaccagtacacgggttccataccgcgagccaagtattgtcctccttggtgacgcagacgcataacaataagccgtcgcagtgagagactttatatatctcgaattgatcttgatctagacaactaggatatttagggttgattagggtaaattcaactgtgacttttacatgtggaagtctatggagatcgacactcatcgagcgtaccctaagccctttagacatgtgaatcagaaactgctttgggcctttatccaagtgttttcttgtgaatctcctatccttgaataaacagttccatcctttgcaagtagaccctaactgtttcaaagacatagctggaacgcggtagagtatctcttctaacaaatgctctggaagttccgacatcattgtcgtttgatcaaatgttggttagggttttgtatagtacttcacgtttatataaatccatgctcaggcgacgaacaatttaagttacttttacggcaagtcaacactctttaattcgtttcctataaaaagcgtctttcttattctcttcaatcttcaatatatgaaagagctgaggaatatggaaatgaaagacccgaaaaaatggaatatgcacattatgacaaatcactatgtaaatgtttgatttacttagtgaaaagtgcaacatcttaacttaataaaattatcttataccatcttaactatttttttttagttttattttcttttaggattatgcttcgtttaattaaattgttcacactgtaaggttggactgaattcatagtatatatttataaaaatgcaaattcttacatgcatgaggatgaggagagaaaataaaacacaatcctaatggaacccataaattacgttaccaccctttaaacaaaactatatttcataacaaaagtaaacatgcgttgtgaaataatgataggataggcatatattaaggagtggtattaggatcaaagtctctagactccactcgttttgtctgattcttcaaggcatagcaaagaagtggcacatgggttcacgcagctttcttccttgctaccctttttcctttttttccctttattttatcctcctctctcctttcagatttatttggtgatgtacgttacggtaaaatatggttacatacttaattacatggacgacttttatttatgtgtaaaactataataaagtcgtaaaaatcagtggtttgaaaaacagttaagagtttgcggtatcaaaaacttagtacttagtcggcggtacaaaagtttatcatgaaaaaataacgaggttaaaaaatggcatggacttcaaatataacgtctccgaaatatgagagaataattttacttttgggtaatggagttcatctctccctaaatgatgcccaaaacgttgtattcataagaaagtacgtttctcgaatttagatgttgcattatggtaccaaagtggtggtataccatatacatatccagcatttcacatgaaccatatgtgtattaattaggtgccatatgcagctagtctttctactacacgccatagaagtaatacgtatttaattatgtatatcgatatatgtaatgccttaaactatgtgatgtgtccaatcacgtattatcatctataatatgcgtttgttccttttgcatttagtagacactgagattcgcatgatacgttaaaccgaatctcataactctatatgaatccaaggtccacatactcactagtcactacaattgactagtttatggtagctgaaattgatcacaacgtacctaattccgatttctatatctagtgtacgtattgatattcttaatttagtaatagttttggaaaatataatctgagtttagtatattcgttgtctttgttacttttaaattttaataatagtctaaatagatctatattttatcgaaaggtctcgttgtagtggaagcatgtgagtacggaatactgattaaataaaatacctgttaagtaaagattgcagaatttccgacttgaggaatatcaaactgtataagctgcttaatgtgtacttcttgtatctgggaaaagtatctattttctttctgtaaatttaaagaaaagtttcagacaccatcctgtttttatacatttgaactacccacctatataactcgcatttaaccactttactaaaataacctatataaacatataattttaatgggtggaacaaatgttttgttgtcaacaaggttaacatgcttctattgaacaaatacatatatgaaaatagtcatatagttatttattcctaacttaggctaataatctcaagtgatctttaagaataggattctaaaatatgagtagaataggtcataggtgttaagattcatatacttttcttattgttgtccattagaagtagaaccaaccaaccttacttgagaaaaaagagaagaagcattatccctcgaaaagagaaaaagcgaaacaaagatatttgggacatcgaacattttccctcttttcatgggcaaagcatttaaatctaatcttcactaattactagttataccttttccttactaattatcagacaattgaacatattgaccaagtcaacatattttatctgtaataattaattatctaccttacaatcaaaagatgaattcacaactaactaaataaatcacaagaaaaaataccagaaacaattccatgacattaatactcaataaacattcaactaagtgtctgctacaaaaaactcaggtttatttctcattattacttttgtgtttattatttttttgtaataaagatgcacaccaagaattaactttttgaaataaacaatattagaagagatccaagcgacaaaattcactgtaagctactaaagaaaaatagtagaaaacatagtactactacttaattgtctaatttgcttactaattaattagtttattgactaatcagaaaaagtaacatgtttgaagttagtgtttaagaattaatacaaatgttgcgtcatcatctctcgctgtcttgtcaaatctgtaactgcatatttatttataaatctctcttctctttactcattctcttctctctcactttctcaaacaatctctctctctggcatttggatttggaagtgctttttgtatatatatccaacaaaggaatcagatcggagatgtcggatgtttccggtgacggagatttatcggcgacggttactgaacatgaagtaactccacaaccgccggtttcttcggcgacgtatccgtcattaacggtgtcggcgtcttacaaagagagcagcggaggtaaaagctcgtcgaagaggagaccaataaggccgagtttcgacgctgcggctgataatgagtttattactttgcttcatggctcggatccagtgaaagtggagcttaatcgactagagaatgaagttagaggtctgataatgctgttcgatttttttattttttgtcgattcggtttctgattattggttgttggggggatgtagataaggatcgggagttaggagaagcaaacgctgagatcaaagcgcttaggttgtctgagagacaaagagagaaagctgttgaagaggtttgtttgtgtctgaattttgctatttttgtctgaagctttttcacattttaccaattcttaatcatttcttgatgttttggtaaattatctccatttttggttaagccaatcaataatggttgataaatttcacacatttagcaatttctcagggacgattattaatctctacatttttggttcaaccaatcaaataatggttgatgaatttcacatctgggtcactttattttactacaaagtcttagtttccttgttagttgaagaaataatttataatgaatttaggtgcatttatcgtagtgtggtatttgggcaatgtggttggagaagaacattcagaatttaactttgccttttagttttgatcaattataacatcatgtgtttgttcttgacttttatgtttttaacagtgggattttttatttacacattctcttcttgtggaatgaagtttcctctatgtttttttgttgttgttgtagcttactgaggagcttactaagttggatgagaagctcaagttgactgaatccattctcgaaagcaaagtattgttcgataatctttccttggttcgatgatgttcacctttcgtttcttaagcttatagacatatgatatcaaccttgctgcagaatctagaaatcaagaaaatcaatgaggaaaagaaagcatcaatggctgctcagtttgctgctgaagccactttaagaagagtccatgctgctcaaaaggatgatgacatgcctcctattgaagccatccttgctccattagaagctgaacttaagcttgcacgatcagaggtatattgtcattttaagtctaactgcttgctgtttactttcatatgggatattgaaagtttatgaggtcactgatcaaatctcttgtatctgtgtagattggaaagcttcaagaagataacagggctttggaccgtctgactaaatcaaaggaagctgccttacttgaagctgagaggaccgttgaagctgccatggcaaaagccgctatggttgatgatcttcagaataagaaccaggagctaatgaagcaaattgaaatctgtcaggttctgtggtcgccatcttgttctttgtatttacttaatctatggatttgccaacaatctgattaactttattttctgttttaggaagaaaacaaaattctagatagaatgcataggcagaaggttgctgaagtggaaaagcttactcagacagtacgagagctagaagaggctgttcttgcaggtggtgctgctgcaaatgccgtgagggattaccagcggaaatttcaagagatgaatgtaactaaacacacttcataaagtctctaatttcttgtcacaacaattgcctactgatgtaggaataattcttgtttttgtctttcaggaagagcggaaaactcttgaccgggagcttgcacgtgcaaaggttacagcaaacagagttgccactgtggtagcaaatgagtggaaagatggtaatgataaagtgatgcctgtgaagcaatggctcgaagaacgaaggtttctacaggtttactttgatatgatggcccctctcctagattcttaggacgcaaattatttgcagtgagcaaggcccatccatatctacattctcacttcttgatcctcaacttttttgcagggagaaatgcagcaacttcgtgataagctcgccataacagaccgggctgcaaaatccgaggcacagttaaaagtaacaaatcttatccattagtcagcttctttcagttgatcttgttacacagaacaagaagtaatatattttgtttgtgcaatttcaggagaagtttcaactgcggcttaaagtgcttgaggagacacttcgaggaacttcaagcagcgccaccaggaacacacccgaggcaagaagcatgagtaatggaccttctcgcaggcagtcgcttggtggagctgaaaacttacaaaaatttacatcaaacggtgctttatcaaagaaagctccagcatctcagatgaggcattcattgtctattaattcaacttcggtgttgaagaatgctaaaggaacatctaagtcatttgatggaggcacaagatccgtggatagaggcaaagcacttttaaacggacctgggaattattccttcaacaaggctactgatgactctaaggaagcagagtcaggtaatgggtggaaagaaaattcagaggagaagccacaaagtgaagaccctgaagcagcaactgaggacagtgtccctggtgttttgtatgatttactacagaaagaagtagtttctttgaggaaagcctctaatgaaaaggatcaaagcctcaaagacaaagatgatgccatcgaggtaagagttctgtttctttaagttctgtttctttatgccatattaatcttgtttaaagaagaacattcttgttgtaaacggaggaagtaatgatacgttgatgttcgtagatgctagcgaagaaggtggaaacattaacaaaggcaatggaggttgaagcaaaagaagatgagacgggaagtagctgcaatggaaaaagaagttgctgcaatgcgtgtggagaaagatcaggacgccagagccaaaaggttttcaaatagcaagagcccatccaacaccgcccagattcttgcgggaaggtagagctatgtggtttttcactttgtattacacatttcatggttagctataatgctatatacttcttagttcataatttggtattcaaactaaatttggagtttggatttgcgcagagctgctggacgaagtggcgggttaacgaagagtacccagtgaagggagattcaagaaaataacaagtaaaagaatgtccttggctcttgttattcagctgttttaaccttatatcatggcttttactttgtttttgtttacctcatgtgattggttgtatcaccatatataacttagcatgctgataatcccatcctcacacctataacctagtaaaaagataagaaagagagtttgtgacatagatttggtgttaaagtggttagagggaggagaagaaaagccgagggagagagtgagagatgttgacattttggctaacattttcatctctcttttcgggagttagtttgtttttggtgtataggtttggtatttggcttctctagagcttgtgtacctctgattccttttatttgtttgttactctattgcactctttgtgtgatttattcgtttgtattttgggtttgctgatatataatatatgatttgatatatttgaacaaatcacatcacaacaagtactcgaagatttcaaatcccaaaccaaacaaaactaagtaacatttggtattatgatgagtctcttagtcatacaaggcgtctgcagagagtgacaccatcgccaatggagacttgagagacctcgacgtgaggatcagcagcgagacgcttgttcaagtccaaaaaggcttttctgtttaccctcatgtgcactggcacgttttcctctttctccgccacaaaccctgaccacaatgtgttatcaaacgctatgactcctcctaccttcaccagcttcattagcctctcgtgcatgtttgcatagtttggtttatcagcgtcaacaaatgcgaaatcaaactctggttttggattctcctgtgctccattatcattcataaaccaatgtcatcaacttaagagaatagcataccaaaagagagaaaaatgaagactgattacttacactcaacatattgtctaaggcctgaagacaatcagagtggatgaaattgatcttgtgatgaacacctgcattctttatgaactccagtcccatctcgtaagcttctttatcaatatctattccagtaacctgttcatagatgctagctcttatcatttttgcttaatttgatttgtaaaaatcaaggagtgttgtgtacatacatgtccatcatgaggcaatgctagggccgtggtgagcaacgaataaccggtgaaaacaccaagctctatcgtctttttggcattcattatctttagaagcatagataggaaatgcccctcatcaaccggtacctccatctcgcttctacgcatacaagcacaaaccattttttcattactagtataatccttgaattgatgatctgataaattttacgactataccacaaaccacactaagctgctaagtcttgtcaaaatttgaaaatgtttatttttttggaaagtttaacaagaaaaaaaaattaacttatgcgagtggaagtacaaggtacatacatatttagtaggatctaacgtagtaacgttatgatacttgcaattattgttggaaagtatcagagtatgatcgtatagtagtactgtatatcttgcaaaatattagctcaactaagctataatgattatagaaatatggacaatagaggttgcagccagacttacaaattgccatacttgaggaccgtagcttctcgtaatttcttgagttgttcatgctctcttggatacgccgtcgtttcaaagatgtactgtttcacatataccaagttttgattcacaaccacaaccgtataatacatgagttggttcggatttagcattaatagaaaatcttaatcattaaacgataaagcttcacctcatcagacaaaactaactaaaaaatttcagatcaattagcatgcaagacttatggatccgaacaaaacagtaagtagagaaaaaaacctctatgaactaaaaagtgattaaaagacctttttgagagcgtcgctcttgagaatccctttaggcggaagcaatttagagggcggaagcagtttctccatagctctctctctctctctctctctcgacgccttcaactttaaaagctttgtaacacacgaacttacatgtctctattactctttttaaagagaatctgtaaaagtagtggcctagtaatgatattaacagctcgacaagtgtatacatctttcgtttttttttttttatgatggaagcctaaaccaccgccgacgatcggtttactattaaaaaaatgtgtcgtatgatattaagaatcatgacgttgtagtatattacattttctacaaccgcttcaactcaaactctaattgtaaagttttttcatgatgagttatgaaaataagtgtatttttatgatttaggtaatcaaattattatttttccttttaaaataagaagtcttttcatacaccactaattttccaaaaacaaataatgagatttacactagaaaattgaaatcggtgattgaaaatatggactgtatgacagttgctagcgtgacatatatatggcatggttggagcagaacttgagaaaaaaataaaggtatcgcaacaagcattcgacaattcaaatcccaaaccaaacaaaactaaagaaacatttaatattttgatgagtctcttaatcatacaaggcgtctgcatagagtgacaccatcacctacggagactagagagacctcgatgcgatgatcagcagctagccgcttgttcaactccaaaaagacttttctgttcaccctcatgtgctctggcacgtttcctctttctccgccacaaacccgtaccacaaagtgttatcaaacgctatgattcctcctacctaccttcaccagcttcattagtctctcgtgcatgttggcatagtttggtttatcagcatcaacaaatgcaaaatcaaactctggttttggattctcctgtgctccgatccattatcattcacaaaccaatgtcatcaaattaagaggaaaaaaatagtgtattttagtgctttctcgtgttatgttttctcaatatttgtctccgaaatctcatggattcatcgtcggtctatttttgtttttcttatgttgcatccctacatgcttttaatcgtattgttgtaatctctaagatggtagaacgtgtaataatctttgatatcgtttgagtataatatgattttcgataataataataaaaatcctaaatgcatacttctaattaagttgtttaaaaagtaaaagaaataaagaatctacaaagaaatattatggactgattttgaaagacccaataacaaaggcccattaaaagcccatttactcaaagatagagctagggtttactcgccccagctcagcctccctcttccagagccatataaatgacgcagtgatgaaattatcacattaccaatcacttttagtcgttttgatacttctgttctctctttattgattttttcacgcgtattgattctattatcgttgttttgggttttgataaaattctttcaaatctagcgatgtttttcaatttgtgtagaaattgcctccgatgatgatcaaatcataactttcgttcttccgagattttatcatgcggagaaattatggagacctgaactgagctgaggcaatttcatcatctcttttctttttgtttttacaaattatggtgtcttttttatctggggtaagctcttatgatgtcaaaactttcgttctcctgagatttcaatatgctgaaaaaaattggagacctgaactgaaagagtacttatttctttgaaaacccttttttgctctattgtttttgttttcgtgactattttcttatggtttcataaaaaataaattaatgacccaaaataatgagcttgattttggattatcacaggcaacaaggtgttaagaaaataggaataactgataattttgggaattaaaacttgtaattgatgattatttcttgcttagtttaacttgaaacaaacagattgtatggtcacattattctctgactaattcaataagttgaaatcattaaaagaattcagaaatctgactcatgactattccacaagaagaacagaatcaatctgcattagtctacctttacatcattggattgtgatgagattaagccataggtttggataagataactaccttagcacactgataacaaccgaggaaaattacagcataaggaattatttgccatcagcttatataccaaaagcgtgactttaactaaagacatattactcttgatttcgccgaagttaatggaaatcaatgggcataatcaacattacaactccacatatccccattgcaaaccaaaagttgtaactatttcagtgtttagctgagcaaagtgacatgattaataaaaccggggcaggtcaaagctatataatttgatgaaccatttgttattattgtcttcagatgcttttttttctcacatagaaaatccccaaacaaaattcgatatttgttacactatcaatttccctggctagctacagtttacaagctcagtcataaatcatctgaaaaaaatttcgaataagtcaattgctatgaatatatctgaagtctggcaagtcatttatcaaactcggcggagccaaatgacaaagtagacccgcacggtcattgaatagtacgtgtacaacataagcagtgttcaataccagtatttgtctctctcttcgttgaacaaaccaaaggatctgcaaatcatcactctctacttccgatctctccgcttccgctctgctctcctcttgtcgtcttcccattcacggtcatagattctagagcaatgtcaaggaaattgctattcttggatttggattttgcaattctgaagataccattcaatgatgcatcatataaggatttgaatcatgatgcaatactcaagcagagagattttataagttggctcttttatttaaggatacgggtcaggatcacgacgagccattttgctggaagcttcttttccaagaagtctgatgcttggctcttcaagataacctccgtgttgaatcatactactgctcttccgctctctgccttcgtacgatgatggtcccatactggtcgataaagacgaatgatgtggcataggagagtattctcctggctctgcagatgggacctgttgctccctcttaagcttccttctcttggaggcttcaaaatcctctttcaaagggaggcttttttctctttccctctctctttccctttccctttctctttcttctccctgcatagagtagataagatgtttattcctatagtcaaatagggagatctctgcggaaaacacttcatcgagtttctcccttttaatgataaaaactaaccaaatgtatcaaacaaaataaccacttaaagaaatcagaaacgaataaccataacaaaaaaatagataagacaaagaaccatgatgatgcagctactgccgatattctgcagttcctaatatgtaaagagggagctataccttcacagtgattgtttctcggtcatctcgctttcggtccctaatatcatcatctcttctacgttttgcatcatccacagaaactgataaattctcttcagagcgtcgtttctctctttcttcatgcctcggggaaagcctctgagaatgccttgcaccgccagcccttctttcgaggtcttcttttgcggccatagaatgtggaatgatgttaggaggtaaaggtggaggtgggggtaaaccttgagaatgaaaatggtcatcaggatgagatttctcaagtgatgcttcactatgacgcagtttgcttctatcatctttgtttctttcatccttgtttctatcataactcctagttgttcctttatctagacccttctcaactgagcgttctctaccatgacgttccaaggatttgtctcgtgctttctcaacatcatctccacgaggtttatcagaacgatcgactctttctctgtggtctcgatcctgtctttcataacccttatcctttgatctatcttgatccctatgggtgctttggtcatcagtaactgttttgtttaaatccaatcgggcctcgactgatctatctcggtcactcgatcgaggctcactgtcatgctctttgtgctcagcatctcctttacgacgtttacttatcctttcactatcttcaacagcattagctcgtttttgtaacctatcactggatctcacagaagtgacaatttcatgcctaggggaatgaacagtccgagaagattgcttttgtgcatccaaagcttcagcgccatcatcttttactgcttcagaaattaaagtcagaataccttcaacttacattagcttctacgaatatctaatagttttgtgggtgagatcaaacctttggacgacccagtagctatgctaccattggctgctgtgctggaaagagctttggtcaaacctgattgcctgctctccagataattaagatctttgtcagctgtggatgttcttccaatagctttaccggactttccatcatcttttccaaaatcttgctttgcagatttgttcactgacgcacctcgtttagaggaagcttttaactgccagccaaaaataattatacataatacaaagttagatccccaaaacttcctgaatagctgattagctgaattttttcagctaccagtttccaacataaaaagggtgaaggcgaagagtgtagattgtagcatattgcatcatattaaacaattgaccttagagctctcactcacaacccaggtcccacgtgataggttaaacacattccttatgtctacccttaaatcaggtatccccaaaatataaattctaagcattacttcccctaaatcagtcctttagaaaataattaacaagaaagtagaattggctctaccaaacaaataagatagaatgggcaggataactttcctacataatttctgtgaacacatactagtgacaaaatttggtttcacaaataaagtagggattggtaacctaagaaataaaagagaaaaaatagcatggccatacctcggcttcagaatattttgaagcaggtttgacaggattctcgtcagatattctgggtgtttcatctgtttccttttgttccattgacttcttagatatggatggttgggaatccaatggattgcctccctttgattttagatgtccttgatcagattttgaaggtatactttccgttcttccatctagaggtttagttttcaacatctggtccttgcccaatccaccagactcaggctgctggttaacagtagctctttccccagttggttcaccttgggagacaccaactaacaagccattctgggaagaagcatgttttggagtatgtactggcggagcctttagttcaaggaagcccatgctaaattcttcgtctgtaacccaatgtggctgcaaataaacgacattcagtgaaattgtataaaacactgaacatgaaattgctatggttagcactcacttttcttgcagacagagcagccccaacaccagttgctaagaccttaaggtcctctcgctcatcatttttaatcttggctacctgaaagaccaaaccaccaaagaaaggaaagattaatcttttcacaaaaaaaacacagggaaagatagaaatcacactaattgaaagcagattcataagaatagctcgtcaagaggtacttgcccgtttctcaaggtttatcccagttttccgagtaactgggaaaacaccagatatttttgttaacataataagggcattacgaatctccatatactcattagactccagacactggatcaaaagtcgtgtgattcttccactccatttccaatgtacctttcagatcaacagatgaaacagacatgaaacacagaaggaacaagactttgttaccattaattgaagcagaacacgtgatagctaaatactgtagaagacagttctagagtttatatcacctaaaacttgagacaagttaaaaagtttatacgactaaaagtaatagatatacaagtcagggatcagaatttcaaaccttcacaaattgtccaaatgtgacacgctggctgttcgggtatctataataaacagcaaaccctggcatgtttccgcactcatgttcatagactgattctttactctgagaaaagattagaaacaacaacagcattagtaactaggttagaaagaaaaccccgattctatactttgattgtcaaagaataataatattcaatagttaccttccagtggtatgcaatcttcaaggtctcaaacaaaaacctccccagtcttccaacttcatattcagtacagcagcagatcattggttgcagcgttttacatatcaggacatcaatgtggttgacagtgttaaaaaagggtgttccaagcgagtgaagcatatttacaaacatcgcgcagtacacagaatctgccatgctaaatgtgcaacgagggaaaatacaacgctgcaggaactccatattaatcttcaaagtatctggacaggagctcaaccatgtatccttttcacgtgaaagccttctacggacagaagccacatgttcttcatgctttttcagctcaccggttagacgatcaagagactcttgaatcctttccttctctttcttcctcttggtaattgctgagctagaattatcagcaacctcttcaagtgtcttaagggcagtatgctgtttagatatctcagactcataacgatttctggggacatggagatcataaagcgtaagcccccaaaatgtagcgtagaggtctggcgatagactattccaagcttttgagggcagcattgtccttactgtatcaagaacatcagaccacctgcaaacacattgatgaagtaattaaatgcaattaaataactaattactttacagcaagaggaactccaatagatcagcatctacttgtaatgcaattaaataactaattcttatcactttaaatctttagaaagagactatttgaactacaaccaaatatactacaggttgagttgaaatcttacgttacagctttttcagatgtaccgacatcgagaatcatggaactctcagactctgatatttcagaatccgcatccatagattccccactatctaaaggccatgaaacatcaccattccgtcgacacttgaagagcctcatcacagggcgaaataccaaaaatgcgacctggcatgggatttataacataagtctgggtttcaaaatgcagagcagtaatcactaaaaggcggctatagtagctaacgatgtagactagaaaaagtcaacaattcatattgttgaagagtgaggcaacctctgcttcgagatggtatgtatgaacaagctcatcaagcgaaggtaccagccgagcataagcagtagtaggactgacagcactagaaaggaagtccacgtattggagaagaattccatgacatctgtcgaactgttcagtgaccatcttaatataaggcgcatccgcattcaccacaactctgcatatcaggaagcttacattataatagaataaatcatgaacatcatggtttgttgactaaatgaatgtgtacagcacaatactcaatttagagacaggaacattgtccatagtcacaccaaaatatataacaatgtatataaagtttttagacatcgatttctttttccgtgccaatttatgtttccaggtataatgatgtgcatcctgctccagtaaagacgtgtatgctctatgcaaacaattaatgcacacttctaaaatgtcaaacaattttgagtgttcagatttgtctacttacagagaacgatgctgcgcgataagtaacaaaagggggatagctaactttggttcatcatttggaagtaacgaatctcgtagacggtttgatgatttgataagtgcctgaagaaaaacaggaagatgaatcagaaatgtttaagaactaagatacgtcaatgatatcctaggtaaataaacaaacttattaacactgatgccactatcgcaagcacatttgtttttatctacatagtgcctagtatctatagaagaatagatgaggtgttaaatgaaaagcctttcttacaagaccagacattctaaatgaatgacttcaaacaaaacaaattttccacaacccttcacatgtttgtaaaaaacatgtatgcatgcaaatgcatatataaaacgcacaccagtgttagcataaacagatgcaaaagcttataaaagcacttgtggtaagcaccaatgcttggctctttcaagattcagtaagttattttgaatttttgaagatcaaaaagacaaaccttgttgtttcgcatcatgccaaatgatgttgcatgataacgtaaagtctcacttcctgccatggcatccaactgatcttcagtaaggttctcagtgtattgtacatttgccatctgctggaccagttcctacagtcattatgaaattacagtcagccacccttagtctgaataagtacataagaattacaaaccaaaagcgtacctggagaagaacaagctcaatcccttggcccctctttaactggtttacgagatactgaaaaagacccctcaactccattgatggatacttcttacacctgaaaaacatgatataggttacgaagacattccaaaaagattgcagtacagcttttattactttctgaataacattatatgtgcatcttgcagtaagagagttggaggaatggcaatcaaggaaaaagatagagcagtcaagaaacctaacaggaagaacacatgaaaaaacctaaagcttaaagcaaagcacgactcatcctctcaggcaaactagcatagatcatgtgagcaatatggaaaagctcaacttctgcagaaagtaaatatcatccaaaattccagcaaattaaattactagcataaacaactgattatcgaaaagattaaaagggtaaaatcaaaacacaaaggcaatccaaaattgaccaaccaaaatcttacaacaacacgtcttcaagagaatgaacacttaaagtcaacatagaagatggaagggtactaacaaattcaccaagtaaccacaatggttttaaacatcagaaatacaagttcactctttaaacagttttacactaaaacaatactgcatttttctttctatcctcggcataacagaaatatgcctgctgtacgcaattaatctttctaaataagtactgaaactatttatagcatgtattaatgtttccaaagaagaacacatacaggtgaccccaaaaggatgccaaagattgaagccagtctgataaattaatcccgtcgtctttaagtttatctcgtccgctttgtgccagtctctcaatcactacatattccaggatatcatactcaagctgtgcatcaggaataatttagaaagaatcagagcgtgcataacagaggcagaaacatctcaaaaacaacaataagttgacaaggaaagctgacttcaggtaacttagcaaacaaaagattgttgctagaacgataaatataaacatttattgaaaaacctcttagaatattcggatcaatctgattgcatcctaatttttaatgactattacttcattattgcctaagctcaaccaaaccaacaaatctccatatcccacatttaaacctaccccagagtgaatgctagactgaatgtgtaacatgtatcagtagaaaacctacaaagccaaatcataatcactcaaaagtcccatccatctatctcatcaaaattgcattttttcgaccaaatggacaaaaacctgggagagtaagggcataaggtgaaatgagcatatcatacaaaaaagacaaaagaaaaggggtcacggacctgtgtcaagtacttgaaggcatccacaacaggagcaatcatatctctgtatgcttcaatctgtgtaacaagaacatgacagttagccccgtcagaacaattcaattacaaaatagaagcaacgcaacagtttgtagtagatcgacacctgatttacaattgtccgaagcaccgtcatgggattggcatgagctagttttgccaccatccttcctaactgcttcagattttcttttgcaagccgtttcagaattcttctagtatccaactgacatacgagagtagtctcatgaggatctggaggatgtatctttccatttgtattatatgagaatcaaaggagtcatactactatacctttgccacttgccttgctgccaacaacaaaggattctgctcatcgtccttttcccactcaccatataagcgataacgagcctaaatacgaaattaatcagtaatattgaaaatcacattctacacaaagatatttggaacaaataaacagtagcaagtcaacctcatatggaaggagactcatcacttcccaaatctcatgaccaactgctggatttgcaggtactaactgtaacgatggcagaagacatgttcctagagcttcttccactctcaacctaacttctttcaggtgcccacgagaaacttcatatgcactaccttcttgatttgacccatcgcgaacaagatccaaggccgacaagtagtaagcccttaatactctacaaatctgccaccgtgataaatatatatcagcttcaatctttaattttgtatagaacattcaatattttaaaggtcagcgcaccttctgcaacaattgtgtattgcggtagaggtagggtccaacagtaacaagcatttgaaacacttctttcggaagatctagataagtcctattagctgtcgtattagcagtgggtgtgagcttaactgtgctcgcagaagaagaactttgaaaacgtgtctgacgagcaatgcgataagaatgagtgattgacttctctataagcctgaaaacatagaccaaaaaaatcattgttgtcatcatagattagtggccagagctgcagtatctctttggatacatagagctgaagatgcaaagaaatgaagccgctataaatctggtgcagaatagtttgcgctaaaggattactcactaacctaaacaacccactacagatctgatcgtgtgccactggattaagaggtgcaagacgctcgaacaagatatttgcatgatacctgaaaagaagtgagttaatataaaaataataagaaaaagagctttcacctcagttgagcagaaaggggaagattaattagcaagcttttaatataagttaaatatacaaaatagctttgtatgtaaacaaattttctaggatagtatggatcctgagatgtgaattcggcagaagacaccagtaacagtcatccaatatgccctcaagttcaattttcaagttacagaaggtgatgcaattatcaaaaaaataacaatcatatatagagtactccacgaagaaatctcatgctcatgaagaataataaaacttaaaatttaacatgcactggttcaagaaacctgttaaccaaatggactggtttgacgacagtggatttgttaagtaaaaagatatgattcggtgttcataccaatcgtccacagagaggaaaccattaagtaggcccagagtctgattattttcaagctctggtaatcgctcagtaacagcttcactttccatgtctaaagcagcaaagagatctactgtgacatctccttgcttctcatcttccataagatccttcccagtagcagcgagattaatctttccaattttattggcctgtataaaaggaaggacttgtaaaaataataactcatgaataaatctatgaaagtaaaaaacaaaaaacaaaaaataattggctggcttccaggaagatggagaagtgcttagtatctaagtatttattaaatttatgaaggcaagattagcagattaccacaagagcagagaaaccatgtttgttcgtttgtctcaagggaaaaaaaggttttaacacataagaaacatatagacaacttacggtaggccagaacaaaactatcttaaaacatctctaagcataaggacgaggtcatatattgaactgtacctcttcaaaccgctttgcagaagaaacattataatcctcaaaaacttcctcgtccttaggtagcagatgtgcatatctgttcacaacagccaggcaaaaaagtataagaatattgggtccatacattcagtatgatttcacttgttagaggcacaaagaaatgtagcaatctagtaatcaccgaatcagtacactgatgaaataagttaatgaattgagtgagttgctcacgagaaaataaattaagtctactagctagtcctccttaagagcaatctcaaagtaaaaaagtaactttcagagtacagtaagaaacaaacttaaaattgataccaaacaactagaaacaagagacaggtgcagaagagaagagaatctttcatttacattccaactgatctagtcctattctcaatgaaaaaaaaaactcgttatgaagaagacatgtacaagaatccaattagaaagaagacttcagtctgcaaaaaaggataaaaaccagtgtgcaagtataaccttattctcacataatgaaaagaaaagaaatcgtcatgaagaagactacctacaagtatccaattagtaaggagacttcagtctacgacaaaagataaaaccagtatactttcttaaggctacacataatgctcgattttgaatattcccgagaggctccaaagaccttgaaagcaagaaaggaaagggcggaaaaaacagttgaagaaaaaactactcacatgctttcaagattgataaactcttcctttactagcaaggctgtaagcttatagagcccaactggaacagggctattcacctctagtctctgatagtattggaatttaaatccaagaatttgtgaagcatgagactgcacatgaaaattattttttttagcaaaaaatagtctcttgagctaagcattagaagataaaaatacgaggaagacattccaaaccttgggaaagataggaattagattgagaaatgtgtcgtaatcttgttcgagttcaaagcaatctaaaacctattcatcaaaaacaaagggtacattattactaatcgggaaggacagattgatgcgttatgcaatatcaaacaaaaatatgacagaagcaacagtgaaaacttacaatgtcgaaaacacggtttggatccaggtcaaaatgcccaattaatgactgcaagaaaatataaagttcagaaaaagtaaatgggcgaaatataatgtattggccgaatcaaaaccttgataattcccatcgttgctgctgatgcattgtgcgaagaacttgcagatcctcggcacaaaagagtggcctgcactccacaaaaaggaactgctataagttggtgtatgtataatctgacttaatcgaatctctactgagataatatgttcattactctgcacagttataggtaataaaactagcagaagatatgccttccaactggaaccgtgtgaaaaggaaaggccaaatcagcattgttgaaaagatcatcccttccaaaaactaaaggggtattccttaaagttgtgtttcagaaaaaacagaagtaaagagtatctaagaaaagacaatagaaacgaagtggacagaaagaatgacaatagataaaaaaaaaaaaaaaaaaaaaaactagactgctagagatcttctataacgaaccaatttggcatatccctcgctttcttcacggagtaagttgaactttgtctgctggtacagaagacgagtgtttaatcgcacctgagaagcatcaaccagaattgttacttataaacaatgagcagtagttacacaggtaaagtagaaattcttataagcattaatctttcgcaatagcaattcactcagagtaactattacgtaaatcagagcacagtgcagctgcattgatgactaaagtgtgaagtcatattaatacagcagttacagaagtgtgaagtcctcacctctttccccttcaaatcttgggcctttattttaaccatatcagcttcccagagaaactcctcctaaaataaaataaataaaacgccttcagaaaattttcttcttactgatcaagaaaatagagaggttaagtgggtggggtacaaactactcaaattgggaataataacaaacattttaggacttgcccgctcctatcctttacatctacagcaagaagaagagggctattccgtgagaccagctggtccactggatctttgaggacaattcttcagtcttaagggattaatgtgacattcgaaacaggctacagccttgaagttaacttctataactaccttagcagctacaataactattatttagcagtctctatctatcactccagacttgttcaagctacggtttctatgatgggcagtaggattgcatgatgcacatgctatatagatgaggggtaccagtgagggagttatcgagaactagtgaaaggtggaaggggggataagaggggactctattaagaaacctctcaaagctgtattttcttgttttaagttctattaatataaagattctctacgtattactctgtttcattggctgaacgtaacataatgtttacctcgcaacgctcttggaaaagcctttgagggactgtctgtgattccacaagccatttcgcctaccaaaaaagaacaattggttcattagctgtgagcatagaaaccttgaggagatggtaaatgagaacagaaagaatattttaaggaagaaactaaagtacgcaatcatcaaattcaataaaataagacatatgctaacaactcctctgtaagcagctcatcagagaacattggatcaagcatacaaggaaaattcaataccaaactacgctaatagatcatctaaggcactatggtcaaagtttcagctccttaggatgaagtagccttttacaatcaggaactttcttgcaacctgcccaggatgagccatcggttggttgaaccttaggacactactgatagctatacaccacatgcctaatctattcataggatgttactttttgtgatcactaatatctaaagagctagaattatctttcctcaagactaacaaatccaaacaatgatcaattttcaaaacgtaaaataaattctagcactcaccaatttgattagacgagaacgttgatctcccgacatggtaagctgcaaaacaaagcaaagagaacacgaacccaatcaatccaacgatcagtatcaataaccttgcacaatcatctctgagctaaggatgtcaaaactgtaattggacttacgtcttgagctatctgagtcacaacatccgcaaaacacgaagctaattcttctctcgatggcttatccaaaaactccacaccttccaacactgccttacagctctgaattggcaattcgccacgaacctaataatccatcacgaggcaccgttgaggaactcgaacaacatatacgcgtgattggatagtagtaggaagagaaggtggtgtttgtgtgtataccaaaatccaagagagctcgtagaggaaacgaagcatcggcacagagctgggcagcttggttccatagttgccattcttaccttcacgaacaaactcctccgtcacgtacttacactccagtagcggaagagacatcttaaacccctttcgtgtgtatgtatgtatatctttcactctcctcccttttcgaaaccctagaagattaagaaaatagggtttagacttcgattggcgaccagaaaataagcattccgataagatgaaaagggagaggaacgaacaattttgatcagagaagaaaaagagaaattagggtttttgagagattatttgatttggtggaagtaaattgaagacgatgatgatgacggtgtgaagatgatgcaaatatgtttttgattttgcagaagaggggactattcttttcctttttctactacttaccgattttgtttttctgtcgtcttttgtttcagcaaattatgttgtatacaatttcaatacaaaaccgggtccggttaagtcgtatgattttgttttgaatgggcgtgaaactatgaattggttgttattgaacaagcccatgggctcagatgatctttgagtccaccacgatactactaacaaggcaattaggcaaatatcgaattaaaaatgttaattacatcttttggtcctaacagatataaacaaatagaaagcaacgagtacaagtactagctagtaacataccaaattaactaaaatatggaaaccaaaacctaaaaaatttctcagcgttcttcgctccattcccgttttcaaccagaatcgttaactactcgggacaaaaaaacgatcaaagaaagtcagaaaagatccataagcaattgaaaagttgatccaacttacagtcatcttctccttcttctcctcctcgtcctcctttgctcaagaaacaacaacaaaagaaaacgggtcggtttgaccaacgttattcgaaagctatttgttttaggtctggcctgtttataaactcattatgttaaaatctaatccgctaaaagtcatttatagttaaacttaatgtgcctgtattggcgcgagggctgctgttattttgttatgttcaaatcagtgcttccaaattgcctcgtctagaattaaagaatatgcttagaagaatttttgttatatattaaacattttggtttttgttaggttttttggatcacttataatttgtaatgttgaattcatttgtttttttttattagtcaaccagactttccgacattatctattattaactacatgtttgtgtttcagtttaactaatttattaaggccataggaaaatcgtcaaatactaaccacacgaaataactatagatactgtactttggtgtcattaaattcaaattggagtttcatattacccgaaaaatgaatcgttttataatttttatgttagttgttgcgacgtattttggattgcttgtatcagttttgtcttgtaaacgtaacacaattgaaattatgaatgatcttggtcccggtttggttctctagtatcatcgtcattcaaaagacgacaatttagacgtcgcaaatttacaattcaaggaactaaaacaaatccgtttcggagacatgtttggaagaaggacaagatggacttgtcttttgaaacacggcttatacatgcgatattataaagattttgtagcatatagagcagccaacattgatcgatgtgatgctctacgtcgttagattgctagaaatgatggaatttaccttgtgagaaatagaaatcctcaaccaaagttccatcatgcatggaataaaactaagtaatgttgatgaaaatactatttttgttgtctttacaatttacgtcaacattcttcgtaacctaaaaaaaaaaaaaaatcttcataacctagggttataatttatagcaaatcaaatatgtatccattatatggaaaacgaatacaaactacttttccgatccagacaaacagacagtgtgtcgtcttttttaatttttttgtattaaatctgattagaaatcaaacagtataattatgttaagtgcaagagacaaaaccgtgtctgttttagcccaacagtgtcacccgaaacaaatccattcctaggaatatagaaagaaaattaaaacaaacaaagaacaatttagaaaagacaccaattaacacacaacacaaagacaaatcataattaggatgcttccataagatagagaattaggaaacaagaaacgtcctctttaagacaactgttcttccctagctccgaactcctcgatcatcatgttcttgttcattttcgcgtggatcttggaacagtttgcaaggcttgagcaagcatgaattaggtccaccaacattcccagttgaaataacaggatgcttttttgagatcaccacggagttgataacatcatttgttgggtgataaatagacaaaaaaaaaaaagtctttttctttcctttttctactacagaccgattttgtttttctgtcgacttttgtttcagcataaaatagaagaaattatgttgtatacaatttcaatacaaaaccatgtccggtttagtcgtatgattttgtttgagtgggcgttaaactatgaaatggttgttattgaactagtccatgggctcagatgatctttgactccaccacgatattaccaacaaggcaattaggcaaatatcgaattaaaaattttaattacatcttttggtccttctaacagtaacagatataataaacaaatagagcaacgagtacaagtattagttgacacaaacgacaacagaaatagacagtaatcaagtttcgttcctttggtttttgatttttatgatcttcgaccaaatcacgtgatctaaaacattgactttgatcattaaatcactgcaatgctttcagttaatttctgacgtagaatcataaagagacgtcgttgtgtatctgacgaccacacaatattttctgattattaaaagatacacttgttctacaagtgaattacaacatcatataaattttacacatccagaatctggatcttttatctatatagcaaattagcaagcactcttttgaacaatgaagcatgcatgctttatctaccaagaaagtaacaaagagtatcaatcatatacaagataactagagagctgaaactaggtagagagcattatacctcccatatcagaagccattaaaatctaatctttgtacttgatagttaccactgaggttccagtaacaaaacgggtacctaccaaaatcaactaaaaatatgaaaacctaaacctaattattttccgagattcaagaacactaaaagagagattttacaatgttctttgggattcagcctcatcattcttcgctccattcccgttctcaaccggaataatgagcacgattagagaaagtcataacagatccatgagcaattggaaatttgatctgacttacagtcatcttttcagaaactcgaatgtcttaacgatctcatcttcttcttcttcttcttctttataaactcattatgttaaaatctagtccgctaaaggtcatttatagttaaacttaatgtacatgcatttgcctaagggctgctgttattttgttatgttcaaatcagttcttccaaattgtctcgtccggaattaaattaatatacttgcaaaaaaatttgttatatcttaaattttggtttttgttagttttttttggatcactaataatttgtaatgttgaattcatttggctttttttattagtcaacaatacttttagacattatctattattaactaacatgtttgtgtttcaatttaactaattcattaaggccataggaaaatcgtcaaatactaaccacacaaaataactatagatactgtactttggtgtcattaaattcaaattggactttcatgttacccaaaaaatgaatcgttttataatttttatgtttgttattgcgacgtattttggattgcttgtatcagttctgtcttgtaaacgtaacacaattgaaattatgaacgagcttggtcccggtttggttctccagtatcattgtcattcaagagacgacaatctagacgtagcaaatttataatttaaggaaataaaacaaatccgtttcggagacaagctaggaagaagaacaagatggacttgtcttttgaaacacggcttatacatgcgatattataaagaattcatagcatatagagcaggcaacattgaccgatgtggtgctctgcgtcgttgggttgttagaaatgatggaatttaccttgtgagggatcgaaatcctcaaccaaagttccatcatgcatggaataaaactaagtaatgttgatgacaatacaatttttttgtttttgacccaaaatgtgcctaaatttgtattagccccgtataatctccattaattgatggattacatgaaagctaaatgagataatttgttgtgttttttccattcttctgtattaaaaaataagacaaggcctgaatgtttccatgtagagacaactcgtaggagacaactaaaaaaaaagtttgatgcctgatcatttatgtacgtagcatatgatgtaaagcacaataaaaatgtacaaattgtgatgtacaatgtcttaaaccataaaagaaatcagttgaaattcgggaaaactataaaataaaaaattatatatgtcaaaccatttgactcaaatgatacatcaatcaaaataaattcttgagacaatgccaatgcccaacctaaacttctaaatatctagaaagtgtccagctagtctacgacaaaagaccaaaacacgtgtccaatttaagcatatgggttccattcgtgcgaaaaggacaccctaacttgaaaaggaaggtaaccaacaagatatattcactatccgcaaacctaaaacaagaactcatccaacagcaaaacctttctcattccatgttccagctaattctctaacacattttacctcccttgtcctgatttgaatgtgctttcaagctcggaaggtcgcgaaggtatgctcgtcagagtattatctccaaaaaaacacgaatcaagaataagttgaggaagaggagtgtcgtaatcaattccatagatatcttccgagtcactgcttcgttctgtgggtttccattgtacaacaagtgagaccaacacgttgacaacgtgattcatgtcgggtctatctcgcggttccctggagctacattgattggcaagctcagctactatgttgatgcttctgagtgtctcttcgttgacctccattgcttcgtctatcgcctttgggaatgagcctttgttgataaacattctcctaaaccatgtggcaagatgtacttcttcctcagatcgtgcaacatcaagagcttttcgacccgttagtagctccatgaggatgactccaaagctgtaaacatcaacctttgttgtaactcttccggtcactgcaatgtacatagagatttcaatattttacatttagtgagtttagaacgagtagcaacatacaaaataagcataaaaccatacctgcatactctggtgcaagataaccaaatgttccagcaatcttggtctcaattgattgtgtaccttctggtgcaagccggactaaaccaaaatcagcaactttagcatgcatgtcatctccaagaagaatattagaaggtttaagatctctgtgtatgaaactttgatgtgctaaagtatgcaaatactcaactcctctagccacatccaatgcaataatcaaccgtctagtccactcgagaggcctcaacccttcttccttccaatagaaaatatgcctacttaatgtcccttgtggcatgtactgataaacaagaagtctctcattgccttctaagcaataaccatgaagaaccactagatttcggtggcgaactctagtaagaacagcaatctctgatttaaactcatctaaaccctttccacttataatcgaagattccattctcttaaccgcaatctttgttccatcatgcaactctcccttgtaaactattccaaatcctcctctcccaagtatattcttctcatcgaaattatatgtagcatccctcaaaacttgtattgagatcacaatatttccagcttctcctagatgagcgtcattaccactgaatccactttcactaacaccagtacacagattctcaattgtaatcttgaacgcatcttggtcactagattgttgttgaggatgcatcttatgatattgcatctttttcttgaccaaaaagaaaatagcaacccctataagaagcaaagctaacaaaataccaataacagaaccaacaattttcccagcattactagatgctttctttccagcattgccattaggacagtcctcaaaattcccagtcgtgttaacaatagttgtgttaaaacgaggtacttcaccacacaaccgattcttcgaaacatccagtgttttcaagttactcaacttagcgagctcttgtggaatagtaccattaagattattctgagagagattaataacacgaagagacgcaaaatcagcaaatcgtggagatatagtgccgttgagccccaagtttttgaagttgataactgtgatatcagttccagtacaagtgatccctacccatccactacaaggatcatttcctttccatttctccgcaaaattcaccgggtaaccaaaggcttcaacgattgaaagcaacgtgttgacacggggatcacaagaagtacctggagtatctaagcagaaactattgagaccattcagatcaggcttaatgtcaggagccgtgaagtttggagttggtccttgaagcaagttattacctaaagcaacatcagaaagagattgcagctcaaacaaagaagagggaacgagacccgaaagctgattctccctaacattgaaacttttcaacgagactaaaccagaaaagtctggtaaaggaccggagaagctgttcccttgcagcgtaacattggtcaaagaagtcatcttttgcagaaacgaaattgacccatgaagcttctcccttcccttttgcccgttaagcatcagaacttgaacacgtgagtcggagaaattcatgggaaattcacatacaagcgagttataagacagtttcagagtcgtcaaactagagaaatctttcccctcgaagagataatccgggatcttcccggaaagattgcagttgacagcagagaaatctacaagggaagtcgcgttttccaaactcggaggtatcacccaagaatcaaaaggattgttatccagagaaacatgctgaagagaactcaaaccagagaagaaatcctcagggacagaagtgaaatcattgtcattagcatacacagttaccaacgatttcaacccagcaagactcggtattggtcctgttaaacggttcctcatgacctcgaacttcgtcaaagatgttagctttccgagatcaggaggtagctttcctgagattcctctgtccccgatttggatcgcggtgacccgattgcttgcgtcgcattttatgaacatagaccacttacaaggatccgacccggaccagtttggatttccagatagcttcaaggagtctctcagagctatcatgaccgcctcatcagggctcgattcaacgttcaccaaggcaatgaaacagagcaaaaggaggaagttttttgcgatcattatctttttttttcaactgagaaacaaacgcagggaggcgttgattcacagacagtgatagattagggcttaaagacttcaaaggaagaaactttttgggcggagattttcttcttcttcttgaattgaatgagaaaggaaaaaacgaaacggcagattttattgctttttttggaaatattaaattgacttgagcgagggaagtgcttttattgttatttcccatttcttggttttgttaataaatgatttgtttccttttcatctgaccaaggaaagaatgttaaaggacgcaatctttctgtatttacaggcccagatatataaaaatcatagattttaaggcccagtattattttcttttttcttttgtgtaactaggcccagtatcttattttagtttctttatttgctgaaatagcattttaacaaaatgcatttgcactgttcgtaaatctacatttctttattatattttcttttttgtatttttttttactgagatttgtttctttttaaaaataatgaaaattccaaaactctcatttatttattttggaacggttttatagttttaggcttttagcattataaaattgaatacaactgaaatatatatgattataataaactaaaaagaaacttacttttattgatagtaaattataattgtcaaatatcatatattttttctcattggaagttctataatcatttggaccagtcctaccatttaacggtggtgtttttgataaactgaggaaaattactgttaggaaaaactttaaaagtaagggttatcatgatcaagttcgtagcaaatgacaaattcgatattcaataacacagagctattctagcaaccaaactgaggtcttacatctatgcatattattgagtcaaataattagatgattatcctctttgtttgctcctttttttattactttatttttaggtcaagtttgaagttgggtactcacaaaaataccttttttttttgtcatctggattatattagaaaattaaaagtttcagaatatgaaaccaccgattacaaggctaaactaaaccaaagtgaagcgaacaagttagcctaccacaagacccaactccaacatattcaaaagtggtctaaacaaaaaagaataagctctgaaccatcgagcaccacataagccaaaccctccatatacaaaccattgatctcaaacactgagcatcaacaccaaaacgacttctcactatcaaacagaatacaaacctctttcttcaacaaacacaccattcatccaataaggatgccccacagccacataggattgagaccgagacgcctccgtaacactttgggcgatgaggtttgctcctctgtttgcagcagaaaattccaattccaccttccacaccaaaaaaggtaactatgatctatttaaagccacactctgagctttaaaagaaggccacgcccttggtctcaacactgcaccaatcagagacttatcttgaaaggcaaagataatattatcaattttatgactggccatactctccatagcccataggagacatctgagcaaagcatcagccttgctagagataggagcaaaagaacgtctactgtgtaacaacactataccatcctgatctcttaaaacccaagcccctccagcaaaattgtttcttttttaccaagaagccccaatgttacatttaacccaattcgctggaggtttaatccataaattctccgatacactgcctacaaaatgaacaccattactcaggggaggattaagggcagaaccctcaccatctaagcattgagcttcaaaccattccaccacatcatccctaatctttatcactgtatcagtagctgggtagcttatcccctcaaagatgaaagagttcctatttttccaaatcctccacaaaatccatggaaaaattttcctgaggttaataggccattctttattatctttgttctccaagagatgattgatgttggaataaatagagccgttactaaaaccatcaggaggaaaaggataatcagaaagagcccaaatttgtctagagagtgggcatagaaacaaggtatgattcgtcgattccccaagctcaccacagacctgacatgtggtatcaacgacattcctctaccattcaagttctcggcaaccggaagaataccactaagcaccttccaaagaaaaatcttaatctttggatcagtctgaaggttccacacctgagttttcaaccctagagtagaaggctgcatagagacttcgcttctcagattttggctctttgtttgataagctaaccaataggcagacttgacagaaaaatctccacttttatttaacttccaaacgaaaaaatctgcttgagatatcactggtttaatagctttaattctgagaatgtcttctggcaggaataagtcatgaagaacctcttcatcccaaaaccccgttcttgggtttaacaaggctttaacttttaaagtcacatcatatatcaggttttttctccaaggggccctaaaaccattatcatctatccagggatctatccatacaaacaaagaggcaccatcacctacccttttttgaagacctttagacaaaagctctctgccaaaaagaatgcttctccaaccaaaggaaggtctctgactcaaagcggcatccagaaaatcagtagcatcaaaatatctacttttcaacaacctagaaaggaggcaatccgggaaatgaagcagcctccacgcttgcttcgctagaagagcctggttgaaagactggatatcacgaaaccccaaaccaccactatcttttggtaaacacagcctttcccaactttgccaatgaatcttccttgaatgatcacaagaatcccaccaaaaagatgccattgcactctccaaattttcacaagtagtaatgggaagcttgaaacacgacatagcgaaaaccggcatcgctaaagcaacagatttaagtaatacctctttacccccctgtgaaaggcatctggtgaaccaaacatccagtttctcttttaatctatccttcaagtaatgcaacatatcaacctttgacccactaaagcattctggaagccccagataggtcccagccccaccctcagtgaaaattcccaaacaagtccggatagtacctttcaattgctcatctaccttttcaccaaaagtaattgaagacttgttcaaattaatagtctgacctgtcgcattaccatacaccttcaaaatcttttgtaagaccagactttgctctcttgaagctttgcataagaaaagactgtcatcagcaaagagcaagtgatgcaccatagggccattctcagaaaactgaattccttccagagctccttcccattgagccttattgagcaaatgagtgagaccctcagtgcaaagaacaaagagaaatggagataatgggtcaccctgtctcaaacctctttgaaggataatcaacccaaagggacagtcattaatcaaaacagagtaagtgacagatgaaacacaaaccatgatccagttaacccatttcagatgaaaacccaaagacagcaaaagggatctcaaatagctccactccacacggtcatatgctttagacatatccgattttacagccataaactctgaagagatacgcgggtgaaccttcaaactgtgaaccaactcatgagccaccaaaatattatcagtaatcaatctttcagaaacaaaagcagattgagtatcagaaacaatctcagggagccatggttgaagtctctttgccataatctttgagattattttgtacaggaccgaacaaagactgatcggccgcaagtccaccatttctgttgggtgttgagtctttggtattaaacaaaggtgggtataattccactcagcaggcataataccatcagcaaaaaactttttaacctctgatgtaacctgatttccaacagtggaccagtagtgttgaaaaaacaaagcagacataccgtctggaccaggggcactagctggcttgatagagaaaacagcctctttgatttcctgagcactaacttctccaacaagactctcattcataacttcagatactctcggcaccaaacctgagaaccaatccgtaaagcctgaagggtttgaggacttaaacagattcccaaaataagcagcagccacttccccttttgctgcctctgaagtttgcatgttaccattcacatctttcagcttttcaattcttttcctttgcctattctgtttcacagcagcatgaaaatatttagagtttctattcccacttctgagccatttctgtctactcttttgcttccaataagcctcctcttctctataggcttttgctaggtccttctttaaaacagaaactctttgaaaaatcggccagaccaaagactgttctttttccagagcagcctcaagttgattgattttatcaagggaatttaggttattttgtttcttccaagaactcagggactttctgcaagcacgcaatctatctgccactgatatgttggttccgtgtttgcctctactccaagttctgataatagcttctttaacatcttctttaaacagaaacctcttatcaaaacgaaactgccctctataagaatcttgagacgacatcagctttatcaaaaccggtctatgatctgaacctcgaaaatctaaaaaggtttgattagagaccgggaagaaacagaaccactccttgttaccaaaagcccgatctaatctgcattgaatccagtgatctcctctccttccagcccaagtaaaaccattaccatgagcaggcatttccacaaggtcacaacctttaatcatctcattaaaggctttacaatctaaatcacttcttctcggacctccatttttctcaccattatgaagaatgtcattgaagtcaccaaacatacaccatttatcccttctacccactccaatccttgaaattctttcccaggcctgacttcttttacttctatctgggtctccataaacacaagaaacacaaaaattaacagctccaaactgtacttgagcatccatcaggttcttatctacaaacttcagatccacctgaacactactcttccaaagcaaagctaaacctccacattttccaaccggctcaactgtatatacttggtcatattccagccagctttgaatatcaaccaaatcatctcttgaatgcatcgtttccatcaagaaaagcaactcatggaagtgttttttacgcagctccttgatcacgtagctagctgctcacatgagggctgagtttttgacctcatacggtatatatgagatattcgaccaaaaattaaaatcgtacaagaaagaattttatccctcaattaagaccaatagagtcgaaactttttcaaaaactaagcccgcgaaagacataaatatattcggaaaactaagtccaaaattataagcgaactataaccaaaatatataacctaacttttacttcgtagcgcaacaacttcttagtttgtactatagaaaacattgatgattgcatcaagtcattttagaatgtctagcaaattttggtgagaatttgatgaaaagaattttggtaagtaatgagatttcaaaatagcttatttggatgctgatttcagtaatgagttttgcataattctaccgaaaactgctctaaataattaattgaccacattgaactacgaatcaacagtataagactcagttgaaactcactagtcactactactttatggtgtggatacaaccaattttaagctccattttcatagtggcatttgtccactaatgtttttactaaaattatttgattgttcaacttcttgttacccaaggaaaaaagtttttacaaaatcttaaaaataccaaccagcaacatagaaacgatggaacaatcatttgtgaaatgtgattgggaaagctaatgaattgaagtgggcacaaaggcccacagacaagttgggatggaaatggaacaaaagtgggcagatgtcataatcactcaacgaattaaagacaaaaaaagataaaatatggagacaccattatctctttgtcttttgccacgatcccaagattgattttgccctggcttgaattgttccacacacacaaacccctctatgaagactcatccgatggtaaaacaacggaaaatatcattggtcacgtacgttttatagctgctagcaacaacaacaatgaccaacgatatttttctttttcgttttgtagttgttagcaattaatggcaacgattaactttggtttgttttacagtcgttggttactcggttcactctagtagttttggtaacaaagtttagtgattatgacaaaatttagcgactagtaataaaaaaaattgattactaacaacgttttcatagaacaagaaaaacataacaccttatttttcaccgcacgagtgatttggtaacataccacacagagacagtatcggaaaaaagttttttttaacaaaaactttgcaaaaaaaagaaaagttagatagaaatgagacaaagaaagcagagactttaaaatcacatgtgatatatcagaaaaaacacagcaagaaatgtccacatccaaaagtaaaggtaaagccgggggaatgaatgtatgggctccatgcaacattatcaaattcgttgctctctattcgttttttcctactatataagtggccgagttcaattattaaatgttcatgaaaatatccaaattaaatgaagaactctgacgagtgctataaataattcaacaatattatgtttgtttttctaactataaaacatacaatttgtttatctgctttcttttttcttatatacagatttcaattttcacacatctaattcaaatcttttcaacaaatcatgactattcaacaacttcgaaatgttttcaaaacttattgatgcgacaaagtttatctatagcacatcacaatgaacgtataataaacactactttcgaagacgtgcataccaacgcctatacggctacatctttacgaacactgtaataaagtaattcaaaatatttcttggttctatttctatatatatttaagaaaaagcagagtactttacttgattaatttagaaaaaataatactactatttggctaagtgcccctaaaaaaaatcgttgaactatagagaaaaaaacagaggtctaaaagtctaactggcagacacttttattctcccatgtgtttcaccagacaccatctccatctctccaacatttgcgtttccacatttgtttaaacataactctctctctctctctctctctctctctctctcagtacctcttattcttatgctcttcttcaccaatcctatctcttctatctgtctttattttctctacatgtgaattgacccatttctggtaaacacatagagtaccacttttcttatttagattcttcttcctcttcatagcttccaagtcaactacttcagcttctgtcggctgtctcttcccagatctcgtaagcacagtaccctccaaacttctttatctctctctgtctctctctctctctgatcttcgattcttgtttatattatccttactacttccttggattaaaactttaaagcttcatttagattggtcttctttatgctacggacttgctgattcttgtccgaattcaagaactttgtttttaggtcttgaaccaagttgttaactctgtataagtctttacttgcttctttgctcaatatcttagatttatagattcgacaagttttgttgttctgctttgacttaattatgatttcaggttaagaccaaaacttggaataaatgacggaatctgatgatgcctcacgagaaacaccagccagcagaggaggagaagcctcgtcaaatcaagatctgtccaaaccagaatcaaaccatgtttcactcgatctcaagctcaacgatactttcaacgatgacacaaagagcacaaagtgtgaagcaaacccaagagtcttctcttgcaactactgcagacgcaagttctatagctctcaagctcttggaggtcaccagaacgcacacaagcgagaaagaacaatggccaaacgagcaatgcacatgggaagaatgtttggtcaccatcacaggccttacacatacacttcttcttcccttgggatgcaagctcactccggtttacttcatcacaccttatctcagcctcagcctcttgtttctaggtttcatcatcaagggtattttggtaacaccgtgccgttgttctttgactatgacgatggtggtagcgacttcttctggcccggcagcttccgtcaggtggttgaggaagctgaggctccggtggttgtggtggctagtactgagtcaggccttgatttgaactcggttgcggcaaatggaggtgtagataataatagctcaaagcctgatcttaccttaagactctaaaaggattaaggagattatatctttattgttatttttctattgttagacatacagaagataagttggagacagttgatagaaattgatgaaaaactttgttgttatattaaatgaggttgttcattacattacggtttcattcataccattatacgagctcccacaccagttaaatcattaactattttcatctaggaagtgaaaaacattagtatgttcggtggaaaaattttgtttcgttcatgaaagattgaatcatttgtatgtcttctcgcggaaactgagccagacatgccaaaacgtcgaccaaagtagatttaatatttggacacctgaacatactaaccgatttaagccatcttatttatcatgcatatcaaattatgtcttaaccagaatcaactttaagacattgatgtctccattatttgcaaattcattacaagttgttttcttttcttgcatgtttgtgtcttcacttccatatatttattcctaaaaactaaagtttttttgctaagaattc

SEQ ID NO: 1146 - DNA, 48404 bp, Arabidopsis thaliana
gaattccttcatgatgtatttagtttcactccaaagaagattggtggaggaaagttgtctaatgacgaaaaggtatgtttccggtatcttcattcactgtctcgaatcttatcccattgcaaaaaccttgttaacaaaactggattttgcgattatttgttgcagaggttgtttaaatcaccaaactcagctcttaacaaagcaagaacgcagttcctggccaagcaaaggatgttagctaaggtattataaattttgattaatcgtcttatctgggaattgtgttgtgcagaaagaataacagtgtgttgtttccaattgtgatgcagaatatgaacgttgggcattacgcagctacagcaatggaggaagaatgatggctctacaattgatttttgaagaatgatggcacactcatctgctgcttttggaaaatgttgttgttccattagtacactttttcttgtttcatgtttttgatttgataattggttccaatattataaccaactcttagaaatgtcttttcatttataacaattttcgaccgttgagtgtaattcctatgattcaacacttgttgtttctgttaagagtgccattgaccaattgtattttgagctgagactcggaattgtcactgaaaatttgtcagtgtattggtgacagacaaaatttagcccatgtattggtgagagacaatttagcctatgcttcacttattcagtaaaaggtatctaacagaagaacaaaagataaagtaacaagttccacaacattgaaatatttacgaagcaaatgctcctccaaatcacttatacatttggccaaaatgaaaacataaaaaagcaccgtaactagtccaaggccatcttgggatatcaaacttccaaaggccggagaaaaaattggtacctttcaatgccaaagttgtggcacaaggaatcacattatacaatgtgttgcttagtgtgaaccaacagggatcatcttcaaggcagcagcaacaggcatgccaaggaacccgagtatgatgctaaccaaccattgtcccaaatttaatggtgttgtatccgcaaatgtacccagcagctcgattatgattacttggaacaccactgtacatgttagaaccgctacgaatacgtagttctttagtatccccttgaacacatcaattttttccatttccctcgagcttatctcattgaatacctgaaacaaatatcatacattatgatgagaacgtggttatggtcaatgttggttgttttcctttttaagatccagacgcggcaagttacctggcagaagacaaaaatgttgaaaataagggtattgagtgttagatcagagtcggggccatcgagaccaaacattgtctttccctttgtttgaagacaccatatgatgacaagctggtagagtgactgaccaaggatgttcctccacattacattacttatgaagtttcctttccttcccactggagatctcttcatcaggtcgtcctgtggtggttcagtcgctagcgcgagtgctccaagtgtgtccattatcatgttaacccacagtagttggacagcagtcagaggcgcgtttcctgagacccacagtagttagtgtcaatgtaacagagaagttagttgcaatccctgaggagattagtcttttgaacaagagaaaaataaatgtgggttgggaactaaccagtgaggcaggctgataagaagttgacaataagagccacaacatttactgtcagctggaactggacaaatttctgaatatttatgtacacagaacggccccatttggctactgtgacaatcgtagagaagttatcatctaggataatcacatccgcactttcttttgccacctacgaaaattgaaaaatagaatatgtaagtgttgtccttccatgagaacccaaactcaattgttagattttctcacaaaccagataatgaaatagggacaatgaagattgagtacacacctcagttccggaaatgcccattgcgagtccaatatcagcttcatgaagtgctggagcatcatttgttccatcacctgtcactgcaacgacttcctgaaacattgtgcggaggagtctcaccaaagtatgcttatccatgggcgaggatcgtgccatcacctgcaagaaggaaattatacttgaatcttttgtagaagagtatgtcctaaggagtttttcagaatccggaagctaatgcaatgaaattgagggtttgtttcctgtttgcggatgtgaactaccaacacactgcataaaacaggataaagtaacttgtgtttggcagacaatcacctgcaattttgggattagcttgagcagttcctcatcacttttctcccggaattcaggaccttcgatagctatgccatcatcagtcaatatgccacactccctggctatggccttcgcagtagtaaggttatctccagtcaccattctgacagtgatgccagcagatttacaaatcgcaacagactccttgacaccagggcgtacagggtctttgatgcccacaatacctatacaagtgtatccaccacttggaataggagcctctaatgagaattcatcaccaatttcgaaatacgctaggcaaagagttcgaagtgcttcgctagcaaattcctcaattatgttcttcaggtgactggtcgatttttcatcgagaggaacaacttcaccatctttgttgatgtacttatcacaagaatctaaaactatctctgaagcacccttacaatgtgcccggaaatgtctttcaggcagctcaatgacaactcccattcttttctttgtagagttaaagggctcaactttcacaacatttgaggcttgccttacttcttggaagtcccctccgagtgacaacccaaattctaacagagcagtttctgtaggagttcccagtatctcggttttgtttcctttgcccacaacaatctcaccaccagtgttagtaaatatagattgcagtagaagtttaacagcagactcagggataccagaggcaaatttcatagcagcatcaggaccattaacctctttggcttgttcacagatgcaggcttttacaactgtcatgtgatttgttgtaagagttccagttttgtcactacaaatagttgttgcagatcccattgtctcacaagcagcaagattgcgcactagcgctttgtcattcatcatctttttcatggcaaaagcaagacttaatgtcacagccaacggcagaccctccggaactgcaaccacaacaattgttacagcaacagcaaaatattctagcatcgccatcaattcatcagcagtccagatccagtgagaattatctaggcgcttctgattagccaatccttgaaccaaaacagcaaacgtaatgacagcaaaaaatagacctattttaccaatgatggttgccacaccattaagttttacttgcaacggtgtctcatcatcaccgccttcacttagtgtagccatcagtttaccccattgagtcctcattccaactgtagtcaccaacattttgcaagatccatcctgaaccttggtaccagagagaagaaacgggtgttccacactgacactaaccggttcactttctccagtcaagctcgattcatttatcagaacagaaaaccctgagataaaaagcccatctgctggaatctggtctccaatgccaagatgaacaacatctccagggagtagatcatatattgagattttttgcctcagtttgtctctcgtaacctgaaccacaatctttttcttctctgcatccaggtccttgaattgcagggattgcctataatcactagtggcagtgacaaacacaacaagcagaatactcgccactataccaagtccgtcatgggcaccaataggccacccttccatcagtattccaactataagtgaaacaaacgcacatgcagctagaatcataagtgttgtatcctgaagggcttcccaaacaaataaccaaaagccacggctggggctttctgtgaattggttgattccataaatttcttttcttacactcagcaggtcttcagatgtactaattccactagcaatagacgtggaaagtttttcagtgaggccctcagttccaccatgaattttcaactttttcaaatcatgaccttctacaattgatcccaactcatcaggacaaatctcaaaccctgcttttcttacttcttcaggtagtgtatactcactggacaactttaaacctgtaagcacgcaataccttctcgttaaggaaatcaaatacatattgaataacacaagggagtagtctattctcactattaatgaactgaagtgcagcttgtgaaactaagaccgccactcgaaatttttcctgcattcataaggttgacaaaggaaaatggtattagaacaaagcaccaatagcagtaagaatttattctcaaaggaaaaatgaacagaacgctttgatcgctctaattaacgcctccttcaatacaaactacaagaaacacaaggcttgaaatgggttgtttgctactaatgagtcatatttgcttgaacattcttactagcaaacaccacgaagaacctaaaaatctacatcttaaattagaaacagaacctaatgtaatcatgtctagtgataacaatccctaacctgaggataggtaactagaaaaatactaaaaacgagctcacttagatcccatccagtaagtacagtgagtcaaccaaacaaaaaactcggaatgcagaaagatcacttattagatctccaacagtatacaagcagaaatagaaagaaatgtttcagtaatcaaagtgagaagaaagaagcacctgattggaacgccgaatcgcctcggcctcggaacgcttagacagattagcagtgaatctaaatctccttttaggattcttgacgatccagcagagcttcctccaacgctgcaacgcctcatcggacgagttcttcggcttcacatcgccgaagttttcgttcaagtagctctccatttcttcagcttactactctcgaacaacgagtgaattcgtaactatacttcagatgagataagattagagaaagagagaatcaaggatctcgtaaatcgagaacgaagaagatatgatatataacaagaagtcctctcactggtaatgggtgcttttaacttattgttatttacctttatatgggtcaagatgaagacgatgctttgacgcgtcgtctcgcactaagtgagcttcgtcgaagtttcgtctgcctgttctgaaatttcctcatggccatggttttttttttttttttggaacactcatttattcggacatgactcggagctggtcaagaaagtcaaagctatttactgacttggactttatttcaacaaagtttttagtatattctaagttttgtgacttttgtccattagaaatttcacacaaataaattagaataatttactaagtatattttctaaagaaatttttacaaaagtagacgaaaaaagatttgctctcattgtttgtcaaagtgagaactggttttcacgttttgtcttttcattcaatttcggaccaaattaccctgggaaaacttaataatggcataaaccaaaccgtgcagcagttcgtatcggttaagttgacggcgtaaaccaaaccctacagcagttggtttcggtttagttgatgcggttcagttttgaaaaagacaaaaaacaaaaaaactgaaacgaagaaaccgagaaaacgaaaaagagaataacggagagattgagagagaatcagaaagcgaaacgaaattcagtatccattgcttcaaaattcgacataacttcgaattgttgggtagttgaattgtgccactgaactcccacatccggtgaagtgaaagttactgtttttcccggcgaagccaagagaaagttactgtttttcccggcgaagccaagagaaagttactgtttttcccggcgaagccaagagaaagttactgttttttccggcgaaatttgaacctccggcgagatcgcatctttagctatggctgggaataaagctaacgacgaagtcccgaggaagcagcatggtccagggaaggagaagcgtgtattaagagtttccccgcggagaaaacgctctgcgacaaaggcaacggaggaactgggttagaatctctaatttaccgtttgttgtctttgggtgtatcagaattgtaaagcttgtttgattaaagtgttagaatttgtcggaatttagcatatctttaggatgaaaaattgagaagtagaattggaaatctctgtttccgccaaaaatatgattttgagttataatctggaaaatgtctgtgtacgtacactacttctgtttgctcaacagtatatgacttttaattgcaggtagtccaagtgttgctccgactgaagatcttacagttgaagagttaccaccaagactctttgctctagaccggtacccttccgagacgaagatgaacgcgtactctaaaccggagtacatttctgacatagcaaaagtactaaaggggaaaccagagatgcagtttcttctcgattctccatttgggaaactttttaaaatacccaaaaacaaggcatctttcaatgctaagcttgtccttggactaatatgccgtcagttagtgacaaagaaggtgaatgagatgtggattgtattcggcggtcatccaatcagatttggattaagagaatttagtatcttaactgggctggaatgtgggaagtatcccaagaagaaagacgttgatgatgttatcagtgtgaaacctgagtgtgagagtgtttggaatactctgtttcatgagaggtttggggacacggttccaacaattgctgatttggtgagctggctgcaggaggaggaaagcatggaggggtggaaccaactggcactatctcttattattttggttgacggtgtggtagcggcccacagtaaccccaacaggcctacttcaaagactgtcgagatgactaagaacctggagtttttctgcaaatacccatggggaagggtgtcctttacccgtactttggggaggatagcaaatttccaaactccttacgatgctcagaaactaataaggggtatacttgtagggtcttatgcactccatggtttcccattagctctccagcttttagctttcgaaacaatcccatcaattgctaagctaggacctgatgatgtacctaacaggacatttgctgagaggtctatccatcgtcttgcctctctgcgagcaatccggacatctcgcattttggagtgtgaggctgctgatgaggtgtgttaaattgtgtatgtacgtacataataagtaaatgtacattatctatggttaacatacttatttgtgtaggttgaggtcaactatattgtgaaaccagctgataatgtttgtcctccatctctttcatgggatgatgaagttgatgatccaagggttgattacattgaggcactgttgatagatgggcaccagtggcaggaggatgaatgggttggaggctatgctagagtaccaaagcagtcgcgcccaccacaactagaagagacaggtaagtataagtataaatgtttttacaaatttttttggtattgcacctagaagaaaaccaattaatagcagcaactggtctattgtagatgttaagaggaaacgaaatgcaccgggcccgagccctaaagaacctgctatgaaaaaacagaaatctgaaatggactgtgataaagaagagactactgaggattgttttggagagcttgtgcctgagaggtttattgttgaaatgaggaggtctttgaaggagctggaagaccaaatgtatcaaatgcatgaagatatgaaagactttgtccgtgaccagatacgtgctacccttgatccaaaaggcaaaaggccagaacaaaccataccttcccatgattcgcgggaaccacctacttctatggataaggcaccggttactgcgaagaagccatcgagaaggatgtctacaaaaggaagcactggaacgagaaagtcttcaaggctgactcgtgtttctcatgatgtggacactcctgcactttctgttggctgtaattccaaagaggaagatttggatgtccctggaatacataccactgctttcggcggaagaagaaaaccttcaaagccgaagaaaaatgtttcttttgctgttgacactattgaggaacctgattccaataaggaagatatgcaaggattcattgatgaacaggtaagtcatgtacgtacattgctaaatattttataatccatatgtataactgtactgtctggttcgatacaggatggcgctaataatgaaagtgattttactgcaaatgatggattgaattcttctgccgctgaagaagagatattagacactggatttttaatagttccttatgctggatccacacaatcccatctggtatgtcgtctactaatactcttaacaatctgtttaaatggtgtacgtacatattcgcttaagaagttagttaaactatgtttcaggatagaggaaatgttgttgttggtaagactgtctgcttaggttcaatgtctgggactgtctttgtaacacaggaagagaggcctgtggaagaagctactgttgacaccgagatggaagaagttccatctaatgtgtctgcaagagtttcagaggtagatcttctcgtaatcgttatatacagatttccatgactatatgcataactattacattaatttcttcacttatctaacgcttaactctatggtagcctatgtttcaggataatggaccaaaggatgttgctgaacctggcttagttggtacccatacaggggccgatgaaatagctgatgctgacatagagatggtagacaatccatcaggtttaccttcaacatctgcacaggtatgtgttagtcacttgttcttttttcatatgtgtacgcccataagactttgcaaattatttttgtttcaggaagaagcaagagatgccagtgcatcgactgaagctaatggcagcgagtcagaagaaatttatgagccttctgatggagacacagctcacgtacctgccacaagtgtacgtacatttttgtcactatgttctgtgtacatatatattgtttcatacattactaaaaagtttctttccgatgctaaattctacaggttgaggcggcaggagaatccaaattagtgacagtgatggaagttgaaatacctgagaagacccacagtgatcccccgtcaccatttcaagtagttaacaatgtaagctaactcttgcaacaaataaaatgtactatttactgttcaaatgtataaaatttatattatgcaggtcatacgggagttggataccaaagccgttggtgatttagctgcagccactaatttggaggtaacaatttgtgtgtttcaattcctattttcggaatagcatacataggattatatgtgtacattatatatacttgtgtacgttaacctgcacaggtagtcatggaagagccgtgtattgtcgaggggtctgtagaaactgaggatcctaacccagggtcagatgaagcagacaagaccgatattcctaaaaataatgtatgtacctattttaaacatagaaaaacgtatgaaactgttgttgacaatcatatttgttaacaggatgaatcagacaatcctgctgctgtcgaagcaaaagaagaaaaaaaatcgtccccaaagaaagtgaagaaacaacttgtctatgaacaggatgatgcccatcctcatggttttaaggcaaaaacagtattggtgcccgatgtaccagctcaacagatagaggttgttatcagggctggaaatgtctcatacaaccccctggacgtagttgacccttcaaaagtagaggaattcagcaatatcattaaaggaccctctgtgtaagtacattatagtaaaatggattatttaatatctcaatcatcatttttaaggttgttatcaaatatttttctggattttacaggattcacactcttttcgggtttcgaaaagtgcccaacgacttttttgcgaaccttctaacacctggtgaatgggtcgaaagtacggtacgttccatttatatacgtacattccttgttataaattgtacatagatgattaaatttttcgtggaagtgtacgtacactgatatattttttgaacatttcagcatttagaaatgatggcaatgttgatgtggcacaagaacggggaacagatgatagcaaacagatgtattgtattggacatgatgctgacgcatcttcttaccaagcgggtgggcgacttcaagaagtgtattaataagaacgggttcaaatggggtaaattactgtccgacattgctaatggagttcacataaaccgtgaacccaatatgaagtggatgaaggatgtcgatgttgtgtatgctccgatgaactggaagagtgaacattgggttgctttgggaatcaaccttaatgaacggctaataactgtgtatgacgctttaatatcgcacacgcgggagtcggctgtgaaggcgagaatgactcctatttgcgaaatgatgtcgtacttagtcagagcgatgtgccaggatgtattgatttctccgtactcagttgaaccttttgagtatgtgcgttgtcctaccgttgctcaaaacccaactacaggagattgcgggccatacacgatgaagttcctggagttgcttgcgtttggacaccctttttcggatctgacaaccattcgagaagcagatatggtcttctaccgtcagaaatactccgttgacatctacgagcacggcaagcgggaggccggtactgtgcacttggtttaatcgtccaagaacaatattctggttctttgcaaccaattattatgaacaaacctgacttatatatatgattgcaactacatttaatttggagattgtcagaagttaatttattgtcctctatcatattgtcgtacacatcgttcacttataattacataatgtaaatgtgtacgtacatatctatatgtctcgtacactgcatattaactttataacataactcaagtgataaattgatttgacagccaacgcttaccaacacaagtatgacattcatttcaaccgtaattgccccaaccaaattcacagtagtggttattaaagtgaagaaattactgacgacctctgactatctaatttcaaacatggttaacccgactcttcccgacgatttactctcgaagatagctaagaacctggctgaccaatgctggtccgaccttcgtccattggtacgagccggcactcgtggaagagacattgtctaccgtccggatgtcctcaaagatgccaatattctcaccttgtgtgactcgcccgatgacttccaagctggagggggccacaatccctccggatccgctgatgaaggccgacatcgaacatttttcttaaggtgttttacagctaataatcccacggcagtgtattacgaaggtattcgtgttctaacgcatgaacgaaacatcaatggagccatcaggctcttacagcgtcatgctccagtacgagcaaatgcaacacttgcatgcgccattgtattcatatgtgctgggtatgattatatgggcggcttgtttctacagctcttcacccgcaaccattatccattggactcggttgccactcgagttttgggtgatgagttcatcgaggaaataaagaagtttgaccctccatacagcaatacatatggtcctacgttctcttatcctaccagccatggaattagtatgcctccttgcgccttatattgttacatggtatcaggagctttccaaaacgtttgcaaccgctgttacctctggtcgtgtgccaggcgtgttagtcaaatgctatagttattccattctactttatatgtttgtttatgttatccgctatgtcatgtttcaaattatgataagccttctactatgttgtttatgtttatgttgaaattatattattgctcaagttgagaatttttcagccaaattcacatatgatatttagacactgcagtaaatgtaaatttggatattaaaatctaagcgtccacaactccgtacacgtgcatctaccaaataatacttagaggttttttctttgtctcggaaaactagatatggacgttcactagcatgagatatcaactctaacgtacactaaaaaataacacatgcaaacatatgaggtctttggtttgtctcataaatggtgatatttacgaatgaacgtacactaatagtacactacagcgtacactgtctgttgagtaaatgtagaaatgtaaatatggacgtacactaaaacgtacactacaacgtacactgtttgttgggcaaatgtaaaaatgtaaatgtggacgtacacttaaacgtacactacaacgtacactgtttgttgggcaaatgtagaaatgtaaatgtggacgtacacttaaacgtacactacaacgtacactgtttgttgggcaaatgtagaaatgtaaatgtggacgtacacttaaacgtacactacaacgtacactgtttgttgggcaaatgtagaaatgtaaatgtggacgttcactaaaacatacactacaacgtacactgcaacccttgcatgcgcaattctttacatatgtgctggtaatgctcacatgggtggtgtctacctccggctcttcggaagcaaccattatgctttggaatcggaggacgcacgtgacatttgtgaggaggtgctagaagatataaagaaatatggtaatactttaaaatacacatacgctaacagtttttcgttcccggaatgtgttgacgtaagcactcctgaatgcgcggaggtgtgttacattagatcgagactcttcaataatctttgcaaccaatgttacatctggttgtgtgctaaacagattagccagatcctgtagagctcacattcgccacgatcctgtcatatttataagttttccatgcaacaatatgtgagctttttacgttgattatcagtaatggaagtttgtttttaattaaattaccactttgtaattgattcaaacatactagctcaaagtattctaatatgagacatcattaaaataataaaataataaaatatctacgtacacgatatatgataatgtacaagtggcatagtttaattccaactataaagattacatagtgagcgacgatatttgtaaatgaagacgaaaggaaatttgatttgacgtcgtataacccatatatagaagatttcgctccaaattaattactcgctgtcaaatacactctagaagtgacctccatcacactctcattaatatctctattagacgtacacggttaccgagcaatgtactcaattgatttggcagataaaataactaagttaatgtttatttgaaaagattgttagtaaatgcgttgacccctaatatagcactatacatgaagccatattgttccacttatatgccatacaaacagacgtcaactcaaccttctgtcagagaacgtaatgagtattttgtagacgtacacggcgcgattatgagaggtacacaggaatttgtttaaattagaagttactaatatgatgcactaaatatacatccacgtcacccatccacttacattgatggttattctcctctttaaaactcatgacaaacacacttagttgaatacacgaatccgtgtaaacctcctcgtttgaaaaacaatgcctttcctacctccgctaacccctccaaccgagttgtacctaggaatccaattgccaagccccataagcatacttgtcaactacctccccgtcagccagactcccatagagacgctaaggaacttagtctacagttgtgacatcaacacccttgcaatcgatgaattcatgacgtggccgtcgttactccaaccggggtctcccttccggccatacttcgaggtgcttgtagaacgtggatccatcccggcggtttaccttgaaggtgttcgccaagcgagcaacttcgtgacagtagctcagggcctttcagtcatgacaacggtcgctttatctgatccctttgcttgcttcgcaaccggtttgttccttacgtgtaccggtaatcacttggatttcctccctatcagcgaaaagttctgggaaatgacacccacccttgaagctggccacgcagttgcagagatggtgatgtatcacatcagccagctccacactgaaaatgctcgccgctgggaaaggtcttggaggtttgtccacctgccgagttgcgtagggcaatgcacgttccatcatggctgcagggtttgttttttctactggtacgccagggagatggctatattctactagaagcaaagctgctaaggtctaagctactctactcggctctactctcgagtcttttggtatgacggatgcacacatattttgcaacacatgtgtatgcttcgtttaaaaaattatgttttttgaatcgttccagtttatttatcttatcttatgaatttccctttatataaactgcctgtccttttttatgtttctggcttttgaatgaattaccactttaagtattactagatgtcttcgtgtacgtacactatatagtacattaaacttcgtttatcgtacattgggaaattgcgtacacaacataagtataaatctaacagtttttgatgttgaaggcaccaaaactaatatatgtacacgatagcgtacaccagaaactatacgtacattgcgagaggatttgaacaataaaacaaggcacgtacataaaacaacaaattagattaaaatttaaacggaaacaagaaacaacaacgactgaaatgtagtttggttcttatggaaacaacaacaacaactgggaaagaaaacttaattgaaatgtagtcttatattatattaaaacggagaataatggttcattccctctagctaaaaaaccaccatcgagatatccgcaacttcttctctgtccggattggcaaccacctttgaaatagcaccatggctctcaagcttcgggttagacagttcggttagccgccaaaagctgagtgcgacaacaaaatttcccttacccaaactctgaaagtaaccatccaagtactccgcctgttgattgcgggcttcgcactccaagacttcattgctacgttagaaataaggactgttagcgtttagagtgacattgtaaataaaacaaatgaaaagaacacttactatctattttttaacttgaaactcagtttgagaccgtaatagtctgtagtcaatgcgccaacatcaaccaacgctccaatgacatctagatgatggagaaacaaagataataaacaaacattttcaaaaatgtaataaatgaagcgtcagagttattcctcctcaccgactaaaacattcttgtaagcggatttatccaaaatgtagtcgaagggagtgaaatcgaaatctggaactggtggtgatctcggtggggcatgaacgacgacggtccgatccataaacagtatgccgtattcatgctttgttgctctgactaagtcagttgacttacggaccaagaaagaggtgatcgtcttccactcattttcaacgaatcggtcttcgtaaaacggagcaaggcgacgatcaacggtggcctcaatacggttattctttacatacagaacatgatagtagagagtttaatatataagttaagcgaatgaacgagaaaaacacataatgatttaacggaaataacctcgtaatctgccaggataaggccgagttcaaagacgttgggcgatataaccttcttgaagaccctcacgacaaagacataaattcgccacccagtgatcagaggacacaattctgagactgtatgaaacccctccatctcacggatagcaagaacaagcgattcgaaagactaaaattttttttgtgaatgatataactgccggcacaagaaatgggtttagaatgaggattgtggataaaattaaggaagggaggagacttaaatagaggaaatctggaacggctacagttattaatgcggttacaactacacttgattcaaatttttggtaatagcctggtaaccgtcatatagggtaatcataacgttgatttgacaataaacagcaacagttacgtcctttccattaaataccaacacaaccacaatatacccaaccatgtctccaactccgttcatttaagagggggaataagttagattttcaaaaaacttatttcaaattactcaaaatattgagcaaccacctctgtgtacccttattacatgaactttaacacgtacacagacaaaaacgttcatagttatacgaacgtagagtttaaacgtacgtacacaacgtacatagttacaggtggattatatataaacttacgtacaccgagaaaacacagaagcgtacactatattggccggctcagaaacttgtcaccggaactagattggatttttgcacgtcttcttgttatgacctgcttgtcgacagcgtgagcactgatttggtaaaagtcttttctgtctctttttctgaagtgacaaagacaggaagttacaaatctccgcatggtaatactcaaaatacaagtagatgaatgaacgatgttagtacatacccggtttttacctctagatgggatccttttggacagtggtcttcctggtggccgtctactgtatggaggaatgagtatcaaatccactatatgttgtgggatgacagcatctttcggatccgcgataggtagaattggttcttggaaagaatcagaaaacgtttgaaggccataccaccatccgacacaagacttcggatcaattccatgctcgattgcagctgctagagcgtgttcacatgggattcttaacttggtgtacctaagacacgtacacgtacactggtccaaaacgacatgaaaatgctccccggatttacttgtcacttgatagctccacggtccagacatcttcacagcgtatttacctgacgcaggcaactcttgtagaaatctctcatcaacctcaggtgtcacagaagatttgcacctagcaactttcttcctcctcgatgcgaaccatcgcattaggacatcccgaatgaactcgatcatgtaaacaatcggataagtttttgcttttgttaacacatgattcatggactcagagttgttgctagacatgatattgtagcgttctcctctacagtgagctcttgtccaatgctcaaatcctatgtcctctaggtattttgcgcatttagcactcttttcccttaacagttcaaaatatttctcgaaatccctgaccctataagctttggcagcgctgaaaaataaagcagacacaccaaacttaccataataggtggagaggtttcgctcaaggtgaacagcacatgctccatgatgcgctctcgggtaaacaacacttaggcctttgtatatagatgaatgtctgtccgagacaatcattaaatcgtcactgtctggaacaatctcagctaacttttcaaaaaaccatgcccaagaagcatcggtctcaccatcaacaacaccaaaagctattgggaatatttagaagttcccatcttgggcacatgcaataaggagacatcctttgtaaggtccgactagctgcgttccatctaccacaactaccttcctcatatatatcagacctttgatagaagcgccaagagagacaaagacatacttgaagcgctgcttaccatcatcttctggggtatagtgtaggtgtgttattgtacccggattagctaattggagaagatacagataggtcggcaaaaacctgtaatttgctatctcatccccccgtacattttccactgcaacctcttttgctctccaagcggtagaatatgaaatacgcacattcagatcatttaggagcagctgtggtaagtcgacagctcgcggcccaccctgcgtagaactgtatatgctcctcacaacttctccgaggagcttataattagcatgtttattgtagttcttccgagagtcgatgttacacgtatgtgtcgtagcatacgaagtgattttgaaatttctgaatccttcacgacgcgagcagtcaattgccatggacaagtctcatcaacgcacaccatcttcaatgttttaggacatgacttaggttgcttgaagcaaaagcattgctttatcgcttgaagagacattgtttgttgcaggacttttctattcttaaaaacacttccaacaaacaaagtttcgcctgtggtgctgatttcaacctgtgtctcatcagctcaaaaattgagtaagtcatcgaacacaggagcagcatcgttaccgagattcgccaactcgccaccatgtaacttaggaaattcattatacacttggtaagcctcagctgcggtaactaccccattatcattttgtgtcccagttgaggaagctccaataccttcgatcacttcatccctggtgacttcgtctatacaaataagattggaatccctttgcccttcgcagcgtgtaccgtaacccaatggagagattgtttcttcgccaggtacactaagaccagtgtacgtacacgtttccaagagacgactgaattcccctgtatctccgctaggtacactaacacccgtgtacgtacacgtttccaataaacgactgaatttccctggatgttgagcagtctgttgagtgagactgacgtcttcctcaagatttccttgtacatattcttctactattacatcgttccacttgttgtaatcgtattcttcgccaataccttcactaccgtctgtggtaggatacagggtacttcccccaatagatccatccacaccaagataatcatcacacccatcatcatcttcgttgccctcctccaattcatccgcttctgttgtatcgtcttcaacatcggcttgctcctctgcatcctcattattttcatcaacatttgtagcactatcaaacacacggtcactttcagaaacttcaccatgagacctagagacagtattcccgaacgccttcactgtattattgaaagagacgaacaagttgagagaaagatacccaccacgaaccaaaaaaaacgtctcgagacccatctgactgtcaatgtatacaggagggcgtttagtatctatcagcactgacatttcacccggcatccagtagctaattatgggattgatctcggtggacttcaaactgaaagcctctcggagtgtacggacaaagtccgtgtacgtcatggtttcctgaacgcgtacacaacgaccaaagatgccttcctcaggttcaaatttccattctccttctttgcatttccactcaccgaccatggtaaatacgggaatatccataacccacctgcatcataaattcaggagacacacattaaatgcaactgaaaaatactatacatataaaaaacaaatggaatgtcgatactacacatttataaacctaaataccaattatcatttgactattttaaacaaacaaatatagattttgcaaatattctgataaaaaaatggagttcgaacacaatcaagatcctaatatgacataaaaaaaacttcttaaaagaacttcattacttacacgagcaatgctccaaacttggtacaaaaacaagatcaacacttcttcagcagcaatgtacgttcgcaataattctttgttcctgggttcatcttcttcatctcaacaaatttttttttaattattattaataatttttttaatattatttgatgtaatgatgattttgcattaattgtgacaatagtcacatctaaactttttgggggcattaaatgttgatgtcacttcggaataatctcacttgtaacggaaccgaatcgcgtcaacgtgaacaaaaaatcttcaactgaaccggaacagtgtacgtaactaaacctgctaaactaaaccgtacatttcaacagttgctaagagagaaacgcaagggcagaaacgtcattttgcaggcgaaaagacaaatggtgaaaaccacatttgactttgacaatccatggaaataaaacatggtcaacggatgtggcctgcaatttaccctattttctattcacagtaaaaaatgattataaagttattaaaatctatttaaacaaatatctagttgctctatataaaatatacataattatgtgcgaaaaacaatcaccgcactaagttagttttttttttttctttggcttttaagagaaaaatggaaattctcgtgtttaacaagaattaggagaaacaaaaaggaaattttgtgttgtgccttaaaaaaaaaaggaaactgaagtctgtgttactctacataatctaatctcctctaacaacaatcctaataaccaaacgaaaataaattcaggtggcttctcgcttttctctttcagaaaaacaaacgtttttttctttcgtagtttcgttcgagatgaagcaaattagtagcggtgaagtttggagatggaacaaggaagtagagatgaattcgataagagattgtttgaaacattgtagttccatcgctatcgacacagagtttcccggatgcttaaaggagactccgatggacgcgagtgaggaaattcgttacagagacatgaagttcaatgtggacaacacccatctcatccagttaggtttcacgctattcgacagaagaggattcgctaaaacctgggaaataaacttgtcagatttcgacgaacataagtgcttcaaaaacgataagtccattgcgtttctgaaaagcaatggtctcaatctggacaagatcagagaggaaggtattggaatcgatgaattctttagagacttttctcagattctcacggagaaggacggaaagataacttgggtgaattttcaaggctcttacgacaatgcttatctcgttaaaggcttaacgggagggaaaccgttaccggagactaaggaagagtttcacgagaccgtccagcagcttttgggaaagtttgtttttgacgtaaagaaaatcgctgaatcatgcagcggactaagtagccaattcggactacagagaatagctgatgtgttgcagatgaaacgtgttggaaaagctcatcacgctggctcagacagtgaattgacggctcgtgtcttcactaagttgactttcgatttgcttaatagtagaaagcagagtgtaagacgagttgatcatcagcaatttcaactagagcagcaacagcatcagcagtttatgatgactagatgttacatcccgataccgatgccgataccgagaccgagaccggtgatgtttgctgctcatcaccagaacccgtattttggtggtggttactttaggatgccggtccaaggaatgaactatgttttgtgatccctgaatgtttgtttaacatgacttgctctgctattatgtataatttctagttttatcagatgtttctttaaatactaaagattaactttcatcttttcttgtcgatcaaaacaattctcttaactctcatatgacacaatttctctttactggatacttttaatgaatctaaaaagttagaatacagtacaaataaatttaaatatcttagaatctactcaaagcctctaatcttatgttatgtagctaaagctgcgttcctgtcaacaaaattgaacaactctgtttgtgccgcttccattttcacacggaagtctacgcacatgagctataaaccacgcggtatttattaagttgccaacttggtcatttacaaaaagtcgaataggctgcaactacattctgcaaattttgtaaagggtgaaactacccagtaaaagaactgtgttcaaatagatttttattattttacttttacactttgacgtagttatctttagttacaaatttatggtcttcgccgaataaagagattcgttttggtcttacagtcgatcgttgtttattcggttcgcattgactcggaacgagtttaatcttcattttagtagtatgaactaaattctaattaactgacaaatatttcagttttactttataaacaatcaaaacccgactatagtaatacgagtttgtgaaaactatactcagaacaacgcacatggaaattcacagattgggaaagaagactgcccgaaacttgttttctcagtcgctccaattgtctttatcttcggctacttcatcttgcacctgcaaatagtcaaattttgatcaaaatgacataaacaagaagactcgtgtaacaattgatgtatgagaatttgaagtagtaatagaatatggttctgagttctgaccatttcatcttccactgttccgcctggtgaccacacaagtatttgtctatctgagccacttgtgtatagttcctatgagcaagtatgacaagtaactcggatttagaggtgtgttcaagcaaactttgcagacctacaaagtccaatgactcgtggaaaggttataaggattaagtcatacctgatcattggaattaaagcagcaagtgttcacgctttcgtagtgtccacgaagcatcagtgttgttctacccgaccacatgccaaaagccttatatacagttgcagcacaattcattaaataatccaggtaatggaatgagaagatatgctgatacaatagtaagttggtgactaccttcacagtcttcatgcatggaacaaataccagagctggatcatcgcttgtatctaattggattcctttgttagtctggatgcgtccagtttcaaagttcaccagggtgttgcgtccagattcaatatcccacaatcttattcttgaatccgaccctgaaacataatatgcaaatataatagtaattagactcttaactgctgtatggccacagatgtttaaggtagttatcatttattgcaatcacaaattaatatagttcacttgatgctagaacccctaagacatcacttccacttcgtagtgggtcattaccagccgaagatcatactcttgttatgaagttacagccctattaccctaacagtcagtgcctcatatgccacattaaaaacccaagtgtagtacacaagcaagctataatcaatgaacttcaaattcaggcataaaacatttgccgcaatccacacttgcaggttcattcaaaaagttgttcagacagaggaaaacataccaactaataaataggctgatgggagaaaaaaaattccaagcaaacacttagcacttagtaacttccaaaactcatgtacatgtggctcctgatctcataagttgaaaatactacttcgagggtcccaagggcatctactttgtatgctaatcatgataatgtcactagagaggtatgtaatataacatttaaccagcagatgctgcctataacagtttgtgacaaagttcaaataataacctaaagaacaaagaaattagccatgacaatatgaacttaccagcactaagaagatacatcccatcgttagttgcctttaagccagtaacagcaccataatgagccgtagcacgatctagagtagataacattccagggtgaattctcttctgtcgagacttttccactgaagctttagcgctagatgatccctttacactttggcttccagtttgtttactctgcagtgtcttcaacctattttggccccccaaagaagattttgcaactgaagaaagctgtacaagaagataataaaattactaaagggaatcaatcccctctcaataaaccagatattagtaatccattctttctgtcaaatgtaggcttgtagacatgcagggtgaactggatataaataatggtcctaaatttaaaaggcgtgtctaaattacactcttacacagatgcgtctaaacaatataagaagagagagcacaagttttcaagatattaaaacagtaaaaagaaagtacaagtttcacgaacaaaccttactgccaaccgcagttcgctttaaaattggtggtcggaacccaagttgtgtctgtgattgatctagaacacggaaacaaccagcccgtctaatgtcccagaaacgtattgcaccatcacaacccccagtatacaaaacccactcgctggaagtagaccattccactgacataacgccatctggcatatcatcacaacaagacaagtttttagcctcttttttaagctttttaactaagaaattttggcattgtggaaaagcatgagtatagtagcttattgttccagtagtcatcaattgattctatctaatacactttcttttccaaagaaaacaaaagtaacataccacggtgacccgataatgtgtgagagaatgccccagaagctatatcacagaggcgaacctggacatcttcagttccagcagcaattaacgtgtgagacattgccatagaagacatggcagttctataaacctttccaggcattttaaaatccacaaccgcctaatacatatcaaaagacaaaaattagagagactagggaaacaaaaatgatatactttcttagttaagactttagtacctgagcagtattggtatcccagacttttaagtaatgatcaaaagaacctgtaatgaagagcccagtgtcaatgggataccaaatggcagaggatatggcatatttatgtccattttcatgttgcttgtcgacagtaaatatacacttgtgcttggcaattagaccacttgcctcgtaatcagtggcccgttgaacatcaaatacagcagctgaaccatctgctgctccagagagaagatatctcccctccgtcaaatcaacctgataacacagttaatacataaagtaagcaacacaagcagctgatcaattcacattactctagaagcagcaaactacataaacaagattcagtcagggataagaaaaggaaacatcagagagaacctgaagggagttaacggagccacgatgaggagaaacaaagtcttttcgattagagagttggagagacaaaatccggcgggatttgaatcgattggcgaaggaattggaacgaattcgaccggtttctctgtctttgatagcctcccacattctcctagcatctcgtcttctgattttcgtggatatcaccagacttgtatgaatactcgagctcgaatctccaaagccctaagaaaagtttttgatcttctttagctaagttttttttcgtttctctgttataataaaacaaagtcgcgataaccaaaacacctaaagaacttgatttcggtataaactgataaaccgtgggttcaattcatatcctcctttggatatattttccggtatgtattcgttggacgaaaaccggatcagccccaaaaaagccaagtttttgacacgtcattagtgatcaccaaaacgacaaatgcaaatatttattcttgtttcaggagaaggaaaataaatgaaaaacaaagttgacatctcaacaaagaaggtagtagtcacatgattggaacatacatttgtcaactaacaccattccaattgccagagacaatcatttggcaccttaatttaattcttaatctatgatttataagagctgaaatatgtttttaatatgttttagctaagcttaatcattaagtggattgtcttatggtcatatacccattgtgtcgacatttcgatccgacccggttgtcggcaataaaacaaaaaagttctgacccggttttacatagttggtatgttacgtataatgtatattggagtaacgtttaaagcatttttaacacaatcaaaccttttgttttatggtcatcaactctcttaatatagtaatcaagaccaggttggacaaaaagctataaccataaaatacaaaaatgaaataaaaggtgatttagttcacttttggttaaattttacaactcatatcgttattctttagacaactttcggttttagtttagttcggttgaaaaccaaaaattcgattttttttttttggttttcaaattaatttaattttcataagcataatgaattatgttcaataaccaaagaaaactacagattatacaactcgagtcaagagacacattctctattctctagaatctaatctatctaaagagtatgattgggaggacaactctggtggctgtgattggtccacagtcttaaaacttcgttttatttttttcccaaatttgtaacttttaagcctttcagaataattcacacaaccaattcccttttacatggtcgattttttcagccacctataatagcattttgtgatatatataatattttgattttcctcttataataatatatcagtgtgtatatatatatatgagaatattacattgatcaaaaatgaactaaacgtatttttagttatgaaacttttagttgtgataatgtggtagaaatagaatacttttcttcgttaaacggtcgaatgaactcgagaaactatatttatttggttttaaacagaattgataaagttgtaagtgtggttaaaaaaagagcttaatttatgcggtagtaaattagtactaataatcagttttttaaaacatacatttataattacttaattagtgttgacaaaaaacaaattagtttagaatgccgccattatttagaccaatgataaaagagataagatccataattgcgtaatagtgaatcttgaccttattaattgaagtcagttcgtttataatttacgtaaaacataaataataactggacgaaaatttaagtcaccacctgaaaaaagttttaaaagatgctccatgtttgtaataattttagaagagccccaaactttaaaaatatacaaaaatcccacttgtttgaattacgaaacaaacccaaaattttaatataaaaaatgctccaattcggaagcatagatacgtaatgacttcatcacacacacaccaccaactatgcatataaatggtcatctttctattcaaaccaaaaaataaaattaatcatcttactatataattataacaatatagcaaaattagtataaaatattgtcgaaatttttaacaatagtctttagaattgatcatgatgattcatacaatttaatcctgactatagaaacaaatttggggttattcaaagacattaagtagggcatgtacgatttaggaaaattactaagtatgggacttgaatggtaaatgtcgcaaaaaaaagagttatcagaatgagctctttcgtctgcatccaaaggctctgcctttaatcagagcttcggtcacggtttcctgaaataattacgatcacataaacacacacaaaagccccaaaaagctcgaggaaagagagaactctgaagaactaactatagagagagaaagagaaaaagttagcagctttgttgcggtgcaaagaagcaaatctgacagttcgcagaaacaagagaagggggcaaggaatcgaagatttggtgcttctttctgaggaagcaaagtaaatgctgctattcaaagttttacattttcttcactgaggagagaggagaaattggaaatggaatcgatctcacttgggtctctgctcttttgatctgtagtacggaattaagcttcttccttttgttctcaattttcggcctttgaggacctgggtttgatccttgaggctgagatctttcttttttctgaagaagcttctggttaattttggtaaagtttcaagcttttgcaaatgggttgaatttggttagctccaattgcagtttgagcaagtaattgaaggattggagttagggtttctataaattttactctgttactggatttgttattcaattgtgaagaaaattagggtctttaggtcatgtttctgggttttttctctgtgttgagatttgactttctgtcttcaattatcccttagcaaaatgactattgcttcttttcaggtggttcagtttaagaccgttgagctttagagatatatgtttggattcatatgtgattgcataagacgttcctattggccagaattgaattgtggtctaccgggatagtgttttgttgagtcttcagtagttaggacagtagagatgcctccttccccggcattgagatgctctcctgggagggaacttcctgggaagaaacacagacgaggacacagcattgaatatgggattctattcagagataaagacgatgatcttgccttgtttagtgagatgcaagacaaagaaagagatagtttcttgcttcagtcatctgatgatcttgaagatgtattttgtaagtgtttgtttttactggctgtgttgtttagtggaatgactggacttaaagagatagtttattgcttcattcatctgactgtcaccatgatccttaacctttttccttttattttggacatttatcttcagctacaaaattgaagcacttttcggagttcaccattcctgttcaaggagagagtagcagattgctgactgcagagggagataagaatgactatgattggtacctttcatatttaacttggattgtttcttattttctttctggttcattgttacaactaatccgtaagcccaatcgagattgaatttaaattggatatcttccttactttttagtaattctcaaagacgtttgcttctccagcttctgattccataaacttcttgttggcattactgtaacttttttttgtcaacaattgtagtatgctcttttggatgcctaaattttttctattgtttccactcgtggtctcacaaatcttaatggattaccaatgaaaggttgttgacgcctccagacacaccactttttccttcattggatgaccaaccgccagcagctagtgttgtgagaagagggagaccacagagtcagatttcgttatcaagatcttccacggtatccatctctactaaattgaatgttattctatgtataacgctgttgatcttgaatcagatcttgttgcactttctgatttgctatgtgtttgtgtagatggagaagagccgccgtagtagtaagggcagtgcaagcccaaatcgcttaagcacatcacctcgagctgacaatatgcagcagataaggggaagaccatcttcagcacgccatcctagtccagcgtctggtcgacgatcaggtaccccagttaggagaatttctcctactccagggaaaccctcaggacctgtatcaagatctccgaccccaacttcgcgaaggatgagcactgggtcaactaccatggcatcgccagctgtcaggggaacttctcccgtaagttctagtcgaggcaactctccttcacccaaaataaaagtgtggcagtcaaacattcctggtttctccttggatgcgccaccaaatctccgaacttctttgggtgatcgaccagcatcctatgtaagaggttcctcgccagcatccagaaatggtagggatgcagtctctacacgcagcagaaaatctgtttctccaagcgcttccagaagtgtcagttcatctcacagtcatgagcgtgatcggtttagttctcaaagtaaaggctcggtagcatcatccggagatgatgatcttcattctttacaatctattcctgtaggtggctcagaacgtgcagtttcaaaaagagctagcctttctccaaatagtagaacttctagatcttcaaaattactgtcacctggttcagcaccgagaaggccgtttgagtctgctcttcgtcaaatggtacatattaagcggcataccacttctttttttgtccatgattcttggatttttcattatcttctagaagtacatgttttactctgcttgcatcaacatgtttgcacctgttagtattccaacatataacctgcagtctatgagaacacatcacagaacattgttgtcagtctgtcatatctacgacaaaaatagcttgtctctaagttcccatttgttttctgttacattcttagattccaaagtcaatactttattgatagcatacattcaatagatattctggtaattacccctttttgatcctacagagatatatggaacttttatttatgatctatatctatcatgcaggagcatcctaaaagccatcatagcatgtttaggcctcttgcttctagccttcctagcacaggcatttattctgggaaaggtagttcgtcttaccatcacattatgttaagacattctactgcaacagtggggagcaattcaagttctggccaagttacaggattcatgccagatgctaaaggaatggatccagtccctgtattccagtctgaagttgaaaatttggcttatcctgataaacatgaagaaagtattgcctttggtatggtaaatttatcaaatgagagtagtagacatgagagtcatgagagttctttcagtgatcagcttggtgatatggatcaagattatactgttgaatgcgagtctagcgcgaatgaggaggtcagtcaccaggtttttgatgttgaaaacagttcgactcatggtagtcttcatgtaggcaatgaatttttagaaggggtcgctcttgaaactatggaggtttgtggtagatgtggttctcactattgcgccactgaagcaactagaagcgagataaatatttgtccagagtgcagggaggaacacagttttgtagaaacagattcccctggaacaaattccccaaagctgtctcaaacaattttcgatgaaaacaagttatattttgaaaatattcctgtgatagatgtgctagattcgctgcctgttgttatggttgaggaagaaattttggagacaccagaaaagattgagcagtgtgataattcctacgagcaagaacaatatcatctgtacgagagttctatttccagggctttggaagagcaaaatgtggatatgctcaattacaaggatggaactcagtcttccactggctgtggtcctttgagtataggcacaaaagatactcaaactcagctatctgataagcatcatgatgtgaatattggttctttaggacgtggagacgttcctttggttataaagagatcagtcagtatgaagtcacctgttattcaagctaataactccagttgtttcaccagatcatatgagggcttttcttattcaagggataggagtattagtctgagaagctccacagaaactgcttcggcatcttcatcttgggattacggttcctctataagaaagggaagccatatacgacaacgaagcgggagtacacttgacttggagactcataggtatgataccaactccaagtccctgagtaccatgtcatcttcatctggcatgtctagccacactttccaggctctaaatgtcatgccagaggacagttttgaaatgtgtgctgcccaaatgacgtgtacactcgatgaaactcaccaagaatctcacactgaaccccaaaatctggagtgtaaagaaaccaatgtgatgaacgctgatttcgttgaaagcgttggattagttcgtatttccgccaatgtacttggtgatctggcagagcataatccggtggtaatggacgatgaatgttgtgaaaatggaaatgatgtagccaatactgtgataagcaaaggggagacaagagaatcaccggcacatataaggagcacatcggatttaggagcatcacctatcactgatgactgccctttcaatgatcactctaggctacaagaaaatgatgtaaacgaaacacctcacggtttatccaccacgacagcctcagaaatagaacctgagagtagtgaacccgaaatacctggtttaggggttcatgatgagattccagagtcagagcgcaacctaaatgcagtggatgactgctcagaaaagagtatggtacatgcttctgtggatcaccacagctcttcggctcctgtaaatgaaattttaggtatttactcgctttctcatctgatactggcatctcactgtgctttttactgttgtttaaaaaaaatatattttcttacaaccttgcgaagtttagacataatttcttgctctctgcagatgagtccactgtacttgtggagtgtcccggtggaaaagagccgaggagcctcacacttgaagaagccactgatacaatacttttctgcagctccattgttcatgatttagtttaccaagctgcaacaatagcaatggataaagcaaaggatgtgcctgcggaagaagaaatgttgcatccaacagtgacagtacttggaaagtcgaatgcgaacagaaatagttatggacttggcggtggaacaaaggcaaagaaaaggagttccaaagcagcaaaagcgagccgaaagcaaacagaaacagaggagaaaacagaagtgcagatagagaatgatgaaaatgcaggtgaagcagtgatgatgcgtaacgttggagttcctcctagtaaaggagagaatatgaaacctcctcctaatctggaatccaaatgcaattgctcaataatgtgatatgaccctctctttgatcattttttttttttgtattactagtaaatttttatgttgtttgttcataaagtttgtgcttgttcattttttgctgttgtgttttgggttttcttttaagatttagcgtatttacgtttgttgcagctaatttgtgaggatacacacgatttgggttgccgtctagtggcatgaattgtaaagttattgttttgatttgattattatctttttatgtgtaccaataaacctttatgtactcaatttgttacttcatatgaatgtattcgtttatctgaatattgaattcatcaattatttgttatgtacctccagtttcacttgcctgaagctagagaacccttcttcagatggaaaaagagttgaatgcagaggtaacttagtggagacgcaaagagtttttgttagccgtgtaaaccacaatacgttcctcttctgcggttagagctagcaatcgatctctctgttgccatttcttggtcatcttcaagtgcttcttctctgcgttcataatcattttttaagactcagtatttttttttttcaagatcggaaagcaaaagaaatttgtgagttttgtagtattcactctttgaatgcaagctgtggtcgacgaagaatccaatagccttgttgcactatatgtaaagagagactagtataagttagataaccttagagaaaccaaaccaaacagagcacatgcttctatctttgtggtatgggatcgatcatatagggtgtaaccaatcctctttcctcatcaacttgtgcttaaaagacatgaccacatgtggatgagagtaaacagaaacatttatgatacaaagacatgggcctagcttaagcgaggtcgttttttagaactctcagcttgttctccactcgggagagtcatagaacgctgctgatcagtatctttaccactccaaaacttaccaaggagagtcaagtatcctgaagcatcgatgactcttctaatgatagctttgcgttcaacatgctcaccaatctcaacaagacgtggggacttgggcaagcccgtaaaagttatatagacatgtgcccttctggcattgagtctcttatccgggggcttctcattttcttcctcagtttcaatcaccacttccagaatctgaacctggggcagaccagtctgcactatctgcaacaacagcagttttggtgttaataattattaccaaaagtcatggtatgtcattgatatgcaaaagaaaacagaataaaaaacttataccaaacatccctctatcagtcgctaaaatcaaaagtttcaaataaagagaaatccaatcagtggcttgccactctgatatctctagctgcaaaagcaagaaaaacttatcactgcttaaatgatcacgagcaaaacaaaactgatgatgtgtcttagtaataataatcttacctcgtaaaatcggtttctatcatgacgcaaagcatcttctgagggccaatcaggcaatggaccttggaagacaccatctgacactgcactacaacaaaagtgaggtacgaagggctccttggtggtctccccgctatgcatgcaacatttttaatcagcaagtgagatttgattttatactcttgacttgtattaaaataaaaaagaacaatgcagcacaagtcaccttcattttgatcttttttaggtctagcaatagcgactgtcaaatccaaactgccatattctcgttcatcaactcgaacctgaaaggttttctccaatgatggatcatgtgcaagaagagtaatgtagtacgaagacgtaaggttcattgtcttgttgaatttcagtagggcagcgagctcgaaacttgtcccctgacagatgaaaagagaaaattggatgtggtacatgacatgtttatgaagcaccaagagagagagagagagagactatatatatatatatataattatctgcaaaatattgaaacgatgaagccccaacaaagcaaatcgcttgaccaagagaggttcaggataatgacgaccagattgacagtcgtagtgaaacagtccagtaagcactactggacttcgaatatcctcggaatcaaaaccctaattaagacatcagcaatgtaatcagttagcaatccctaaaaacgatagaaaccctaattcaacagaataataatcagttagcaatctctaaaagcgagagaaaccctaattcaacaaaataataatcagttagcaatcccataaacaacactagaacctatcgagtttctacaagctattaagaaataagaactaggatcagggttagggtttaataattatgtcagttcaaaaaaaaataaaaaaataaaaaaaaattatgtcagttcaatatgtaccacaaattcacaatcatggaaattctctaaacaagaagaagatgatgaaagcattacatcggattctgccactccacgccagtattccctcacatgacgggcatattcctcccacgtaaaacacaccctatcctccgtcggcatattctcctccgcctccttgtgtgtgtgtgacctgggcgcttttttttttgggtaatttgcaaaactaggcatatttgataacttaattaagaatatagtatcatatacatataaattaagaaagtagcatataagggttgtaaaaagacagttttggtgtggaatagttggtgagagatgatttagtaacactttatttagttttcacccatttttatgtttttgttatatatcttttccaaaaaatagattctaattctaaaatttatgagataaatttttttttttcttctacatacaacatagtttgaatttttaaaatcggatttgtatttataaaatagtaaataatgtttgtaagtaaatttatattgtactattttattttttattttttttgtcatatcatcttattgatttataaatcagcagtgtagtcacaatgtagagcataggttattacattaggaacccagaaatgattcaggaataaagattggttttggagaggagctttagcaagaatatcagctggagtattgtgatgtcttcttatccaattgaaatggattgattcaaacttccttaaccaccaatgaatgtcccgtatccagttgtgaacgccaaaatataccttggatccgttaattaggtcaaacagcatcttgttatctccttcaaagcaaacccgtttgtaaccatgactccaacagtgctgcattgaaatgattagcgcttgaatttcactctccagagcattgtccacctttcttcctatagcctgccccgccagtagataacttccattactatcccgaacaacccaacctgctttactttttacatcaccattaacgaatgagccatcaaagttgcatttgatccatcctctttcaggtcgtctccatctgtcatggttatcctcctctctcacccctctgctacgtgtatttatttgtgctactgtattcgcctcggtatactcatgagcatcagtttgagcaagacgcaaagtaatttcccagggaatatgtcttctttgaaaatataaaacgttcatgcttttccaaatcctccataggatccacagcggtaactgatggaattgacttgtccgtggtgaaagagccatatgaagtataacacgtattttatcatcaagagaagaagttgtgcttgtgagaaaattacttgggagtccagaagcacgccaagttgattttgcatagtcgcaatcaaagaataggtgactggttgtctcttcttcccggcaacaacgatggcaagttgtagatggtctgatgtgtatgcgtgtcaatattgtactatttatgatatatagaaataaaatgttgtactatactatttttataaattattcgtaattcagttttaattttagtttagaacaaaatattttaaattaaataaagtaatagtggtggtagtggtggtgggatagtaatttaaattgcaataatagctacggtaatcgtaagagatacaatatagacgatccaaatgatcgcgttaaaccgatatgatcaccattaaaaaactataccctaagagatacaatattgggaacccaagcaagcgtggtaaactattgctgtgacatagacagtagcgatggtggtgggattgacggtaacaatggtgatgatgataacgattatagtggtgataacggtaaaaatgacggtggtagtggcggcaatacgattgtagtgacgacaatacggttataacagtgagccagtgatagggataatggtaatttggtagtagagataatagtgtaataatatagatgatagttatattagaaattttattatgtataatattttttttgttagaatataatagaaagtacatatagaaaatagaagtaagagacattaagagagagggagggagagtgagagagagggagagagggagagagggagggagagagagagagggagagagggagagagagagagggagagagagagagggagagagagagagagggagagagggagggagagaaagagagagagggagagggagagaggaaaggagagagggaaagagagaggtagagtaggagaaagagagaggaatggggcaaaattatgaataatacacaaaatatagagaatatgatctctttttttgttttgatgctactttcttaattataattttttttttgttagatttgcaaatttcctcttttttttaaatcgattcaacccttatattatatcccatcccgcggattttcttatgcgcttcaattggccttatcaatccaaatctcctaacttatttatgatacaaacccgtgaaaccttgtatttcggtttattaaagttttgttcacttacaatgactcgtcataaagttttagtttaaacgatagtataagaaagattcaacaaaaaaattattgatattttaaggatgaactaattacccaaataatttataattctcagatcatgccaaataaaaaatacaaatcaattttcaactgaagaaaaataaaaagaatggataataagtgttatttaaaaaataaaattacatgtgaaataaaaacaatattttagaacagaaataagtggcgggaagacgagaaagagcggcttggaccttaaaaaaaaccaaattctcactaaatgattccgtaaaataaaattctccgatggatttcgattcagactccgatggttctcatgtctccgccactcctccccgagactcatttccgtcatcgccgccgcaacttcagtcaccggctaagcatgtgccgccggtctcccggaaaatgacgtcttcttcctctcgctcgaagcccaaagcacctacacatccgccgccaaatccctcacaggaagctccagtaccgtctccctatcctcctcctcctcctccatctccactatttaccaatctccctttccggatctgccaatcccaacccgctaggttttcttcttccgtgtcgtccttctccagactctgcagcagagcttcttttacatctgttgagaaattgaaatcggacggcgtcgattttgtgcctgagccacctctggtagaagtaatcgctcctccaaaatcagttaggagaaagcctccgaatctcatcaccgatactataacttctcctccggtgaaacctatggtgtttcgtagcaacggtaacggcgagggtaatttcgtgaaattgaacttaaatggcaagagagggaagaagtttcccagcaaatacaagggcgtctctaaatctagaagcagttactcattcagagggaagagatacaagaagaaagaagctgatggtgatggcgaatcattgttggaggaagagtctgatttacagaaacagatagaagacgaagctaatggttttattagctctgtagaggatgcgattcttgctgtgaagactgaggcttctgatgagaatctaacgaagctgttgaatttagtttatggttatgattcttttcgagacggacagttgcaggcgattaagatgattcttggtgggagttcaacgatgctggtattgcctactggtgctggtaagtctctctgctaccagattccggcaatgattcttcctggaatcacgcttgtagtgagtcctttggtttcgttgatgattgatcagttgaagcatttgccttctatcattaagggtggtctcttgagcagtagccaggtgtgtgcctcaaattgtttgtttgttgccggttcttttttttgtagtctttagaagtttttaatggagtctgctttgggaatttttttcattagagacctgaggaagcaacggagacattgcggaaacttaaagaaggcataataaaggtgtgttctatagggaatttttggacgtcttacttttgataagactgcttggtattgtttaaagaacttagccatgggataaggttatgaaagtacttagtttggaagtacattcatttgtgtcatgggtttgtttttcatttcaggttctctttgtatctcctgagagacttctgaatgtagaatttttgtcaatgtttcgcatgtctttatctgtgtcacttgtcgtggttgatgaggcacactgcgtatcagaatggtgagcttcttggcaactggtagattgcgtttctctgttaactgtagtatctactgcctttccttgttctgtttgtcttggttattaagagctattctgaacaggtctcataacttccgtccttcatatatgagactcaaggcatcaatgctgttttctgaactcaaggcagaatgcattctcgcgatgaccgcaactgccactacaatgactcttcaggctgtcatgtcttcactagagataccgtcaaccaatcttattcagaagtcacaactcagagacaattttgagttgtctgtctcattgagtggagctaataggtaagtgtcttgttaatatttttactcttttgctcgtcctcgagttgtaactgactgaaatctgaaaatataacagaatgaaagatctattgattttgatggagtctcctccatataaggagattcgaagcatcattgtgtactgcaaatttcaggtgagagtacttacttatcttcggctttttttcacgctctacaatatactttttatttatttcttactgtatcatgcatgatgctaacttaagcaactttgggctgtgtttgcgcagtatgagactgacatgataagcaagtatttacgcgataacaacatcaatgcaaaggttgtttccatattgaaatctccgacatacctgtatctatagctaattacactctaatcaagcttaacttgatctatccagggttatcacagtggtcttcctgcgaaggaccgtgttcgcatacaggagtcattttgttccaacaagattagagtggtgagaaaaaaagttcactaatttccatacgctttatgtccagtttattcatgcaaactatcactgaaaaagttaagcagatttcagtattcaaatattttatatatgttttggaaggttgttgcaactgtagcattcggcatgggacttgacaagggagatgtaggagctgtaagtctaatgccaatacttagaatgcttgaacataacttcaactattcgcatctcatgtatatacatgcttctaagttttctgagtctgctttaggtaatacacttcagcgtgccaggcagtatggaagaatacgttcaggttaaattttttttgggttttccttcttaagcctagtgatcagcgtacatataacattctcgagaaactaaatgtctttgttacaggaaattggacgtgctggtcgcgacgggcggttgtcatattgtcatctcttttatgataatgacacatatctaaagcttcggagtcttgcacacaggtgattcgtgtgggaactatcaactgtcatggcattgaattaagaggattttaagcttacctttgttttcccccttcttgttcagtgatggtgtcgatgaatatgcagttggaaaatttctcacccatgtattttccactgagacaaagcaacacgagaagatatgctcgctagtcattgaatctgcctctcaaaaatttgacatgaaggaagaggtatttaaaaaaacttaatgccaaatcttgaaacccgttgttctaacatttatatgatcaagtgtctgatcttgtgagatagtgggcgggaaaaaacgttgttatagacaatattctaaattttctctgtggatctggcaggttatgcaaacgattttgacacatttggagctgggggaagtgcaatacctacgtatgcttccacaactcaacatatgttgcactttgaatttccacaaggtagggattagggaagctgtagctgaataatttcctgtttagtgaaaaggcccattattttttaatggtgtatgcttgagacctctgatgctcagaacattgttatgctatatgtgcagtcttctccaaacactcttgctgcacgaagtgccatagttgcagcaattttgaagaagtaagtgtatattcattttctccagcttttctggtcaagcgattctgtagaagtattaaagttgcagcaatgctcaagaattttctgttgtttttaggtctcacgtgaagcaagggttacatgtctttgatataccagctgtggcctctagcatatgtgttgcaacaacagatgtcttggctgagattcaagctctgaaggttaataacacttctctctccaatatgaatctgtggcttagtaccagatatctcaattttcatttcatcttaataagcatatttatctaaataagcgagccatgattgaatttgcacggattaaaagtgacgaagaaacttaagtccacagcaaagaactgatagacacataaattacccttaggaatataactatagtacaatataagaagatatacttaattagtatcgttttgtgataaagtttggttcaattttttctatggactattgatgtagggtttactgagaaaatacaactgtactgagggaaatgtatctaagggtggatcatatgtcatctatttgtttaattgcttgtgttctgttaagaactatttcgtgtgtgttccacttgaatcctaattatcttcctgatttctaattaacgatgttgagtacttgtagatgaagggggaagtaacatacgaattgaaggactccgccttttgttacacaatcttaaaatctccaaaggaaatatgttcattgtccagtcatctaaccaagtggctcacagagattgaaagttgcaaagtaagttcttcaatttgatctactgcataatttaagttccaacgcttgtgcttatatgtagcaataatttttgcttctgatataggtgagaaaactggatattatgtctagtgcagctgtggctgcgattagtgtctctaacacttcagaactgagttctggtgccaagcaaactcggagcctgcaaagcagaatctttgattacttcaatggtgatgaaaagtgtgacagtccgagcaaggctactcaaaattggtactaacaaaatattttacttgttttcatagattccaaatttcgattattgcatagcgaataaggaaatataaaactgcggttgttacatattatttgtttgtcaaagtcatctttccattaaattgatcaacgcttgtattgtggatgcagcgcctttctacgagcagacataaaggtgaagatccaagaagccacactgttgttcatactttattgttttgccatgtatccaaagaatgtccagttaactattgtgtgtcaaaacaggtgtttttgcagagtaatcgccaagccaaattcacaccaagagccatcgcgagaataatgcacggagttggaagtccagcttttccgaattcagtctggtccaagactcatttctggtatattcatcatcatcagctaaaccaagccatgcaagttattgtttggtgatggtacatgtgatttaattgaaatatggctttgcaggggaaggtatatgaacgtagacttccgagtgataatggaagcggcacaaacagagttgttcaattttgttgacaggaacgcagctttagctacataacataagattagaggctttgagtagattcttaggatatttaaatttatttgtattgtattctagattcattgaaagtatccagtaaagagaaattgtgtcatatgagagttgagagaattgttttgatcgacaagaaaagatgaaagttaatctttagtatttaaagaaacatctgataaaactagaaattatacataatagcagagcaagtcatgttaaacaaacattcaggcatcacaaaacgtagttccttccttggaccggcatcccaaagtaaccaccaccaaaatacgggttcgggtgatgagcagcaaacatcaccgatctcggtctcggtataggtatcggtattgggatgtaacatctagtcatcataagctgctgctgctctagttgatattgctgatgatcaactcgtcttacacactgctttctactattgagcaaatcgaaagtcaacttagtgaagacacgagccgtcaattcactgtctgagccagcgtgatgagcttttccaacacgtttcatctgcaacacatcagctattctctgtagtccgaatcggctacttagtccgctgcatgattcagcgattttctttacgtcaaaaacaaactttcccaaaagctgctcgacggtctcgtgaaactcttccttagtctccggtaacggtttccctcccgttaagcctttaacgagataagcattgtcgtaagagccttgaaaattcacccaagttatctttccgtccttctccttgagaatctgagaaaagtctctaaagaattcttcgattccaataccttcctctccgatcttgtccagattgagaccattgcttttgagaaaagctatggacttatcgtttttgaagcacttatgttcgttgaaatctgacaagtttatttcccaggttttagtgattcctcttctgtcgaatagcgtgaaacctaactggatgagatgggtgttgtccacattgaacttcatgtctctgtaacgaatttcctcactcgcgtccatcggagtctcctttaagcatccgggaaactctgtgtcgatagcgatggaactaaaatgtttcaaacaatctcttatcgaatccatctctacttccttgttccatctccaaacttcacccatctctctcggattttgaagactgaaacagtttgtttatctgaaatactaatctctctctctatctgatttcggagactcgaatactaatagcagtgggagtttccttttttcttacgtcgccggaaagtttccatttttttccagtcaaaaagttcgtgttgacttttatcactcctaatttaattcttgttggacacgagatttccattttcctctcaaaagcccaaaataagagaagcctgtttccgaagcggtttacaattttaatactaaaccgaattaaatcactaaaccgaagtctgactaataccaaaacctttttcttttcttttttcgtgtaaacattatcatcttttaaacataatactaagaacataccaaattgggttaaaaatttaaaactcatgtcgaatgagaataaagaaaagtttaagttgagccaaaaaaaaaaaaaacagaacatacaaaatttgaaaattgtctctaataacaaatcttctacagaaagcttctcttttctattctttatagggctagttgaatcttgtatttatgtttgagacatcaaatttatttctgtcctttacgagcaagaaagcgttctctggctgcttcaatccgactctcaacattttcagaaactgcaggtgtttctgcattgtttttagacaactccgtcttctcctcaggtactttgaaagagggagccggtccaccgctacatggcagattaaatgataccgatcaattactgaatccaagaccagacaagaaaaagctagaacaagactggattgaactagtaaagagtaatgtttgtttttacctcaattttctgacatttaatttctcgatctttcttttgatgggagccacccatgccatatctactgcacaaacattccgcatgaacggacgtgtggtggaaatcagctcatggtacactacgtagttaggcatcattccgtcattgtcggcactcaatacagatgatggatgcacctagaatcaaccaaaaacgtcaatatgtcgatgatcatacgaaactggaaatgcttacatatctgagctactgatgtaatagaaaatctaacactgtaacagataaatgagacttggattgagaagtaatgcctggactagctgggactggaaactaagagtccggtatccattgtgacgaagcattctctcagcaatttggtttgcattaccaacgcatagagctttcctcaacttcctgtagtcgtctcggcttgaactcttcctaccatctgccccaacttccaatcgatctagtttgtcaaggagaccaaatattttagtgacggttggttaggtatgacacagccacctatcacatctcacaagataaaagagtgatgttgacataaactctggttctgttggaggcataaccatttagggtgaaagccatagagaaataattatatattctttcacggaatcttcttgtcatgaaacaatctaacctttggatattttctgcataatctgacataactgtcttctaacatctttgacaaacaccatccctcgcacctgcaaattatttttcaacaaaagttatctttcttattggcataaggaacccacgtaataatgtaccgaaatagactatctaaacaaaggtagtaaatttcagtaactcccataattgttggttataaaactgtatgaagcagaaaatacaaacattgacgcccatcggagtcaggtctcaacaatgaagggattttctatgctatatagattgtattaactgcagagacagcatataactgaccaccttctgaagtaacaatgcagtaaggcttttgatgtcaccatgcttttcacttggaatactcgagaatagataaggaaggaaggaagaaaatggaacaattacctgcatgccgttctctttgcaccatacaggatcataattagtacggtcccaagattcgaaaatctgtagcagttgaatgtgatcaccatatccggatccattaggaagattagaatcttcatcatgtttcctcttcttttcactgggtttactatcatgcaagcaaaaaccataaagacaagagttgacgcatctgtatctagtcaatgtgattttaaacatttcacaatctgacccaggttattgtatatcgtaaaaactaacctcctagcaggaagaagagttgtctctgctgacagcatagcaacaactgttagagcttgagataagcaaccggtttcattcgcttctatcaatgttcttgacaatgatggttctagtggaagatctgttgaaccacaaatatggtcagtatgagatagcagctcaaactagaaaaaatcaaacagaagaaaactgcgctaaacataccagacattgtccgtccaatccttgttattgctccattctcatcaattgcatcaatgaaatacaattgcttcaacgcatcttctaatgactcagctgaatattatatgcaggacaaaaaccagagatatattatatcactggaaaattcaaaagtatcacaagcaaaaaaaagaaaaacagcagtttgtgcatgacaaaccatcagtccattgattttgtagaaagctttataagagacattaaactccggatagaaataagttcttacatgaaggagcatcaagaaaatcgaacttgagaatgtcaatatcaggaagatccaatgatttcaagtatagaacactcccggcaagagaagttcgttggatttcaggaatagttgcatcaaggaagtcatctcggtagactgccaatgggtataaacgataacatttccccggtcttgttcggccagcacgtccagcacgttggttagcttgcactctggaaaaacaaagtgaaacagaaaaatattcaaagtacagttagcaaataggagcttgatgaaaacctgagtaagaaaccactgggattcctgattaaaaaatgtaatatctgaatctgatgaggtcctattgaaccaatataattcctttttgagccaactgcggatatctttactagttacggctataaatcatcacacatcaactacaagttcattatatgcaccaatagattattacaaggttcatatttagcaaacaatctaatggaatgaatgaaggtattgaaccaagattcatttgcttacttgctaatttgaataacatcaagagaaaacattccacttgatgggttatattgtctttgcttcacatacccggaatcaattacatacctgtcaaagaaaacagactaggctgagaatgctatcgatctccaaattgtcaaaacattatcagaactttgcttaaaatgcagatatgaacaaatgatacaaacaaagacgacttttggcaacagtaacatcacagaataaggaatcttctcatactacattcagttttgatagcttgacaaagagacagtacgacctattcatgtagaattaaatgtctcaatcgtctgtttcaagttaaactccaaaagtagatctcatagacgtgattgtgaacaacatgtactgaaatgtgaagtgaatttaaaggagcgaggaatataacaaacaacattaagccggtatcatatatctgcttaaatccattactgcacctaattacacgattgcagtcttcatgattagtatgaatgataaatttattcatttttttacagggcctgacttaacactatcgtaatgaaagtatcaatatgtacagtaaatcttacggtagataccagacatgaaaacaaaaaataacactataaacttaaggttttgagtaacttacacaaccccgtccacagtaagggaagtttcagcaatattggtagaaacaataaatctgcggcagtttggaggaggaggactaaagacacgaacctgcagaaatggtgaaagtcaagcaaattaccaaaaccttttacatcacctagatatctcaattgcccagaagcaaaaatctggaatggacactcatattctgattctagaaattgttacctgcatttcagggggcaaagaaccgtgaagaggataaataatagcatccatacaggatccttctgctaagcttcgtactttttcctctagccttgatactaatttttcaatatcatcctgttaaaaccaaaatagagtaagacaggacgcaacaatctagatagttctgccagatttcaatggctagaattgaaacagatgatacagacctgtccggtcatgaagattaaaatatcaccttctggctcacgaacatgtatatctacaagtaacaaca

SEQ ID NO: 1147 - DNA, 126991 bp, Arabidopsis thaliana
gaattcagtctggtccaagactcatttctggtatattcatcatcatcagctaaaccaagccatgcaagttattgtttggtgatggtacatgtgatttaattgaaatatggctttgcaggggaaggtatatgaacgtagacttccgagtgataatggaagcggcacaaacagagttgttcaattttgttgacaggaacgcagctttagctacataacataagattagaggctttgagtagattcttaggatatttaaatttatttgtattgtattctagattcattgaaagtatccagtaaagagaaattgtgtcatatgagagttgagagaattgttttgatcgacaagaaaagatgaaagttaatctttagtatttaaagaaacatctgataaaactagaaattatacataatagcagagcaagtcatgttaaacaaacattcaggcatcacaaaacgtagttccttccttggaccggcatcccaaagtaaccaccaccaaaatacgggttcgggtgatgagcagcaaacatcaccgatctcggtctcggtataggtatcggtattgggatgtaacatctagtcatcataagctgctgctgctctagttgatattgctgatgatcaactcgtcttacacactgctttctactattgagcaaatcgaaagtcaacttagtgaagacacgagccgtcaattcactgtctgagccagcgtgatgagcttttccaacacgtttcatctgcaacacatcagctattctctgtagtccgaatcggctacttagtccgctgcatgattcagcgattttctttacgtcaaaaacaaactttcccaaaagctgctcgacggtctcgtgaaactcttccttagtctccggtaacggtttccctcccgttaagcctttaacgagataagcattgtcgtaagagccttgaaaattcacccaagttatctttccgtccttctccttgagaatctgagaaaagtctctaaagaattcttcgattccaataccttcctctccgatcttgtccagattgagaccattgcttttgagaaaagctatggacttatcgtttttgaagcacttatgttcgttgaaatctgacaagtttatttcccaggttttagtgattcctcttctgtcgaatagcgtgaaacctaactggatgagatgggtgttgtccacattgaacttcatgtctctgtaacgaatttcctcactcgcgtccatcggagtctcctttaagcatccgggaaactctgtgtcgatagcgatggaactaaaatgtttcaaacaatctcttatcgaatccatctctacttccttgttccatctccaaacttcacccatctctctcggattttgaagactgaaacagtttgtttatctgaaatactaatctctctctctatctgatttcggagactcgaatactaatagcagtgggagtttccttttttcttacgtcgccggaaagtttccatttttttccagtcaaaaagttcgtgttgacttttatcactcctaatttaattcttgttggacacgagatttccattttcctctcaaaagcccaaaataagagaagcctgtttccgaagcggtttacaattttaatactaaaccgaattaaatcactaaaccgaagtctgactaataccaaaacctttttcttttcttttttcgtgtaaacattatcatcttttaaacataatactaagaacataccaaattgggttaaaaatttaaaactcatgtcgaatgagaataaagaaaagtttaagttgagccaaaaaaaaaaaaaacagaacatacaaaatttgaaaattgtctctaataacaaatcttctacagaaagcttctcttttctattctttatagggctagttgaatcttgtatttatgtttgagacatcaaatttatttctgtcctttacgagcaagaaagcgttctctggctgcttcaatccgactctcaacattttcagaaactgcaggtgtttctgcattgtttttagacaactccgtcttctcctcaggtactttgaaagagggagccggtccaccgctacatggcagattaaatgataccgatcaattactgaatccaagaccagacaagaaaaagctagaacaagactggattgaactagtaaagagtaatgtttgtttttacctcaattttctgacatttaatttctcgatctttcttttgatgggagccacccatgccatatctactgcacaaacattccgcatgaacggacgtgtggtggaaatcagctcatggtacactacgtagttaggcatcattccgtcattgtcggcactcaatacagatgatggatgcacctagaatcaaccaaaaacgtcaatatgtcgatgatcatacgaaactggaaatgcttacatatctgagctactgatgtaatagaaaatctaacactgtaacagataaatgagacttggattgagaagtaatgcctggactagctgggactggaaactaagagtccggtatccattgtgacgaagcattctctcagcaatttggtttgcattaccaacgcatagagctttcctcaacttcctgtagtcgtctcggcttgaactcttcctaccatctgccccaacttccaatcgatctagtttgtcaaggagaccaaatattttagtgacggttggttaggtatgacacagccacctatcacatctcacaagataaaagagtgatgttgacataaactctggttctgttggaggcataaccatttagggtgaaagccatagagaaataattatatattctttcacggaatcttcttgtcatgaaacaatctaacctttggatattttctgcataatctgacataactgtcttctaacatctttgacaaacaccatccctcgcacctgcaaattatttttcaacaaaagttatctttcttattggcataaggaacccacgtaataatgtaccgaaatagactatctaaacaaaggtagtaaatttcagtaactcccataattgttggttataaaactgtatgaagcagaaaatacaaacattgacgcccatcggagtcaggtctcaacaatgaagggattttctatgctatatagattgtattaactgcagagacagcatataactgaccaccttctgaagtaacaatgcagtaaggcttttgatgtcaccatgcttttcacttggaatactcgagaatagataaggaaggaaggaagaaaatggaacaattacctgcatgccgttctctttgcaccatacaggatcataattagtacggtcccaagattcgaaaatctgtagcagttgaatgtgatcaccatatccggatccattaggaagattagaatcttcatcatgtttcctcttcttttcactgggtttactatcatgcaagcaaaaaccataaagacaagagttgacgcatctgtatctagtcaatgtgattttaaacatttcacaatctgacccaggttattgtatatcgtaaaaactaacctcctagcaggaagaagagttgtctctgctgacagcatagcaacaactgttagagcttgagataagcaaccggtttcattcgcttctatcaatgttcttgacaatgatggttctagtggaagatctgttgaaccacaaatatggtcagtatgagatagcagctcaaactagaaaaaatcaaacagaagaaaactgcgctaaacataccagacattgtccgtccaatccttgttattgctccattctcatcaattgcatcaatgaaatacaattgcttcaacgcatcttctaatgactcagctgaatattatatgcaggacaaaaaccagagatatattatatcactggaaaattcaaaagtatcacaagcaaaaaaaagaaaaacagcagtttgtgcatgacaaaccatcagtccattgattttgtagaaagctttataagagacattaaactccggatagaaataagttcttacatgaaggagcatcaagaaaatcgaacttgagaatgtcaatatcaggaagatccaatgatttcaagtatagaacactcccggcaagagaagttcgttggatttcaggaatagttgcatcaaggaagtcatctcggtagactgccaatgggtataaacgataacatttccccggtcttgttcggccagcacgtccagcacgttggttagcttgcactctggaaaaacaaagtgaaacagaaaaatattcaaagtacagttagcaaataggagcttgatgaaaacctgagtaagaaaccactgggattcctgattaaaaaatgtaatatctgaatctgatgaggtcctattgaaccaatataattcctttttgagccaactgcggatatctttactagttacggctataaatcatcacacatcaactacaagttcattatatgcaccaatagattattacaaggttcatatttagcaaacaatctaatggaatgaatgaaggtattgaaccaagattcatttgcttacttgctaatttgaataacatcaagagaaaacattccacttgatgggttatattgtctttgcttcacatacccggaatcaattacatacctgtcaaagaaaacagactaggctgagaatgctatcgatctccaaattgtcaaaacattatcagaactttgcttaaaatgcagatatgaacaaatgatacaaacaaagacgacttttggcaacagtaacatcacagaataaggaatcttctcatactacattcagttttgatagcttgacaaagagacagtacgacctattcatgtagaattaaatgtctcaatcgtctgtttcaagttaaactccaaaagtagatctcatagacgtgattgtgaacaacatgtactgaaatgtgaagtgaatttaaaggagcgaggaatataacaaacaacattaagccggtatcatatatctgcttaaatccattactgcacctaattacacgattgcagtcttcatgattagtatgaatgataaatttattcatttttttacagggcctgacttaacactatcgtaatgaaagtatcaatatgtacagtaaatcttacggtagataccagacatgaaaacaaaaaataacactataaacttaaggttttgagtaacttacacaaccccgtccacagtaagggaagtttcagcaatattggtagaaacaataaatctgcggcagtttggaggaggaggactaaagacacgaacctgcagaaatggtgaaagtcaagcaaattaccaaaaccttttacatcacctagatatctcaattgcccagaagcaaaaatctggaatggacactcatattctgattctagaaattgttacctgcatttcagggggcaaagaaccgtgaagaggataaataatagcatccatacaggatccttctgctaagcttcgtactttttcctctagccttgatactaatttttcaatatcatcctgttaaaaccaaaatagagtaagacaggacgcaacaatctagatagttctgccagatttcaatggctagaattgaaacagatgatacagacctgtccggtcatgaagattaaaatatcaccttctggctcacgaacatgtatatctacaagtaacaacaagattttttgtcatgtaacagagaaaacatactgtcaacaatgaaacaagtaagattaaccaaatcaaattgacttgacaacagaaacactcgagcttgaacataccaatagctactttcagagatgactcaatatagctgacaggacgctctttgctgtataatatttccacggggtataattttccaggtacattcagcacagggcagcccgaaaagaattcagaaaccttttcgccgtcaagtgttgcagaggttataagaactttaaagttggatgcacggattctaaccaaccgtttcactagacccaacagaatatccctgataacagtgaaccaagttaagatatattctagagcctttgtccatgcttgaatctgaatatagaaaagaccttacgtgtttaaactcctctcgtgagcctcatccaatatgataacagaataatcatcaagcattggattggacagactctcacgaagtagaactccatctgtgaggtacctgaagccataaacaatccaacaatgaggaaaccaaagacgaatcatgtgaaatattgattaatactacacatttaatacatcttccattacttaatccgtgttttactcgtagttctatcctcgaaacgtatcgcataaccaacatcttctccaagaggtacatcaagctcctgtgcgactcgcctgaaaaccaaatcccgaaaaggcggttaaaatcaattctgtcatcttaccggaatcaacaaaaacgcaagatgaggaatcatgatgaaacaaacggaaaataacctggcaacggaaacggcagcaacacgtcggggctgagtgatggcgatgacgccggactttgtgtaaccatgtcgatgaagtatctgagagagctgagtactcttcccagaaccggtttctccaattataactaccactgaattcttctccactgtttccacgatcttctcttcaaattgaaggatcggaaggttcgccatatcgcagagaaacactcaaagaacctatcaagttcagcaatcgatcgacgaaaggaaactgtaacctgcaagttctgcttaggttcagtctaaaatctctgtacaacgaaattcattctccgacgaacgacgcgatagattcacaatacagaaccctaatcgctcaccaacacttcgagaaatctcaaatcaacaacacatttttcctaaaccttttccgttcaaaatcttctctgtatattatatgaaaatcgaaaaatagaaaataaagcgagaaaaatcaagcaagccacaagtgtacttaagaccctctcctttgttcagcggctcttggtcttatcttttatgaatttcgtatctcgtcctttaatttatgacaaagttgctttcagagtaaaaatatttctcattagtagttataaaacctacacccaacaagtacattgtaatttgacaatttgtataaccagaacccaaaaatccttggatataaactacatacctatacaagcttcttttctctttacctccaagactttcaaaaagagatataagtcttgagatggggaaaacaaagtacaactttacatcaactaaaggtaataaagacatgactcaacactggtaaactgagaagctcttacttttccatagaaagctgaatgctcttcccattttctttctcgaggctgatttacactgcggttttgtctctgttacagcggctgaagcaacagagaatccgtcctcggggcttgtgacttctgtatgctgcggttctgtgagatgggtttgatccctttgcctcagttccctgaatagtgtcagtagcttctgtgccctttctcttccacgttgagtaccgtttacggagatagataccaaagaaggtatcactccttcttgtaaaaccatctcgctacagatctcactgtgattgcataatatcagaagcaaagaaacagcttgttcttgctcatttggttcacccgtgtcaagaatggtgcagagattgctcacaaggctaggtgctgaaaccatctcgtcttttcctgcctcgttcaataccaaattaagtagaacagctaaggacttttctgtccaccgttgctcatcactgatagtgagtgattgaagggcgttgacaaggtcagcagataaaaggcaggggatattgggagggtaggtggacaggtgaaaaagggagtgaagggcatcgactttgcactggacttcagtctcggtccaaagaagatttaccatgaaaggaactgccagactcgaacctattacgggctttgcttcttcaagacacgagaggttcagataaattgccgtcactgaaccatgggaatgtggattacagagcatttcctccagcaaaggaataattcctgatgctagcatcaactctttgttcctgaaattcccaaaaaattacaacggaaatgagatataatcttccagttggcaagataagaataacccacttgattttgttgttgaaaacttgaaatcttagcccatctatagttttgcaatattctcaagataaccgaatgtgttagtagactaatttaagttaggtgcttgatcattgagagagagaaaacgagacatcgtttgctcacatacctgttgttgtccacagccaagttaaagagagccatggctccaactttttgggctgaagcgttattttcattcagagctgatcccagaaactgaagcaacgcttcaacacacccattttcccccatgagaatcctggcctcctcatcatcttttagcaatactcttatctgctcaacaactctgcatttctttcttaaggtatccacgtcagttaaagtggtcaacaattccgtacatctttcaacaagagtaacttgatcttcctggtattctgattcacaggcttcctctttaatggttccactttcttccaaaggaaccaccttcacatccttcaacttacaagaaccaacacgttttgctgatctcgtatcggtggactcggacacagacaacgccaacctccaatagttaaggtctagagactcagggggtccatcagggacctgaacgccgttctgttcacaccagctagaaattagagccttgacacagtagttaggagtcaagcaaagatgagagagctgctggtgagttttgggacatgtgttgtgtccatcactaaaccatttctcaatacagattctctcatatgtttgcccagacgcgataatgacagggtcatacataagctgcaaagatatcggacacctcaattcttctggcggaacagacatctgcgaagatctcctattgttattgcaggatctgaagttaaaggaactcagttttgacagctgacggtcaaaagcacgaccatgggcatcgtctatagaaccctggatagtaggtgaacaaggcaatgaactactaccctgtgaatcattgtcatcccagatctcacttctgaatagctttgagtatttcctcatgagatgtaataaataagccacaattgattctttcctcttgtcatcctccattcgggccctctcaatgagtttcttgaggcatcttcgctctgtgagagctgctctagaagaagtgatacctagtctagtagcagcctgatggaaaacctcaagttcattattatcagatgagctctcaaaattccccccttgttgcagcaatccaatgatttgatcgccaatttccttctctgctggatcaagtgaaaactcggtgttctctaactccatcaaaatctccaaaagctgcaaagtaggatatacaggttaaaataaaagcactgaactctagagatattgcttctctgctttaactttccattcacttgctgtgagagaagaaaacaagagtaccaagatacgggaacacgaagaactaactacctgagatccaatagactgttggactatatcttcaacacgcctaaggctatctgtaagagatgatttcgccttctcaaatttcaaaactactgaatcccctgttatagcctacatgtcaaaccagctagttagcgagaatctccacaagaagaactggattagttctgaaatctttaagacataactaaacagaaaacttaccaaataaagtttactagattcagtgcaatggcgtagaatgttcttcactttttctaaaaccacgtgaagtgaacacaaagcttgaattccagatttgcttctcggcctagcagcttcaagcgacgggaaaatagacatgatcttgcagtagatcactgaaagggcattgcacatttttccgtgtagctgaaacaggaatcagttagccaatgccttacacttacagcaataggtaacacgtatttaaaaaccacaggaccaagaatctgttagacatattttattgtacatcacaggatcaatcgagcaaaatcaagaaccagaagagagtattaattgaaacaaagacggatacatatagacatcaagttacaggaccaagaatttaatgtcttagggagatatctcaacaaaaacattattggaaaaaaggtctgattaagataccttggcatcaccaggggcaaagaaattttcttcaacctcattaacatccattgcttcaataactcgctgtatatatctatgacaacaactctatatcggcttaaagttcaatactacaagaagaaaaagaaccgaatcagtgacaagttgacaaataaactaatctatagcagacaagccagatagatcagtgtttcctaaaaaatgcaatgtgttctgcacagagaaagtatataagaacagagcaaagaatacgaaaaagcaacaaaaggtggttagttggggcatttcaacaaacaaattagatgcaaaatcatgagaataccaaaaccccaaatatcaacaaaggaagattcttgtttgtcaagaaacagagggaatcagaacacaagaacaaaaataaaaaacccataaaagcaatctgattaattcctccagcaaatacccagataaacaaaaaaaaatccattttttgaatcgggtgaaaaacagaggaacatacgtaccaaaaaaatgaacctataatctgcatctggtaggtgtagacttaataaagagaagtcgatcacaaaatcaaaagaagagcatcagaggcattagtataatgattaatttgttccttggagatgctgtttctgggtagtttctacgagggtctctgatttacaagtttccgagctaatcaaggcaaaatttgtcgatcccaacaataagagagaagagaggtttggctatggctgataccgaatggagattttttgaaggaaaataaaaataaatattttagtgaaagaaaaaaagaggagaagttcttctcaagtcaaaataaagccaaaacttgcgagtggcaattgcaaggtcgcaagtacacacaacagatttgttttgttttgtttttaattatgttctttgtaagaaaaaagattctgttatttgtttaatcattaatcaactcaattaatttttcaaatgatttttaagtattactagatttgaatttagcaacggtattattaggagacattttaattattaagaaaaaagcttcttaagatactcataatttcgatttcttggatgcgataaaaacatatcattatggtgttgcccgtttaaagtcaaaatgcaatgtagtttagtgaatcaaattttgttctgttttgtttccaagtcttcttcaattgaaactgaaactgttgatcattatttaccaaaaaacatttcattctaatattggattttcggcttgtatactatatagtttcttttttggtcgactgatagttgaaaatgagtaataaaatagatacaatgatgtagaataaaaagctttttgacattttttttttactaatcatataaataaaaataaataaagtatggcgaaggggcaatgagaggtccaattttcaccgacatttcatattgtaataaacacgtctttcatattatattctttatcgaaaaaaaaaaactgcatcgtgttttcttcctgtaaaccaactaggttcaccttcattgactaggacttgtgggccagtggtcttagtccattggttgtctctctgtcaccgggttcgagtggactcggttgatgtaagaagtttatcgtcagccatattttcttagcatgtgtactgtgtactgttgacaaatgacaatgcattcgatgtcaaaaaaaaggctacatattgtagtaaatagtaatattgtcttccttttttaattaccgaatgttctaggaattataatttaaaaataaaccaaaatgatggtcattggtttaattttgaaatgttggtaaaaagaattagttaaatatgaataaatcgactctgatttgtagtcattttatattattttgaattgaactttaaatctatagtactgaaacactaatgtttgaatttgtgtagagggagagttgaaagagatttgccgacttcgacggccgacacgcgccgacaatacatgcatatgtcggctatttagatctctacattgaatatcctaaattacaataataccttctcccttactaatattctttgaatcaacctttattattttttgttttttatgtttttttcagaaattatttgttggcaaccatgttcgctttttttttgaattattatatcccaaaatttataatgatttagacattattttccagttttgccataaaatattaaattaatccacagataatatttaaaaacttttaaaggttaacattgtcgttttttttttaaaggttaacattgtcctttttttttgtaaatataaatgaactatcgcctattagcaacaaaaaagttgagtttggtctgagaatcgtttagaacttttggtttgttggatcgtacatatataggactgcaaatttattactatttgttaattagttgaggctctcctcttcttatttatttatgagacgtaccaaataagtcattataaagtgtactaacgtccggaaatttgtccacgagtaacaatttaaacctcagatgtggtcaatgaaaaatacaagaattttaaaacgacggctaaaataatataaattttgtaaggacatattgatctatcactgatactaaaacagaggaattagttttaatgataatgagcatatgcaaatctatcactgatacaaaaaaaaaacagaggaattttaaggggggggggggggaaattcagaaagaacttgataaccaaaatctaagccacaaagaaaaagaagctatgttgtaagaacccacatggtgaagaatctctgtctatttcgattttgtgttcagataaaacagtaataagcaaaaaagttagcactacaggtttgcttacgaatcaagttttgtgtagtatatacaaaaaaaaacatctctctctggcttttcatacagcagaagcaaacgcatcagcacaaaagcgacttctaagctttaccaaattcagatgaagttgagagagagaaagagaaagagacataaactgaagaatcaaagaggaggagggagatgcggatgagccttcacttaaacaagaagcttctgtagcagaatatgtgtcactttcacacttgtcttcaaagcaaaacctgcaccaatagcacaaagctaatacctcaattgctgcagaaaagaaaagaaaacattgcagaattatccatccgaatatgggttcgcttcagacaccgatagaaatgagaagctcatcgttgttggatacgtcctgcggatatttgctcagagagttacaggcaagtttgttttgatggtgctttctgtttttctttttaagtaaaatggttcataatttagagtattctgatcgatgcccgatggtcactgttttatgcacagatgatatgggatgaagttggagaagataagtttgagagagaaaaagtgttgcttgatatagagcaggaatgtgtagaggcttaccggagaaaagttgaccatgccaatgtttcgaggtctcgtctacatcaagagctggcagaatctgaagccgaactcacccattttcttttgtgcctcggtgaaagatcagtacctggaagagtaattttcattctttcatatccattatgaagcaaagactattcaataaacaaaaccaagactagtccagtgtttcagataacctatcatagataattttgttgtcattctctatacagccggagaaaaagggaggaacactgagggagcagctggattctattgcgcctgcactgcgtgagatgaggcttaggaaagacgagagagtgaagcagttccgatctgtcaaaggggaaattcagaaaatatcagcagaaatagcaggtagatcgacatatgaagactcaactagaaagataaccatagatgacaacgatctttctaataaaaaacttgaggaatatcagaatgaactgcatagactccatgatgagaaggtacattttgtaataccaaattgggaacaatgttttttttttggtcaacatgcatgtgttttacttatcagacagttttggcttctccatcatgttgtctttcattgttctgtcacacaagaatgagagactacagaaggttgatatatacatatgcgccattcgagatctatcagcaacattgggaacagaagcatcaatgatcataacaaagattcacccaagcttgaacgacctctatggaatatccaaaaacatcagtgatgatatcttaaaaaagcttaatggcactgttgtgtctctggaagaggaaaagcacaagcgccttgaaaaggtgaagctaactagaaatgtttcaattcattatctatcctaagaacataaaacttaacagatataagttgaaacacaaatcagtaaagagatgcacatttatcaaagagaaaagaggttgttatcttatctgaacttttaagacatcatgtgtgcagcttcaccatcttggtagagctttatcgaacctgtggaatctgatggatgcatcttatgaagatcgtcaaaagttttttcatgtcattgatttactgtcgtccgcaccatcagacgtgtgtgctcctggaagcattacattggacataattcagcaggtaagtatataactatgtagacatgtagtacaatggtttcataccaatgatggctggtggtaaccgccttttctttgtgcaaatttttcccaaggctgaggctgaagtcaagagactagatcaactgaaagcaagcagaatcaaagaacttttcatcaagaagcaaaaggaactagaagatacgtgcaacatgtcgcatatggagactccatcaacggaaatgggaaatatcacgaaccttgtagactctggtttgactaattgtaactttctgcaactgctgcgtgtctttgttatacatgtcaaactcattgcagagttttgtcctctatttcaaaggggaagttgaccatgttgaccttctagccgccatggatgaaaagatagcaagagcaaaggaagaagcagcaagtagaaaaggaataattgaaaaagttgataggtggatgttggcaagtgatgaagagcgctggctagaagaatatgaccaggttccaatctcttttctatgaaagtaactaaatgttatctctgtagtctaactcatacaagaaacactaacgttgtcacaggacgagaatcggtactcagtaagtagaaatgctcatcgaaacctaaggagagcagaacgggcacgcataacagtcagcaaaatctcaggtaatataagcagttccttagggtccaacacaaataaagctacaaatgaccctgcattttcttaagttaggaagcaaactagtcactgacccttctataatatttggaccaggattagtggaatctatattggttaaggctaagagctgggaggtagaaagacagaaagtcttcttatacaatgaggtaacacaacttgatgcctttttgaattaacaaagagaaactctaaattagatagagtaatcatcacctgttaagagttatccaggtacctcttgttgcaatgttgcaagaatacaataagctgaggcaggaaaaagaaatggagaagcaaaggctccgggttagtctctcctcctaagccttaaatacagtaagaaaaccaaaactgtgaaaggaaatatttgaagttaaacctgattgacaataaaatgcaggaaatgaagaagatgagcattccacaacctgtggctgagggagataatttttacatggcaaggccagctagcagcaataggcgaatatcaaatcgaagcatgaatggtggatttggaagtggaagtcctataaacagaaagtattcaggaggattcaacaatactaacaataattacacagcacttggtacatctataagaagagaaagcagaaagagtgaggcataaaaaatacctgtctttaggcttaatcgtgatgacacaagttctgttgtgtcactgttttcaggtccattgtctccttgagacacttgttcatttgtatatgttttcacattcaaaaataaaagtataatcctctgtaacaacaagacttgagttatgactttcggaatctgtgtgtttcattatgaaactcatcacacaagttcatgttttcatagacagcctttaacagtggtgaaaaatccgacttttggaaactgttagaatcagactccaatttcaattgagagagaaaagcgttgaagttgggagatacgtataatagttggctaagcccaattcaacgaaaagagagaaaaacagatagagaatgagatagatacctgtaatcactaattagtctgcgtcacgacgcgacagctacccacccggcgttggtccggcggaacgatccaccgtctcaattatggaattagtattattttttggtcaaagaattatataattaatataaatgaaggtttattattattatcactgagacactggtcagtcatcacactatactgtaagtgggaggatcctgctaaagcagaagtgtatcttgaagttgatcctaataaattctgcattggacaaatagtttattttaaaaaaaaattactctatatttctctaaagaaaaacaaaaaattgatccaataattatacaaataaacttcctttttcatatttgtttttctctattactctatattttccattgatctaacaccagtagcacatccaaagtatttccacttacataaattcagtattttcttactatatctccttttttgcctaataaaccctattaaaaagataaatatatgtttaaaagtcaggaaataaatgaaattgaaagacctaatatgggttacagaaaaaaaaaacatacgacttaaacatggtgactgtttgggttatacgtaaaagttaaaatttatggaatattttaaatagatttatagaagacatttcttattggttttcgtttccacttgtatctccacatcgcaacttgtacattttataaaatttcgtttgggttttaatgaaaatccaacacacattttatcaagagattctcgtcgtcatatctattttccttttcattttctaaaaaggtagtatatggcaaaaatactcaccaatactcgttggaaattaaatatgcaatataattaccttccgtgacgtcagaagaaaagtcagagttactaccacttaccagctcacaccacatgctattctcaatagagttgaaattagactggtaaacattaaaaagtctttaaaacgagttatgggtaattaaaactctacgttctcctgtttgttcaaaaaaaatttacgttctcttcaaacaattttattcagattcttatacgataaaaatgactatgtatcataagtatgtaatatatgataaaaatgtgaaatataatgccccatgaaattttggaaagcctgtaactaaaaataacgaaacacgagatgcagatccaaaactgtcggcactaaatcagataataagtgaacccaatgctgtaataaaattcctcaaaaaagtaaaataaaagggcaaaagaggaaataagaagataaatcgtgtcgcaatcttagcaaaacctataatcaccagagtcaatcgtagcgttcgcagccgccggaggaatagcaaaatgccataacctcccggcggcgttgactctatacttccggcataaaaactcctcggcaaaagtcttctccaccctccgattaacatcgtgcaagaacacgtgcgtaactcccggtttcttccggttcctagccataacagccgccgagaaaatcgccgccattcttcccggagcttctgcgaagtaacctttaggagcatcgaccatcagcagatcccactctgtatcgtagaactcatcgggcagtcccgtgagagctagcttacacttctcgtttccccggagataagatttcgccggaaaacacttaggctccgttttgtacgaacgtagaagcgaatcggcttgttgaagctgcgtcctgtaacgcacgtgatgcgcacgtaagaaaggagagtctttggtcactttctgaaaccattcaagatcttcttccaagaacaaggttttgccacgtggatttaaagaagcccacatgagcgagtcacgaccgagaccgaacacgagaaagttagccggagctagctttttcaagatgttgaaagagatcgagatctcagcaagattctgttgtgggacaacgttagatgtcgcgtagtggacgatcgcttgaagctgaatcggagtcgcttcgtaatcagctgccgcagccaccgctctgcttttggcgcttgctgtggaacagaggaagagcgtttcgtcagcggctcgtatgaagcttgtgaaaagcaaagcaccgccaactaaaccggctagtaaaacgccggtgatgatccatcttttctccgatgggattaacgtgttcatgttgttttgttcgatctcagatctgattgttttttagttatttttgttctggtttttgtggtttggtcgagagacgacctcggaggagaaaatagaaatgtgaagaggattgttgattgggggactgaatagggaagaaagatttgggatattttttcttggagatggtctgattaactgacacgtgtccatatccgaccattgaagcagctttgggttatagtggatatatgaacaagacacgttgctgtggcttattcgaattttgaaaacatttctgtggacatatgttatttaattggacttggagcatggggtttcgttcccacttcggtttgctaaagataacaattagtaacattaaacaagatcgttcatcccaaatataagcaaaaaaacaagatcgcccatacaatttcagttgatttcgtctcaatacgtattagggtaatctatgatgagtttaccggtggataacgtttgatattttgtcttcttgttttaaaatggacttgtggatttgttatctgttattgttcaaggtttcaagctataaatgttgtttatcataattcataagatccaaaagtttgtatttctgaaaccagttttttaattaaatttctgatttattcatgcatttttcattttaaactgtaagaatttatatattgaattgatatgaaaatgaaaacaaaaatatagatatgtccggaaagaattttttggttcaccagattctagtcactttcttgtggtaaattgttcgacaatgagggagtgaaaaaaatttcgtcactaaagtttcaaatatcgaaatgataacataactcaaatgattagcgacgtgatagaaaaacacgtttatgaattgtgtataactcaaaaaaaattcatatatgcggtaatgtattgcatgaaatgtgtatctatgcttgtttttttccgcgtaattaaagatccagattttaaattacaaggatcacattcgtccggtacatgaacatcgattttgtaaattgattttgaaatacacatatgttaaagagccaataagacacattctctgctattcaatttttttccttaaaagtttacaaatgttttttgtgtccagatattcctgacacaatcttataatattatcatatgtagtttctatgtgtatatattagttttataaaatttaaagcgaaagaaacttcaaagatcacgagtcacagtacttcttgaagactcgtcaattgcttataaaacccattaggtattgaaacaagctctctatgacttcctttctctacaacccttcccttatgcaacacagcgaccgtatctgcttttcttatggtcgacagcctatgagccaccaataccgtcgttcgtcccttcattagcttgtctagcgcctcttggactagtttctccgagctcgtgtccagagcacttgttgcctcatcaaggagaagcactgaagggtcctttaaaaccgccctcgcgatagccactctctgtttctgcccacctgataattgtactcccttatcacccgcgtgcgttttgtacccttcttccatcttgataatgaactcgtgcgcattcgccgctttcgcagcttccatgatctctgcctccgatgcgttttcattgccatacttaatgttttcgtatatggttgttgaaaagagagccggttcttgttgaactagcgctagcttcttgcgcaagctacgtaagtttagggtttttatgtcttgcccatcgatgcaaagattgccgttgctcggatcgtagaatctcatgatcagtccgatcaccgtgctctttcccgaaccactaggtcctacgaccgcaagacttttcccggctgaaactcggaggtttaggtttttgaaaatgtcaatttcgggtcttgtgggatacacaaaactcacgtttctaaactctatatctcctttgacttgactaaccattcttgagttaggctggtctggagatatcttggtctctctatgtaaaaccctgaaaactgacccgagtgcttgcgtgcccttcacgatatctggggtcaaagcaagcgtttccgaaactgagaaagctgtgacgatcaacaccatgaaggatttgatactatccccaaaattcgtctccttatgattgatcaaaaccgatacgtaccagagaccaagagcgtaggaacagaacgcaagaaactgagacaaaccgtatccaaatccagagatatgacctctgacaaaggcattcttggtgggcttgcttagctcacaagtaaactgttccgagatctgcttttcggcaccatatgcagcgacagttcttatatttgcaatcgcttcacgtgccactgaagttgccctagagtaagctcttgtgtaatctcctccaaagccttttaaaaatagttgctgcaaaatgtcatattcaagcttattcagtttcaagattcaaaatatggttgagaggattttttttattttgagttacctcggtaagtgaagccgcaatgagaagagggaaacaagccgttaccacagctgcaacacgccaactatagaaaaaggcaagtgccaatgcagtgactgtaagagacaagttttggactattgtcgagaggcgatccgctagagcactcctcaccaaagttgcatcagcagctaagattgaagtaagtgagccagtgttgttctcatccagatcaaaccatccaatctcatttgaaagaatcgctgcaattgtcgtaaagatagtaagatacacattaattcaagaatcaaatcgatcttagaacagagcattaaacagagcaattgtttaattttttgtgtttacctgagaacaaggataagcgaaccctagaagtaagacgctctcccattagtgtatagaagtaatgttggagaagatatataggtgcagttactattccagctccagcaaagataatagctaccttttctacgtcgcgcttgatcacattaggaaaaggcgaataaaatgcagttaacacataagcaatccccatagagaacaatggagtttgtgctccagcaagtactgcaccaatggagccaagtaatgcatatggccattctggagaattcaactttataagttcccatatcatcgaagaagagctaaagtcttttttggaatcatcatttttagtcttctcttggtctaccctgaagcttgaagtcctccttgagctagaaactcttcttgaactagaagatccagcttgagatttacaagtttcagacataattgatctcgagttttcttgaggttctgtctcttggcaattgacaagagtcgcataatctcctcctcttaacatgagttctgagtggcttccggtttccctaacttgaccatctctcaagacaacaatcttgtcaacatttcgaatggtggataatctatgtgcaacgacgattgttgttcttttttccatgacattgtcaagtgcttgctgaacaatcttctctgattcggcatcaagagcgcttgttgcttcatctaaaagtaatatctttggatttcttagaactgctcgagcaattgcaatcctctgtttctgtcctcctgagagttgagttcctccttctccaacctatttataatggtttgataaataatgatcaagtggaaatatgagaagatatgagtatggaaatttggagaatgtacctgagtattgtaaccattaggtaatgatttaatgaaagaatcagcattagctgctttagcagcttctatgatctgatccatattcgcattctctttacctaaaagaatattggaagctattgttgtggcgaataatgctggttcttgactcactaatccaagctgttctctaaaccatttaagctttaggctcttgatgtcatttccatctaagagaatctcccctgagttaggttcatagaaacgttgaaccattgatatgattgtgcttttccctgaaccacttggaccgacaaatgcaaaagtcttgcctgaccgtattgtgaaactaagattctcaaaaaccatgtttggtctagaaggatatgcgaaagacactttttgaaactcaatcctcccagctacattttgcaatgttgttccctcgtctaatctttgagaactttcagaattgttgttccctatcattctgaatatgtttgcagcagcaactctacccttagcaatcgcggataagctaggtgcggcttgacctaaggcgctgcaaatgcaattgaatcattcagtttgatgatatatctagcaaaatttctcggatttataagacttacaatccactgaaaatgacattgaggatggttgtgaaggcttttgcaccattggttttgccgtggcgtacaagaagacttgcataccacaaaagcaaagcccaagcacagaacaagaggctatatgttaatccaactcctaaacctttagcaagaccgctccttttaccgagtttcagagctttcttgagagaatttgagtaagattttacagctttctcttctcctacaaaagcatacactgttctcacctgtgacataacctgaagatccatagaattgtgtttttcaggatcaaattaaaagaattgtgtttgctttcacattttgcaaaagtattttcttgaaaactaaaatatgttttgttatgtgatttcttttgtgagactttcttcacacgtaaatgcagaaagtagtttatgagaaaatctcagtcatagtgtataaacaaacctcttctgcgacttttcctgcatcagcataagcagtctcactcttctctgagattgtagacatgactatagcataccctcctcctgcaatagctatcagtggaaccactcctaacgtgagcagcgttagttgccataccgacaaaaaaccaatgacaaatcccgctataaactgagatagataccgcaaaacatggtcggtctgaaacagaacaaaacattataatgaatccatatagtagtatgaatgaattcatatattagtaaaagtaccttatcgccaattgcatcttgaaccaagatagcatcgcttgatatgtgaaaaatgagatttgaatctctagcttcagtatcaaagaaagtaatgtcttttgctaatatcgatttgagataatttatacgcaatcgtgctgtttgtctttcccctgtttgcatccaacaagaaactcctgccaataataaaccatcccaactaaaaacattaaaaacagataaaagtttataacattataaaaacatatcaccaatgtacatggaaacgtaccgatccaagctgatacaaaattgaccaatcctaagtagaccaagtacagagcattcttgaaaagacaaagcaccgaattgttatgaacttgtgattttcatttcatgaaaagacaaagcattcttgaatataaagattttcaatgacagcggtttctgaacaaacctgtgaaacgcgggaagatatggctttaggatctgtagaaagatttccaagagaatctagcatttttccgaagaacacgaagaagagaggaagcgtagcgccatgtatacacgcacctaaacctcctagcaacatgagaaagtaatcaagtttatctgctgcgctaaacaaacccatcaatgacactgattccttctttatatttttcttctcctcctttgcttccgtctcggcttggatgtttccattagaggatctttctgtgttatccattgtcactgaacactgagatcaaaaacagagaggtacttgagagcgtagtagataagcagagagaaatttagggtgttgagtttcttgtgaggaaagctaaggaaaaagggtaaagtgggaattatgaaatagagacatctccctcgcttatttaatgtaaagtgttaacactcaagtctaatcttacctaaaaaagcgattgctctaactgtttttgacaactcgtagttaaagctttcccataatcttattaatggagaacctatatacgtatatctggttttacacatcagtgtggagctgctcactttgtatcatgagtgtaaacgttttcatcatgtttaattttagggtgaaaggatacgtagacaattggtagttattgataaaattgatccctactactctgacatgcacaatagaatatgtttaatttgataagagtataacgcatagttgagatatatatatgtaaaacttatggtgaatgttttttacgtgacgctagaaatgaatatgaaaagaatattgcatggtaggtttgaggaacaaatcgttgtcaaacttgttattatcgtctttaagtaatgatactacgtgtacgaaagcaatacgcggctgtttttcatccatgaaactttataaatcttgaatatttattcatgtgtactggttgttagagaaataaattggtaaatatgtttgagctgtcacaaagctatatccacagtttttgtgatgatttgatcaacatattactctcgagacgatttgcggtttgatgtaatattacaatgtttgatcaattaattgatcaaagacaaagcgcaaagacgaaaattccggtgaacaatgtttacgaaaaactcgaatttcagaatttacagcttttggaatgggcaaaaattacaaaattaaaacgaaaatcaaattttatcgagcttgtatttggagacaaagtttttgtttatatgctgtcgtccatttgttagggttttacgacaaggcatgtctttggaaagaacctgattattgaaaaaaggagtaacatcaacaccgacaaggtttgtggttattttgctgattatgaaaaccctatttgttgttaaattcctaaatcttcgtgaaactcatgttaaatgtcgtacttgaggaaggacaatcatggtcttaagcttttttcttgtgtatcacaaatcgtagtaatcaattattgaaaaaaaactttaaagcccattaccagaatttaggcccataaataataaccaacacaaattgtgtcaatcaattcttgacccaatttttttttgtatattcatgatgttctttcctattaaaaataacaaatttatgatcatataggtttgcacaaaaaaaaaatgatcatataggatagatatcttggtgataaaattttcgggtagcttgtatgttttatgttttgtcttgtcattctgactatgaatcagctggattatttttttaaaaaatcatttctgacatgtgcaaagagataagagcaataataaaaaaaaaatgtgtgtgagtatgtacaaatttataaagtgagagaatgttagccaaaccttgcacatagccagacttaagagtgtaaactgttacaaacttacagcaaattcaactgactttttgtctgaaattttcctcggattcaacctcaaatcatccttagattgattagtttgttgttaaatgttgaaatggcataacaataattgtaaagttccaactgtttttaacttttaagagtctttgtcatgatttacggatttagcgtcccaatacaagaggtttgttgaaaatggacccaacacaaagagtcacatgcatgtagttattgatacagtgaagagcgaacacagcccatatactattcttctatgaacactatagctactcaagataattttttctgtgtaatcaaaaagcagaaaacaagaaaacgagtacagctgagcaggttttatcattgaatcctatgagtgaaagcgacttaaatagaaagagtactgcattctttgttcatacctaaaaatcactaaaattctaaccgcgttatagaattagcaattactctcgtatggtatggatgcatttaatactcttccttgcaagtttgaatttattattctcttgtaaacaatactttaaatttagtttcatttgtctatatgactaaaattttaaattcaaattgacatattctttaaatatgtatatttttgtacatgatgttaccatccgtcgacagtaatgacgttcgttatcacacattcacactgaattttaatttaagcaaatcacaaaaccctatttattatgattttgctacacacgaaatctactgataatttgatgtttgatttcattcactatcccgtcaataaaatcacacgcaaacaaaagtaaggtcaacacttatatcagcatcgttaatgttaatatgtataggtgtctaagctcccaactacacaccacattgcatttaatacgcacaacacacacacctcaaagtcattttgcttttaaatacaaacaagatcttcaacaagcaaaagagtaattgaacaaaagaaagaaaaactgataatgaagggtcttcatctccacctcgtcctagtcaccatgacgatcgttgcctccatcgccgccgctgcaccggctgctcccggaggagctctggctgatgaatgcaaccaggattttcaaaaggtgactttgtgtttggactttgcgaccgggaaggcaacaattccgtctaagaagtgttgtgacgctgttgaagatatcaaagaaagagatccaaagtgtttgtgtttcgttatacaacaagcgaagacaggaggacaagccttgaaggatcttggtgttcaagaagacaaactcattcaactcccaacttcttgtcagctccacaacgctagcattaccaactgtccaagtacgtttctcgttaatttcttttagttcatatatgctgtaatctttatcgatctgcttttgctatctttcatgtgtcttagtgtctattgcatgcaagttagtctgatatttgaggctacttagagaaatagatttttggtttgacgattacagaatgagcaataataatacatgcctagaaacaacaaagagaagaataataactaagtacgattttgtttaaaactagtaaactactatgatataggtttttttttacttatttttactttagtaatgaaatcacatttttaagataaatggagcaatggcccacgaatgcatgctttcatgagttttgtaagttttagtattccaaggtgattggattttattttatctttttggctgttaatgagttttctaattaaatcgagtaatcaataatttaatttcatttgtcataactatatacaaaaattatttttcgagtggagaacaagaaaccaaccagtaaccatattaccatatactccgctagaaatactttaatgcgacaggtgcctcgggttgccactattatctacagagaatcgcatttaattcgtagcacatttatagttgtaacctaactttcccacagctaatttgttacaacaactaatcaattcaatgtgacaaatgaacagagcttctagggatttcacctagctcgccagacgcagccgtattcacaaacaatgccacaacaacaccggtggcaccagcaggaaagtctccggcaactccagctacgtccacggataagggaggatcagcttcagcaaaggatggtcacgcagtcgttgctctagccgtcgctttgatggccgtctcctttgtcttgaccttgcctagacatgtcacattagggatgtaatcttttcttatgaagttggttggtgcttttgtttttgtcccttttgtttcaaaacttatctttcaagtgtgtttctttgttcggacatttgttgtaatgagtcaacttcccactcaaatctgatatctctccgcaaatgagtaaatttatgctatttcattttccattattcatttgacatgctaatcataacaacttatttggtcgaaaactaaactttcaaatagtcaagaaggtgtagataccgacttttagaaccttgaattttatcttacaacctatgctccttaagtacgttatcaaatgtacaaaatccaaaaaccataattaaacctcagccaatcccaagtcctaaaagagaagaggtctatttgggtctgtgttgcaaggccaaagcctctgcaaagtgcttggacatttcccttacaaaatcgtcgtggagagaatatgttggagcagaggttgcagaaagtgcgagcgattcaagaacagcacgttgtctggcttttctgtcttggatagctatctgtcgctcttcgtagaagttaaagtcgtcgaggatcgaagaacgcatctcacagctgatgaatatatctaacatctctatacctttttccagtcccacctgcagatataaacacacaaatactatttcatatcttaacatctctatgttcatagtaagatcttgaatatgtttcttcgaaaataaacaaattttactagaagcattttttgttttcaaagaagacatgttccacattagagagatccatgtagagtggagagataactgcccttatgtgtaatcatagaagattcaaaaggagcatcaataccaatgtgcagtaacagctcagtttcattatcaatgcactttgagaataaaaatatgattcaccattgtcaaatctatatgcatattcaaccatttgaaggagcctcaagaaacgaatgcggaagagaagaagagtttagtttacctcttgggtgtctctactgttagtgacaggcttattgtcattgctttcaattatgatgtgacgaaagagactgttaggaacatctttgacaataagccattggaccgggaagtgtcctgaccatctatcctgttgccagtactctacacttgtgttgaagtcaaccggtccaaccatctcagcaactccacaaaactgtgaactggcatttacctgaaatcaagtttttgagccctttttctattatgagtttcagatccaaaccaaagcgataaaaaaaaaacattaacagtatcatctcagtggattgaagtatagacacacagatatagcatgagatgaattgatgtgatgccggttaatctaggaagacaaaggcctgacaatgcagtttcatggttgaataaacaagcaagtgtatatatcttccaagcaaggtatcagtctgaacactcagagcttccaacaagttttgatttgtaatgaagaaaaataggcgatttaccgaaaacaagagaaagactgggcatgccacgtcctttttctttgcttcacgataggcagcatccaactttttgtttccatttttagtgcttgcccaaacacaatgctttatgctcttgtggacattatcctcgctatatgacttaataacgaagaactttgcgtccctgaattgggagagcaattcttgctgacaaaaacgatcaacgcgatcataagagatcattttacttttactgtttagcctggatgctctcggacctctgttactctcggtaagcatatcaagcatggcagggcagtggctgaagtcattgtagctttcacttcttgcttcatcaagtggtggcaagttataatcattctcccaagttgggctagaagaagaagcagagaaagggcttcttttgcattgagcatatgcttgctctctgtaacttaagtttgcagcagattcaaaagcatcatgcaaacctccatgtgctggaccctgcatagatttcatcaatcagatctacatagaaattctatgtactttgtccgttaaaagaggtagaggtagtgattacagaaacaaaccatattaaaatcatttgccagcaattctgctgaaccaaggtgtctcatacatggtctggtagatgccaatggaggaaacatgttttctccactgaaggggttgagattcatacccctaggttctccatatatattatctcttaagacagaatttcccctagcgcgcatcatattatcaatctcactactgtttctctcattcacatgcctatcaaaatgtctagagttcgcctgaaacatgtgaaactccggagaaagatgaatatcttcaggggttggatactgctgatttgataagtgaaaaggaacgaaatatcttgaatcatcagcatagaggtcgccataatgctgcagtgatgattgatttctggtagaaagagatgacctctgaaaatctgatggtacaccattactatggtaaaacatttcatttatcatgccctatatcaatttaataagagataggaaataaatgaacacatcatgaatatcagaaatcaaaatcaagtagtgtggaaggcgtagattagatgatttacgcacaggagagactttgtcaaagctaggaacatccgagtgtgagtggttcgaccttggagtatcagctgcatattcattgagagaacgacgacattaaagagcaacaaggaaatttcaaaacagtactacaataacagctaagaagcaataaaatccacaattttggtcacaagacaaacatggcgaagcagaaataaaaaaagtggtaaagattttcatgggtatgcggcaatgtttcctctagtgcacatatgagaataatccaaaacaaagataacaatttggaatagtccacataagtaggtggacttcattataagaaagaataatcagttctcttggtttaagaacataaaacaacagtagctttttcttctccaaaaaccaaaatcaagttgcaaatgaaaatgccaaaataccagagagaaaacaaaacaaaggtcacaaaccagcagaagattagttgtaaccactaaactacagctaaaatacaatagaactgattaggaaaggatcatatagatctaacctccaatgtgaaatgattctgtgccctgtccacaaaaagggcgactgctaactatgtcctgtaaaatcataacacaatgtgtcatattggtgctagcttacattatatgacacaagcaattccactaatcactcacctgatcttggagaacactctggtcagtatttaggcccgtaaatgaacctaaaaaatccataaaaagcagacagacacaaccaccataagtaaaaagctaaacatgagagaataatcataggatcaaggtgaagtggaagaatctaacaaagcctagtaagtgagagaatcccaaaaaggttaaggctttacgagaaattacaacaagagtgggcaaaattcatcaacagacaacgtaatctcttcgttagagtgacgaaacaataaaacccacgaaaataaaacgaaaaaggttcaacatttatcatttttaaagagaagcaagcgaggcttaccagtagtagtagtaggaggaaaccagtcggtgcttcggtaagaagcggccatagaaaaaatcagccaatcggaggcaaaaaggaagagagacgataaagttagacaaaagcgagaatctctttgatactgaaaggaaggtgttgagagagacttgagagaggaattgtcgaattttgaggattttgggagtgtttttgggtgacgcatggaaattcgtaattattcttttaattaattgagttttattttctttaatatgattaattaattaagtggatatgaatgcaggtgagataattttgtataaatattagccaaccatttttaactgatcgttagaaagaaaccaatgtggtttttacgaaataattttcactaattagagagattattcaactatttagagaatgtaatctgccttttattagtagtatccgaaatttctaagaataagaaaggcttacctgatttatattctagttaaagaacaaagaaatttgttggaacaatcttgttgatttctggctgtttaacccaatgcttttctatccattttgtttatttttttattctgattcataagtttacaaagatattgtttagcttaccaaatccataatacatgttgggatcccaaactacaatgataataacgaaatagaaaaatatatacacataatggagattgattcgaaaactaagtaaagcttccattatattactgaaggtgtaaatggttgccgcggttaaatctgtttgcagatattattattttttatttacaatttataaattaaaatttattataatatgaactaagaaaaataaatgaaatttctcgcagaccgatcataaaccgattttacattaaataaagttggtttacattgtatgtcctaaaaataaaatgaactaaaccgctgacggatttatctgtatctaccgctgcaacctacactctttataaacaaatttattatttttgacacatcttataatctaattgattatttaaaatattatcttttaaattctctaaatcgcactatattaaaatataaaaattattttgttggagaaacaaaccttaaaaaagatatataaaattatttgttcaaaaaaaatgttaaatagaaattaaagaaagaaaaagagaaaaaaaaaacaaattgagaagaaaagaagaaaagcagcgtcgtagagacgcgaagttaaacaacaggtcagagaataaatagaaaaaccaaaaccctttagcgtctcccaaatcctctcaatcctctgctgctcaatctctcatcatcggcatcgctctctctaaaaatgtctcagatggatcccgacgctgtatctaaggccttcgtcgaacattactattccaccttcgacaccaaccgtgtcggtctcgctggtctctatcaggaagcttctatgctcaccttcgaaggtcaaaagatccaaggagtccagagcatcgtcgctaagctcacctctcttcctttccagcagtgcaagcatcacatctccaccgttgattgtcagccttctggtcctgcttccggtatgctcgttttcgtctccggtaatctccagctcgccggagaagaacacgctctcaagttcagccaggtatctctctctctttctcttcgatttccgattgatctatctttgtttggatttgtttgatttgcttgtgagtttagttattagatcgctagggttttagattagctgatggatctgtaaatctgactctttaaaggatgtagaattgcaaattcgttgcgacttgttatctgattcgttttgagctacaatgatcgatgatgttgtgactcgtgtatagctcattgatgaaaaactttgcattagtctctgtttagtctcgaagaacaagtttggctctgagttttgttgattagattgaagagaattgttttccctcgccacaattgatggatttcttgtccatgaatgagattgaataagctggttatgtcgatgttatgtattgtttgctttgttatctctgatcttttttttgttttttttggtatctttgatcttgttctaacacaactacaaaacgtttggtttcattgtgtgctacagatgtttcatttgatgccgacgccacaaggaagcttttacgtgttcaacgatatattcaggttgaactatgcctgaacagaaatcagattgttgttagcatacatcattgttgcatttctatactatttgagcaaatccttctatcaatttttctcgtctttttcttgttattcccagatgatttaccttgggaacagaggaatattgtctctcatcatgtatttggtttggattgtttgttcatttgtcattacaatctattgactttataagacaatttgaatggtcatttggctcttgttctttctgggaatatgcttttaatccgaatatatttggatggtccaagcttggcctgttaatgtgtctaaaggttaactcttatctattgcaagacttgcaagtagtttcaatgaacacctctctatgtataaataaagccataagttctaatttagttcagttgcaacatttgaccgactaatagtgaattgaaaaatgaagtgtatctgggtcatattctgagttttgtcgatttgtttgtggggttgcagttggagattgcttcaagttttcaataatttatttacttgataagcattgcaagtgtcaagcacaaaagttgcagattcccacaaaccaaataagaaagatcaattttgatgtagaattttgcttctttttcagaagaaaagtctcagcttcactgattcgaccgttgattcaatttctatggcagttcataattttcagaacgttattacaatcttaagcttttagttaatacttaacactacgttgatctgctttgattttgatataagttttggttccaattagatttcgtgtagttttcttcacccacccactactatcagactatcagaatctgaaagtaacccactttaaaaattgacaacacacgcaacgaaacacaaagcgccaaaaattaaggaaaaaaaggtttgtcgtaatctgatactattcacgcgatgacctcgtttttgatcatcttttccttttctatattcttttctcctctgtcccaaacgattcacttttctcaccatctcaatctccagaccaaaagaaacaaaaaatggattctttttcatattcttcgatgaaatccatgttgattcaagctcgtggctcgttgaactcgcgtttgtcggagtttgagccactggttctgctattggttccgcttgtctctctgtttctcgctcagattatcggatctgtgtttggcgttgttcacgagaaaggcctcaaagcttgtcttattgggtttatcatgggactcctcaagtgagaatcttttaatccgcagaatcttattttcttctattccaatatttgtttgatgggtgagagtgactaatgatttttttttttaatggaaaatgaaacagaatgattcctggagttcagaattacattgatgctgagaaacaaaaggtgagtttttgtttgaatctgcagattgttcctgtaatggccatttttttgcttcttcttgttgtgatgtatataaagagtaaacatttcaaatatagaaatgctagacaagcctatttaatgctctcttcttccatgtgtactatttttaattgttgttaatgtctgcatcactagtaaggttttagatattatctggcattacttgatttgaagaattttttcactagaagtcctcaagaatagaaaattacttgggattagagattggaactttaatgtttgtttcttggttagagagactttaatgtttattacatttcactgtgtcttgttttttggggtatgggagcagcatctctgtgtatctaattgatgttagtttcttctaattcacaggttgttgaccaattacaatctggtagcagctctaagaaaaagaataagactgaagtattgccagtaaaaggtctaggagttgaagttttagagaaaatggagaatgagaagaggaatgatgctatttggcaaggaaaatgctctggcactgtgtatgtctctggtagtttatgctttttttaatatgttctctggatttactttgtggttttggtggagatctttttttttttttttacttctactaccttttctcacagatacataggtggagccgagtctgaaggacatttttcattgataaatcaagcatgttcaatgtaagttatagcgagattgtagttcctattttcatggattggggactttttgctgttgtgttattattgggcatgaaagcgcattcaagttgctatgtgtgatggcatgtatgaatgatgctatccaggtttgcgcataccaatccgttgcatatagacgtattccagagtgtggtgcggtttgagtcagaagtagtcgcaatgactgctgcgttacttgggagtaaagaaacggcgtcaggaggtcaaatatgcggaaacatgacgtctggaggaacagaaagtatagtgttggctgtgaagtcatctcgtgactatatgaagtacaagaagggaatcacacggccagaaatgtatgtttcctccatcactttacgttgatcaagtatggactaccataagcttaattgatggaagaatatatcatatacaagtgtaggattatacctgagtcgggtcattcggcttatgataaggcggcccagtattttaaaatcaagttgtggcgagttccagttgacaaagacttccgagctgatgtgaaggcaacaaggcggcatattaacagaaacaccatcatggtaatgttttgaggtgccagttataaaatgttttatttttttcccttccaggttccatggtttgatatttttggtctgttgttcatatccagtccttgcttatttgtacttccatggttgaaattttatttcactagcataatcaccttttttatctgttatggtaatgcagctttttctcataatttttaaaccatattgtttcagattgttggatcagcaccaggattccctcatggcatcattgatcctatcgaggtaaactggagtttccgtctcctgtaatttaagggacatttatgttcttctatatgcaacgaaggtgtaggacatattcctttcttttttttccattacaggagcttggtcaactggctcttagctatggaatatgctttcatgttgacctttgccttggtggttttgtgttacctttcgctcgtaaacttgggtatgtgtaactgttttttaccaacaacttatcaaaggcctgcctttttcctacaaaagagatgcaaatagtaatctactttataggtttaggacttaagcagcttattttcataacttagcgaaatgataagtaatttatggtatgtgcctgtatgttttattgccactgctcttagtttcccccagagcattggatctcaggttttagattatcaagataaaagagagtggtttcatctgtctattgtttatatttatttttcctcactttttcccaggtaccagatcccaccttttgatttttctgtacaaggagttacttcaatttctgtggacgtgcataaatatggtttggctcctaaaggaactagtacagttctatatagaaatcatgagatcagaaaggtaaatactagttatttttccagtcttatgcaatttctcctggctcaatatgaattggtttaaattcagctcctgtgttctgattttggcatgcttgttgtgtcacgggtcatctacaaaaacataaccacgatatcgcttacttttgtttccttgtcattgtttccctgaaatcattcacactgtcttatgaaatcttttgtatattctactcagtgctgtgaaaattgtagtttcttataaatgatctttacctgacttttggattttcttcctgcaaaatatgtgctccttcatctacaaaacagcaccaatttgttgctggtaagttatgaacatagattcttaaattcatggaaatcctaaatgcggtattactccttaactatttgaaactgggttttgcagtaactgaatggtcaggaggtctatacgtgtctccaactatcgctgggagtaggcctgggtctttggtagccggtgcttgggctgcaatgatgtcgctcggcgaagaaggtttccttatagatatctcactctctcaagcttctggcattagagtgtgtcaaagattgaaatggttgattctgtatgcttctgctgttccacaggttacctacaaaacacaagtaagataatggaagcatcaaagagactagaagaagggttggtatactttttttgactattttgccttcttcaatcgttttgattcttatagctttgactatcgtaatctgcagagtaagagaaatccatgaactattcgtcattggaaagccagatatgacaatcgtggcttttggttctaaagcattggatatatttgaagttaatgacatcatgtcttctaaaggttggcatttgaatgcactacagagacccaacaggtaatcttaacgaccaaaacactacattggtgttacaactagtttgaaacccttcactgttctgaaactacctatgcctgtgttttggatcagcattcatatatgtattactcttcaacacgtccctgtagtcgatgacttccttcgggatctgcgtgaagctgtggaaactgtaagtccattaataaaaagtcttttgatcgtttccattcctcagttgatcgctcgtttccattcctcagttgatcgctcattgttatacaatttttgttaggtaaaagcaaacccaggaccgatcacgggaggcttggctccaatatatggagcagcagggaagatgccagaccgaggcatggtgaatgagcttctggttagtttcatggacagtcaatattaagtttcttgaaggttaaagcatctagtgggtaaattgatatcacatttcagttggagaagcaaaactttgtatattcacaaccacattgtttcgtttgccctactaataaaatttcattacaatcttcataataaacaactcttagttcgttacattacaccttcagaacaaaaaagatgatcaatcagatttgtggttagaaggttttgatctaggaacttgaactggcttgtcttcttggcttttcgccaagatctcgtctctctctctgaagtattgctcgaaagcacgaggcaggaacctagggatcaagaaacagagtagattcactccgaagtagcctaagtttgctagtgctaaataccttccaaaccagaaccatgtaaccacctgcaaaacgatttcactcgattttaacataaaccaattctaaaacggtaaagaagacttgtatttgagtaaagaagggtcctagccattacattgggtgtagcattgattggtaaagacttgttgaaccaaacatctttagaccaaccaatgatgacaaagattctccagactgtgtagagcaatgggacgagagctcttaccggtggcgagaacagagaaaggccacttattacattctctgtcaggatttgacacgacagtagaaacaagtgtggtgttgctgatcttaccgcatgatcatctcctcttgcaaaaccacctaatacgtaagctagaggcaagaacagaccaatcgttgtccccgaaatcacgtacaacctttcattatcccaaatattgcaacagaaaaaaaatgtactagtcagaatctgtaatgttacatttgatctcaaaaatacagaaccaacataaaattcaaaaaaatcatactagtagtaaaagagtatgattggttatctaaagtggtaaaaatattgtggaagcgagagttaaaagagacattcttttgttttcttgtgatggatttggaacctgaagagtttgctgccgcggaagacttcgggggaagcggtggaaacgccgtgagaagggaaagctaaacgcgagagggcgattatatagatagacgcaaacgctggaaaaagcatgtcaagtattggtacgagaccgcttgctgagaaaactagtatgaacgcgactagctgtagctctataacccttaacgaccccatcaaacctccactgccacctcctatcgccgtcatccccgaccaccgtcccttctcactggatgacgccgttttgtccacgtcggttcttggaccaaccgcaagagacacgcctgacatgatgattcaaatggataagaatgtagttgacagtgcagaagcttgcaggagtactagaatttatgaagaagggagcacttgttgacgtagttccacgtgaaggttgagtgatgtacacgtgtcaaagtgaagtcgtgagtgttcattgcctgattttcaacgtgtcatgtcatatgttgcaatgatatcagtctcttaatatcgatttaatgggtttttgtttagtctcgtatcatgtcattttgtttatttttgattatttttcttaatttttgttttcttacatcttttagtcgattgtggatatatagccgaaaacgacgaagatatgctcaagaagttcttggctcagcatcatgggatggacttctctaatgcaaactttaactgattttcattcaactatttttttttaagccagttttatcttaattatttatattattttttgagtttttatcaatttatataattaatataaaatttaactgattttcataactatttgtaataaatcttgtataaagatcgtttgtgttgtttgtagtcatgcacaatcttggataatatgcacatatagtgtcaccgtccaaaccatcatattcatactaaggaataaaaaaactcttatcatatccacgaaaatccataggtgaaaaaaatcgtacaaaaaaaaacttaaaaaatacggtagttagaaaagaacccaaaactaataccaacttcattaaactattcttcttttaagtcagttttgtcttaattattaatatcatctcttgagttttcatcaatttatataattaatgcaaagtttaactcatgattatttgtaataaatctttaataaagatcgtttgtgttgcttgtactcatgcacaatcttggataatatgcacatataatgtcaccgtccaaaccattatattcatactaaggaataaaaaaactcttatcatatccacgaaaatccataggtgaaaaaaatcctataaaaaaaaacttcaaaaatacggtagttagaaaaaaaaaaaattaataccaacttcattaaactattcttctcttaagccagttttgtcttaattatttatatcatctcttgagttttcatcaatttatataattaatgcaaagtttaactcatgactatttgtaataaatcttgtataaagatcgcttatgttgcttgtagtcatgcacaatcttggataatatgcacatataatgtcaccgtccaaaccatcatattcatactaaagaataaaaaaactcttatcatatccacgaaaatccataggtgaaaaaaatcctaccaaaaaaaatttcaaaaatacggtagttagaaaagaacccaaaactaataccaacttcattaaactattcttcttttaagccaattttgtcttaattatttatatcatcttttgagttttcatcaatttatataattaatgcaaagtttaatttgattttcatgactatttgtaataaatcttgtataaatatcgtttgtgttgctttaatatgcacatataatgtcaccgtccaaaccatcatattcatactaaggaataaaagaactcttatcatatccacgaaaatccataggtgaaaaaaatcctatcaaaaaaaacttcaaaaatacggtagttagaaaaaaaaccaaaactaataccaacttcattcaactattcttctcttaagccagttttgtcttaattatttatatcatctcttgagttttcatcaatttatataattaatgcaaagtttaactcatgactatttgtaataaatcttgtataaagatcgcttgttttgcttgtagtcatgcacaatcttggataatatgcatatataatgtcaccgtccaaaccatcatattcatactaagaaataaaaaaactcttatcatatccacgaaaatccataggtgaaaaaaatcctataaaattttttttcaaaaatacggtagttagaaaagaacccaaaactaataccaacttcattcaactcttcttttcttaagccagttttgtcttaattatttatatcatctcttgagttttcatcaatttatataattaatgcaaagtttaactgattttcatgactatttgtaagaaatcttgtataaagatcgcttgtgttgcttgtagtcatgcacaatcttggataatatgcacatataatgtcaccatccaaaccatcatattcatactaaaaaactctcttatcatatccacgaaaatcaataggtgaaaaaaatcctacaaaaaaaaacttcaaaaatacggtagttagaaaagaacccaaaactaataccaacttcattaaactattattcttttaagccagttttgtcttaattatttatatcatttcttgagttttcataaatttatataattaatgcaaagtttaactgattttcatgactatttgtaataaatcttgtataaagatcgcttgttttgtttgtattcatgcacaatcttggataatatgcacatataatgtcaccgtccaaaccatcatattcatactaaggaataaaaaaactcttatcatatccacgaaaatccataggtgaaaaaaatcctatcaaaaaaaacttcaaaaatacggtagttagaaaagaacccaaaactaataccaacttcattattaatatttttgtcaataaccaacttcattctttttaaaacgaaattttatatgaccatgcccactctctacttggttttcttctcaatccccaccgccacaaccaccaccgccgcaacctccaccaccacaactagcaccaccatcactactaccactaaaaccatcatcaacatcaacatcaacatcaacatcaacatcaccatcaccatcaccaacactgccacagtctcgacgattgtcaatgaaaattatcgggtcgctagagtcccctccatagctttcaattttttcatcatatgctttcattctctttcccttcttactcttgggatatatgagcctagaaaggcgggaagcatcttgttttgctccggcatcccaatacatcatcatcaacaccttgttcgctgagtctttcgactttgtatcaactacaagttctgttctacgcaacatctctaccgcttttctacttgaaccaccttttaaatacgcctttgcgatgcttattcccgtttgccacgccaatgagaatcgcggttcttcgacttctaatcccatcagaaacatttccattgcctccacatcaggtagactcgcgtaagccttcaaaacgttattggcagtgagattcttgtcatgttctactccattctccttcatctgcctgagaatctcgtcgatcatgtttttttctccaagaagagcatagagataaatcatgctgtaataagggtaaggtttcaaaagcatgttttgcaccctcatcgtctggtaagtggcttccgcttcgtgtcttgttttcttggatattgtgtacaagcttaagagagtggtgtggactgagtcgtctctcatgttttcaggaatgcttttgaagaacttttctgcttctttcaaccctgtactgatctcaacaagacaaagcctagatgcaaaatcttcagtgcttagatcgaagatacctcgtttagttatccactctgagacctaatacacatcatcaagaacagagatataacgattttttatgagatttattgcgattgaatctctgaatcagaccgagaaacgagagaagaggaagaaattgagacctggagagcgtgattgaatcgctgagactcgcagagggaattgatgaggcctcttagaaccgcagggtttaagtctttccctcgtttcagccattcgtccagtggaggagtaaccttcttttgttcccgtcccaatgccatgattcgactatgtgaagtctcatttagcttcggcgacgttagggttccggcgaatcgaatcgacggtaatctcctggacaggagattttttattgcgtatcgtccaaggcatttcattatgctctctattctcaagagatacaagtcggtaattaaaatcttatatagataaataaatgaaatactgcgtatcgtccaaggcgttgcgttatattctcaatctatataaataaaatgaaatatggggaggtaattaatccattaattctaaaatctgaccaagaatacaaaagaaaaaaaaaagctatggacatgagcttcgttggcccaaaaaaagttaaaaggccatttagagcaaacattaaaagaatgctacttatgggagaaccaaagtgatagtggtcttcctcttccacaaccttttcatgtgtctctaggttctgtaaccggcagacgtggatggtagtgagaaagaacacgataaagcctgctgaatttgaggttcgattctgcattttgatacaattattcccaaattcgaaacaagtttgaatcaaaaacttgtttttctttttctttgattaattggcaagccaagaattgagaagaagtgagttagtcaacatatctctttctaaccaagaatgttgttgtgtctttaggttttacatctattaaaatgttgtataaataaagaaataaaaaaagccattctttttaagtctcgggatggacacacaagctcaatcaacttctccatcccacattcccacctacctggaaacttaccatttatgcaacacctatccaatagtagccagtatttcttggctttgttcctttaaaatctggaaaaaatagttaaagattatgaatcacaattatttacaaaaatacatctaggtcgtctagttttatgattcaaaatctaataaaaatcagtctatcataaaactgtttcgatgaaattacggtatcaaatttatattttgcgtaatgaaaattataattccacaaaaattataattttttggagttataatctaaaacattgtccacaaataccacaaataccaaaattataattttttcataaaacattgtccacaaatacgcaaaacattctcattataattcccacgttgtccaaaaaatttatatagcattcaaaagttttttggacaagcttttggagttataatctaaaacattgttcagtattcaaatcatacagaatcatatgttgtaagtgtgatgtttattaacttttgaaatagttaacttttgtttattggacatatggttatttgttcattaaaatattgtaactatttcatgttttaatgtatatttgtttttctaatttgcaataggtatcactatgggagattcacaaccaagggggagattataagccgtggtctcgaaaggagactaagttgttggtgcaacttcttgaggaaaagatcaacaataattagcgtgattctaatggcacaataagtaaattaactgtggaaacgaatattatatcgaaaatcaacaagttttgtcgttcaaaaaactacaatcactaccaaaacagaatgaagtattttaaaatacaataccaaatatatcttgatcttcagcgttttagttgtggttttggttgggatcttttgacaaaaagatttatggcttttgataaagtttagggcaattatctaaaagtaagtatctcattttctttttaagcgaacatggttgtatttacatgttattaattggtccttttgtttttgttggcacatccaaacaataaacaacttcgttatgatacatttgaattttttggcgagttgcaaatcatatttggggaaagtgttgctactggaaaaaatgcaataggattatgtgattgtacggatgcacatacgtacaaagctggagagaaaccgagagaagaatatgtggatgattttgacaaagggtatgagtatgatactagaactcatcatgagtcatcggagcattacgcaccatttatgtctcatggaacttcagaaaatcatatagaaaagcagatctgagagaaatactgcacaaaaagaagaaagccgtataatggttgctaccagtaaacttttggatataatataacaaagagaaaagaggcaacaaaaagaagtggcacaaaaaagaataacgtttgggatgttatgaaataaacttctaatttggatgaacatattcgtcaaggcacttaccaaaatttatcattggaacacaagacgtttttgtgagcatgtccgtggaagagaggctatgatagatacaaaccagtatggaataaatatagtttttacttgtttttttttaatattttttaggttttaaagttgtttttacgtcgcatttttattttctttatttttaaagttttaatttggattcaccaaaaattttatgaataaattctttatcttactttttattctaaaacttcaaatagaaagtttggaaagaaaaaaagtggttaaagaagttttgttggatttcgattagattatacaataatttgttatagagtttaattctattatagaaaaccaaatgacatcatatatcactgaaaatagacttccacatatttgataaaatgaataataattctgtttcaatgaacccaaatattttaaaatctgataaacttcaattttaatggagttgacttcaacttcactaaccacttacaccaggttaatgaatacatacgactcgtcaatttgtcatcatgtcgagagagaaataattatcatcaatatgtttaggcgtttagccaaccacttcatatattggcgagattattttcttataaatgtagcaacacataaatcaagaaattcgctttcaatatattttggccggcaaatcatataatttcaaaatccaacaatactattataaaaaaaaaatctagggaattacaatacagttgtatttacgtaatgacaattgtaatggacataattagagaactagttgccatcaatatgattagccaactacttcatatattggtgaaatttttgttttgaatccaacaactactgttggatcaagaaaacgcctaatgatacaatttcgaaatctaataaaaagtcaataactatactatttctttggtcaagaaatgtcaataactattactagtatgaagagctgaaaggtgaggtgttcgagagaataatatggagatgtggccgaaaacagagaaccaataacgaaaacttcgctccctgcctactcatataaatttcgatgaatttattagcaacctactcaactcgaaatgacttatgcagtgaaaataatatacttgaagccaaaaatttgctttttcggcgttatcattttgagacttgtcatctttatacactttatattttatattaaactgtatcttagtttactttaccttttaaattgctattcaatcttattctccaacgtagtctcatggctaattgacttaggattcggagtcatatttcacgtgggaatttttaaagtttttacggatcacgggagtttgaagtatatttttattaaaactaaacttaacttaaacttaatgaaaatggatgggaattgatgcgtaatacaataaccaaattcagcaatttagtattatccagaaaaagctaatatggtagatgacacattaagactcaaaaatactagtggatacttcagaaaaggacctccaacaactaacgtacgtatagtttaagagtatacgttgaaggagtcctgcgaatctagactatatatcaagccagtttgttagttcatatctaggaagcttaggatgtaaacatctaagaacttggatatagttatgcaatcattaatattgtgaattatgatataattttctctaaatacatattttaaataccacgaagtataataacacaaatttattagtttattagaattaataaatgttccttgagaagataacttaaaaatgtgccttttctgcccaaatcttccatgtaatgtccgtttgttatcgattccattttctatttgaacttataacaccttcacaaatagaaagaggtagctccaagagtggactgctcataacgtttttttctttataaaaaaaaaaggcccataagaatttttaaatacattcaacaatgagtttcattaattgtatactttcattaattgattctctattcagaggagggtttatgaatttgtatatgatggatgaattagtgattctgagagctaaactatgtatggtaatcctcttcttcgatggaaccttttgtcgccaaggttgtaatgtcatgattgagcaaaccttttctagttagaggtataattctctgtacaccctttaaatttgaaaaaagtacaaattaaaacagacccgttaaaagaaaatacatcatggaacatgtgagggttggatttgggttgcacagttgcgcctgtggtggacgtggattccccgccacagtagttaaaagatgtggtccttcaatttgaaagttaacgtgtggcctcaaactgtataataaattgtatacatttacgcatgtatctacattttttcaatgaccaattaattttttcccggtcaaatagagcccacatataactacgttaaattagaaaaataaataaataataataattagaagcaagaaaacaaaataggtaaacaactatatatcttttgaagttaactattgtttcgaataattccagcaaataaccaacgtgctgttggtctaatggtaaatctctcaggtgaaagtactggattcaagacacgttgggagggatcttttttcaaaaggagatgaatttaacctggtgtgggttccgcctctcggagaacttccaaacattcaaaaattttttttttgaaaaaaccaatcatgaaattcatctttaatgatagtcgacaaaagaaaccataaaaatagtaagtatcaactcttatggacagaaactacaactacttaaaggtagatttgcaaaagactaattacttactcgaaatcatttgtatttatctgccactagagaagtagaggggacagttaaaattttagtgccagtctatcaataaattatctccaaaagtcgatgttcgaggtgaacgaacacatggagctgaaccatatatgaaatgaagtttacaagttacattattgtattggatacaaaagaagaactatgcactcacaaagaagtttcgtttctaaaaaatactacagaacggcaaactcgtgattaaaaaaacaaaacttaaaactactccatataagtgcataataaatgtatacagtttctaaaaaaggataaagacgaacttcgttatggtccacttacggccgggcggatctgggttttacagacttgtcaacgatttaggtagaacgatgatgatattaaatgagcacgaggcaagtgaatcttgtttatattttccattatattttacccgtttttccctacaagaaaccccaacacccttaagggagatctcaagtacctctctgttttagtaagtcacagtgctaaagtgataatggataacatagaaccaccctttagtggaaacatccatgctgagaccgaagtaaagaaggaggagaagaaaaagatgaagaaggaatcggtgtcattgatgggtttgtttagtgcagctgataatgttgattactttctgatgtttcttgggggtttaggcacgtgtattcatggcggtacgcttccgctcttcttcgtgttcttcgggggaatgctagattctcttgggaagctttctacagacccgaatgccatatcttctcgcgtttcacaggtttcttcagaaaccgatattctttctcttggtttttggacataaagtcataacacttttgttatttgtcttttcaagaatgctctgtacttggtctacttaggattggtcaatttggtatcagcctggattggtacgtgtctagctacttgatttgtttttatagtgttacaaaaaaactgtttttaatgttttaggttcaaatggtatattggcaggagttgcttgttggatgcaaacaggggaaagacaaacagcgcgattgcgtataaattatctcaaatcaatcttagcaaaagatattactttctttgatactgaagctagagattcaaacttcattttccacatctcaagcgacgcaatcttggttcaagatgccattggcgataaggtaacctttcattattaattctatggacgaaacaaaaacatgtaactgatagaatgttttttttttttcagaccggccatgttttgcggtacctatgtcagttcatcgcgggatttgtcatcggttttttgtcagtatggcaactaacgttgcttacgttaggagtggttccactgatagcaattgcaggaggagggtatgctatagtcatgtctacaatatcagagaagagtgaggctgcttatgctgatgcaggaaaagttgcagaagaggtttgttttagacaccatggctgagattgtttcaaaaaaacaaatatatgcgtttacgtgtgaaaaaagttttcaaaaaaaaaaaaaaattaaagtacagtatgatcaaaaccattttaacattttaagtttatccaaaatatttttgcaatatatctctgaaaaacatatttctctatgaacttcaggtcatgtcacaggtgagaacagtgtatgcatttgtaggagaagagaaagctgtaaaatcttactcaaattctctcaagaaagctctgaaactcagtaaaagaagtggtcttgctaaaggtttaggagttggattaacatatagcctcttgttctgtgcttgggcattgcttttttggtatgcaagtcttcttgtacgccatggcaaaaccaacggcgcaaaagccttcacaacaatcctcaatgtcatttacagcggattgtaagtccgagaaacccgatactttttctcgatatatatcttcaaattgcatcgtacaaatcattctcttacatttgcagcgccttaggtcaagccgtgcctagcttatccgcaatttctaaaggcagagttgctgctgcaaatattttcaaaatgataggaaacaacaatcttgaaagctctgagagattagaaaacggaacaacattgcaaaacgtagttggcaagattgagttttgtggagtttcgttcgcatatccttcgagaccaaacatggtttttgagaatcttagtttcacgatacattcaggcaagacttttgcatttgtcggtccaagtggttcggggaaaagcacaatcatatcaatggtgcaacgtttctatgaacctagatcaggggagattctcttggatggaaatgacatcaagaacctgaagctgaaatggttgagagaacagatgggattagtgagtcaagaaccagcattattcgccacaacaatagcttctaatattcttctcggtaaagagaaagccaatatggatcagatcatagaagctgctaaagcagccaacgcagattctttcattaaatcattacctaatggttacaatactcaggtacattatccaaaaaatttatactcatatcttctcatatttccacttgattattattgataaaatcattccactaggttggagaaggaggaactcaactttcaggagggcagaaacagaggattgctattgctcgggcggttctaagaaatccaaagatattacttttagatgaagcaacaagcgctcttgatgccgaatcagagaagattgttcagcaagcacttgacaatgtcatggaaaaaagaacaacaatcgtcattgcacatagattatccaccattcgaaatgttgacaagattgttgtcttgagagatggtcaagttagggaaaccggaagtcactcagaactgatatcaagaggaggagattatgccactcttgtaaattgtcaagacacagaacctcaagaaaacttgagatcagtcatgtatgaatcttgtaggtctcaagctggatcatatagttcaagaagagtttttagctcaagaaggacttcaagcttcagggaagaccaagagaagactgaaaaagattcaaaaggcgaagatttaataagctcgtcctcaatgatatgggaactaataaagttgaatgctccagaatggctttatgcattacttggctcaattggtgccgttcttgccggatcacaaccggcattgttctccatggggcttgcttacgtgttaaccacgttttattcaccttttcctagtctgatcaagcgtgaagtcgataaggtagctattatctttgttggagctggaatagtaacagcgcctatatacattctccaacattacttctatacactaatgggagagcgtcttacttctcgggttcgcttatccttgttctcaggtaaacacaattttattcaaacatctctgttttggattgattcgattcttgaatacttataaatgtatacaacaactgcagcgattctttcaaatgagattggatggtttgatctggatgagaacaacactggctcactcacttcaatcttagctgctgatgcaaccttggtgaggagtgctatagcggatcgtctatcgacaatagtccaaaacttgtctcttacaatcacagccttagcacttgcctttttctacagttggcgtgttgcagctgtcgtaacagcttgttttcctcttctcattgccgcttcacttaccgaggtaactcaaaatcaaagttcctctcaaaccaaattttgaatcttgaaactgaataagcttgaatgttatattttacagcaattatttctaaaaggctttggaggagattacacaagggcttactctagggcaacttcattggcgcgtgaagcgatttcgaatataagaaccgtcgctgcatttagtgctgaaaagcaaatctcagaacagtttacttgtgaactaagcaaacccaccaagagtgccttactcagaggtcatatctcgggatttggatacggtttgtcacagtgtctcgcgttctgttcctacgcacttggtctctggtatatctcagttctgattaagcgcaacgagaccaactttgaggatagtatcaaatctttcatggtattgctcgtcactgcttactccgtagcggaaacgcttgcgttaaccccagatatcgtgaagggcacacaagcactcgggtccgtatttagggttttacatagagagactgaaatacctccagaccagcctaactcaagattggtcactcatatcaaaggagatatagagtttagaaacgtgagctttgcgtatcccactagacccgaaatcgccattttcaaaaatctaaatctccgagtttcagccgggaagagtcttgcggtcgtgggacctagtggttcgggaaagagcacagtgatcggactaatcatgagattctacgatccgagcaacggaaatctctgtatcgatgggcatgatataaaatctgtaaacctacgtagcttgcgcaagaagctagcgttagttcagcaagaaccggctctgttttcaacatccatacacgagaacatcaagtatgggaacgagaacgcgtcagaggcagagatcattgaagccgcaaaagccgcgaacgcgcacgagttcataagcaggatggaagaagggtacatgactcacgtgggtgataagggagtgcagttatcaggtgggcaaaaacagagagtggctatcgcacgggcagttctaaaagatccttcagtgcttctccttgatgaggcaacaagtgctttggatacgagcgcagagaaacaggtccaagaggcgctagacaagttgatgaagggacgaaccacgattctggtggctcacaggctctcgaccataagaaaagcagacacaatcgttgtattgcataaaggaaaagttgtggagaaaggaagtcacagagaacttgtatctaaatccgatgggttttataagaaattgacgagtcttcaagaagcggtgtgactgatcatcgttgaagtttctttttcctttttaattcaaatttatacacatactatgacttgttatacgattgtgttgggaatatctaaacccaaaaaactttttgtagtcctacatgaaatattggaaacgagcgatgacttaaccctgtatgttatttgttgtttaaacaagaaaatataaaaccttttaaagagactgaaaggaacaagaagagaaagctttcattatgatttggtagattacgaaagcaaaatatatattacccctaaagtcgcattaagaactcttgggtgggacaaaaagactaggagcagtaaacataagacgcatacacatatcaagaaattgactacaaattcctttaacatccataaatgcatctcattcctcttcttactaatcgactttaacatttcctcaaccttcaatgcattcccttctctacaaaacctagaaatcaacaaacccggtatgctaacatccagctttgggtttccactctccgtataccttctctactccttgtacatcgtccagcttcaacaaagaactaatcacagttcgatatccatcatcgtccatcttcaacaaagttgtaaccacaggtaaacgttttttaccatcctccacttcttcttccttgttattcttacattcgtcccaaagattgtgcacctctcttttacaccgtgccacatcaccatacacctctaccgcttttttttgtcaaaccggctttaacataagcctttgccattgcaatcattgtgcctctttctagtttgattccatcttctgtaccccaacgtctcataaacatttccattgcttgtatctttgattctgccgcgtacacctttaaaacatggttgaccgtgataagatcaggatccacgttgttctcctccatctcacgaagaatctcatccaccatgtttcctcgactgtagagagagagaatcaagttgaatgttgaaggtttcaataggaaccctagctctctcatcttcttgaggccatggctttacccaagtttttatcggatttcgcgtaagagcttaagagagctacgtagacagagtaatccttcatgttctcagggatgttttcaaagtacttctctgcttcttccaaacccaaaacattctcagtcaggtaaagcctagctgcataatcttccaaataaagattacaaacttgtttttcacccatccattcggaaacctgaagggcttttgagaactgtttggaatcacggagattcttgatgaggcatttgagatcagacggtttcatttgatctccccattgctccagaagcggagtgacgggtttattcattcttctgtccttaatggttttactgttcatgagtttctcagccttctctgtcattcctctgtctcgataaccagaggccaacattgtcgggattcgatgatcaaactcaagtggcaaagattcccacactttgtagatctcttctgctccaacgatatcatctactttcaaaagcgaacgaatcactgttcggtaaccattgttatcacgttctcctatcttactcttgtaaagtttccatacacgtaaaacctcttctctgtttccagcttcaccatacagcttcataagatggtcgtaagctgattttaacgacttctgatccaccaattgctctgttaaacgcagcattttcattgcctttccacttgaacgggctcgcaggtaagcctttgccatgtcaagagtcgtatgccactcaagtttgatcccatgaatcccttcccacttattcaaaaacttctccatctcggtcacgtcacacacagccgagtatagcttcaacacgttgttcactgtgacattatccgcctccacgtcgttatctttcatctcaagcaaaagctcctcgactttttcacgattttttagtgcactgtagagagacatcattgcgttgtaaggaacaggtcttaagagaagacctaagtccctcattttctggaacgtggcttcggctttacacagagttttgtctgatcttgcgtacgagtttaagagagaggtgtaaacagaatcgcctcttgcgttctttggaatactttcaaagaacttctctgcttcttctaaccctacaacattctctatcagatgaagccgagctgcaaaatcttctgggattagattgcagattttttctttactcatccactctgatacctaattataacatcaccgcaagacatcaattccaacacttataagagatagagaacaccaaattggggaaagggaaaatatggaaacctgaagggcttggagagattggtcggaatcacgaagctttttgatgatgactctcacgtgcgaagggttcacttgattcccctgttgccgccactgttctagcaccggaatgatttgtgcatttcgatggagagcatctgtgatacgatgctgcagtgtttggctctctgccacatggggatgatagggttccaaaggagcgaacccggtaacgcgttgcgtgttgtagaagaattctcatcatgctctcaagctggaaggatacatgaacaacctagggttttatgttactgtgggttttgtgctgcgccgtcttcttcttttatggatactatttctttaattaattttaagaaatatgaaatatgatagtgtagatacatgtttttttactttttatgtttaggcttgtgaagcaagtgtttttgtttgtttcaagaacctgaagggtttatgtgagtattgcttttgtgccgcgtcttattttcttgggtactaacaaaagaattataataattttcagaaatgtgacagaccaaattgcttgtggttgtagcttttattgcttaagctctgtaaagcaaggcttttttttttgtatagcaacttttttcaattatgtttattctcgttaaaattgatttgtatactattattaaagttaacacatctcatgatattttgtatacatcttcagatcatataaacacgtcttattatcaacaaacagaataattagtgacattcattacaatgttaattgatatgtattgacaacaacaacttcctttacgagcgtaagttccgacaaaccggacatgaaccatgaatcttgagccacgacatggaaacagtgatcacattctggtatgcaccgtacggtctctttgctagcatattctgataaacaaatgggaaagatgataccattagtacccggtagccttctactttctcccaactctaatttcttgtatgattctattgtagaccggtcaagacctgtagtgaccactgaccacaacccctcgtggtcgttacgttatgattcgagaatcacctcaaagtttttcctttaaatcatatatgccaaatcacaaactatttttctatttcttaaacaaaaattataacaattccaccaaatattctaaaaattcacttaaatcacctaaaaatataaaattcctttaggattcattttctaggattgttattattaagagacttttctattttagttttgactgtttatataattttaatataattttcttatttcataaaaataaatataatttatttctttatgctattcataattttctaattatttatatagttgatttggtatgtaatcttatgatctatgtttaaatggtatgtaatcatatgatcaatgttgaaatgtgatctttgactggggttgtcatgtttggtcttttgggccgaaatctatgtgaacacgtggtgaacacttggactatatatgtgaacacttggtctttctcctcttaggtttctcctcctaatcttcaaatctttacacaacgccatctaaagatatggcgataagttcggaatcccaagtccccctttcgctcccgatcatcgacttctccaatccagatctcaaaccggaaacccccgagtgggacttggtgagatcccaagtccgaaaagccttagaagagtacggatgttttgaggccttattcgatggagcttccatggagctacggaaggccttgttcgagtcctccaaggaggttttcgatttgccattggagaccaaactgagtacaaagacagacgtacattacgaaggatacttgacgattccgagggtccctatacaagagggcatgggcttttatggtatagataatcctaatgttgttaatgacttgactcacaagctttggcctcaaggcaacatcttcgtcgggtacccttcttatcacttgaaacaaacttttggcaatgaatgtttttgtaggcttttgcagaaatatttagcttttggtttggctttaatctattcaaaaatgtgagtggtaactggtaggttgtttagtatttggttttaagaacttttggaaagaaaaaaaatctgagataagtttatatattaaaatattagttttgtctttaagtttctggaacaaaacaaagctcttatactgtaataacttgcaaaatatatatatttaattctgtctttgagtgacacctacgattttttatctacaaatatttttataataacataaaaatattttattttattatttggttatctaaaatgttctcattggtttaattttaaaattgaatttgtatcatgaactatggtatcttaataatataaaagtgtcaaaacagaatatatatcgattataaatactaaaatatactacatatatatttcaggaagaatgttcagtcgtttgcggagaagttaatagaattaaatttgacggtgaggacaatgactctggagagtttcggactcgagaaatacatggaggagcatcttaacgcagcgaataagcactttcagttacttaaatacaaaggaatttccgatgataatacagagaataagataggtttttaccctcatatcgataggcatttcctcacaatactctgccagaacgatgcagtagatggcttggagatcaaaacaaaagatggcgaagagtggatcaaagttaagccatctcaagcctcttctttcattgttatggccggagcttctcttcatgtaactaaaattaagcttccttgactctcaagtttcattattttataacctataataattatgggattaacatatgtaagaatacgtacgttgttgtaggtactgttgaatggtggggtatttcctccgcttcaccgtgtggttataaccggaaagaaagatcggtatgtggctgcactgttcacgattcctaaagaaggagtgatcataaatgcgcctgaggagatggtagatgatgaacatcctcgtctctataagccttttgatttttggggtttcttgaaattcagcaacttacctaatgcaaggaaagacatatctgatctcaccgattactgtgccctttgagtattatgccttgcgaataaataaaactattaatcatttgatcattagctatatatgctttgttcagttgtttgtttttttgctcttgagttgttttttttatttgtttgaatatgtaacctgatttacagaaactcctgaattatttgatcgatttacaagcagaagaattagtgacattcattaaaatgtcgaaatacttcatattcaaacaacaacaaacaacaagttcctttacgagcgtgagttgcgacaaacaggacatgaactatgaatcttgagccactcatcgatacattggacgtggaaacagtgatcacattctggcatgcaccgtacagtctctttgctagcatattctgataaacaaatgggacagatgataccattagtacctggaagccttctactttctcccaactccactttcttgtatgattctattgtagattggtcaagacctgtagtgaccacaacccctcgtggttgttgcgttgtgtttctggctgtaatagctgcattttgtcttctctgattgacaaacctctcggaattgtaaatgcggatagcagcaatacaagttgcggtgattcctccgattatgcaaagggttattatcagtggtcgtaatctactttttgtttcatctgccggataacatatcaagaatgtgttttaaacagtcgaagtagagaaattaattgattacgatttttgtttgatatttgcttatttcaacaaatgtcagtttaataaaaacaaaaaatatgcgttaagtattctagcgatcgctagctagcgtggggaattagaaattgagaatacttcggttggttaaattataactaatcttcgaccataaaaaactaattagtcaattcataatttccatatttaattcctactaggatttctctttgtaaaaaacttcttgattaatctaaacctaaaagaacctggatttgaagttttctaccaaaacttcttcagccttaccaataatggagttttcttcgattataacttataagtgaagaagaagaagaagaagaagaagttaaaacaataaagatcataccgggtggatcagccaagtatttgacttcgagggaggccttgttcttgaaaccacatctcaaggactccttttcacaacctctgcaattcggcgagctccattccaacaagacgtttccaagccagggcactgtagagaaccctttttcttcagttatcacatctttatatatcacatcaacaggaacgtatagtcctttcacaatctgacaagaaggcggcaacaattttgaaaaagtcaaattagacgtggcgaagaaggaggaggtagaattgcttaggcaagggatggacatcagagaccaaaccggtatcacgacctcattcggacaggtcaagaacgtgtagtagaaactgaagccataagagaaaggagatcctgaagtattgaaggttaaaagccttttaaccatacagttttcagggtcgctgatagaaatctgctgcttttggtagttgatttcatcgacaagaaatgttccggacataggaagctctaggactgtcttatcgaggttgttgcagtggagattgaatcctggattgccgcagaaaggaaaacgaatggggattccaagtggttcacatttattaagatatgaatccgagtaggatgaaggacatttttgagggttcaaggcgtttcggagaggtaagataaagatggagaggagaaatacagagaagagaattcttgattgagggaattgttaaacgaaaaatttaatagagaattggtctattcttatagtcactaagaggaaagtcagagaattagttgtcttttaagaagaattgtcacctgcatcggatcccacgtctgcagagctatatgacattcaagcataaacattatacaacatccactacatgtattatacactagaataaactgattgtggaatttcgcctgtgagtaactctttaagtagggagatttataccttctgaattggccaacacagccagaaccaccaaagaaacagcaacgaagaaccacagccgcagatccgctcgccatctgcgaactggacttggaaaactttgattaacagccataagtcagggtttttaaaacaaagagtatcaaggcgtattagcttgtgagacttcaaaatgcttggatagacatgtatatactgtcaacagaatatggttttctagaaggttacaatcttttttaaactagataagattccaaggtacataaaagggccagataaggcaataaaacagaagggcggccagatgaaacgagaccggtctgtacatttatgaggcagtggaagtaaaaaaagtaactaagtttgtagctaaaaggaagcctatgtgaagagacttaaggttaagggtaaggagcttcactagctttcacaaatctgcctctgacacgcaacctagtgtcagctcttgccttcctcgattcataccttatggtcttatcatatctgttggcacccgagatccaagacaaagggagaaacgaaatatggtatcagattctttaagggagatgggcaataaaaaattattaaaggggaaagaaaaaagcagcatttacctccgtgtcttcctcttttccttgtaacgctgcattgcatctcctctgttctgagccagccgctccagatcagccttagttgcaactagtcttgtggtcttacaactagttccagcaatatgctctgtgaaatgcaagtcactggaggagttcgaacctttctcagagccaaaggtaattggacgattgttgctctcagattttgttggttgtacctggcctgaagttgatcgcttgtagtcatcctgcaaaagaatcctaatcagcatcacagttaagttgcatagcagtctagcaaatatatatcataagccaaaatgttagaattggtggcttggtgatgaggtaaaacaaagaaaagcaaaccagcttgtaacttttttctgactaggtttcatgttctgaattctatcattcactaaaagaagcaactgtctacaacaatttttgaggatgaacgggagatgacaacgtattgtgttttaaacactactctacttaaatgactaaggttaatgagaactattacctttttaatctctttgacacctttcacattagtggaacaagtttcattcatatggtcaacaaaattgttgattgtgaatgaagaagcagcacctttccctacatatgcagcttccactcgactcgtatcctcaggtccccgtgactgtcccaagttaaaatcccatatctgtatacaagttcacaacacaggttaagaaacctttcatttttttatcttcttgagaaaccataaaaccacacagagtgactatatttgaccttacacaaaaacatttcaccacttaatctcacttgctcattaacagaaaaaactaaactgttcttagccaaaaaaatcaaaagagagataagcaaaacctgagaactctggccaccactaggattagtagtagtagcattccactgctggttaactcctcctcctccgccaccattgatctcctcaacatctcttgaccatttcaatctctctgacatctccggaaccataagcccctctcctgcttctccatctccatctccatcacaagcaccctcacggtcacaatcacggtcacgatcaccatcatcgccatcaccaccgacaacaccactcttaagcaactcctcaagctgcttacacaatacctgcttatacctcccacaactagatccacaagatccacgcttcttaaacgtcgtatcgctgggaacaatcaattcattagatcccaaaacccaagaatccaactgcatcccgaaattatccatcatcatcgccatcatcggaacttgattctcttcatctttcctcccttgctccaaatcaagtccccataaagcagcaagctccaacgccgatggacaaccggaaaaaccttccacggcggatcgaacatgagcatcggaaactgaacaacttccgtgaacatcccaatcacactcctgacacaaaatcagattatcggtgaaacaccgaacagagactggctcgttaccgcaattatcgcagatctgagatcgcacgtgcttcctcgacaacagattcgccgtgtgaacttgctgatcacaaggcaaacacagcttcgccgtatcggctctacaaaacaaaaccgccgtacgctcgccgcagaaatcgcacggtactctctccgaactactcataactgactctctctcaaaatccctaaaattcgaaatcaaaatcagaatttattttcagagactaaggacggtgagaagaatgatgacaaatccatttctcacgtttttcattttgaactctttttttttttggggggctttgtcaaaattatctgcaaatcttttggaatgaagaagacaacgaagctaattattgtaaacagtttggggttagggatttgtttttctgtgttgcgatgtatggaacttgtgtatgatggattgttcagattgagatatgttgagatctgacggtgtaaaagcgtgctgagagagtcgccattgttcagacggcgaagcttacgttgactgtgacagagaatctaagagaaaatatctaatctgctttttcacctaaatatctattttaacgtataaagggaaagttagttcaaagcacatgatttttatgggattaattctttccgtatatagcaataactttttgatcagtgtaataacggctggaatcgtctttttctggaactagtatttacgaacattgcagcgtaatgtatagcatatatttatgtgcataataaactgctacacacgagttcttgacaaaagatgtgataaaattaaaatcgtaaagatattttaggattcatgttagatattttctttttgtccatagacttcaataagttgtttttttttgttttgaaaaaaagtataacttatttgtaaagtgctatcattctgaggtataaatatcttgaaaaagttcctggggagtggtaacaatcggaacgattcttgactaacgcattaaatttcacgtgttagagagtttgtgattcagactatacataatacagtatatgagcgggttttttcttttttgagtcaaagcggaatatatgcgttatatacttctatatttgaattcttgagttttgatcgaatgtttaatttgtggtcaacttgtggaaatctcttggcaaagaaatcttatttatccaaaaaatagttggtatgaaaactcttggcaaagaaatcttgtttattccaaaaatagttggtatgaagagtttggatttctgcttgtaagaaaactgcgacctgacatcaaatatttttctttttaaagataaatagcttgaattttcatatatctctatagaagatgaatcgtcgatttttttttttttaagtaaaagatgatataaaagcccattagactcaaaattgaagaactatctcaagaaggaactcaaaaatgggcttcagcccataagggaagcttgtagtccggtgattggattatatatcttccggatccggtatcgtttcgctccctttaggatttttccggaaggaacaaaaatctgattcagaacttggtttcgctggtcgttttggttctaatctgaatcgctggtttattccggttgtgaattttcgtatatttataggaccggcgaatcagaagcaaattgttgttaggaataaaccctaaattctgccatggataaggagagatattccaggagccaccgtgacgatcgtgatcgagattcgagtcccgaccattctccacaacgtgaaggaggacgccgccgtgaccgcgatgttgattcgaagcgtcgtgattcagatcactaccgttcatcgaggcgcggcgatagggaagatgagagagataggaccaaggatagaagagggagatctgtagagcgaggcgagagagaagggagtagagatagggaaaagcatcaccatgagaggtctcacgaaggtagtaaagagaaggaatcgaggagcaagaggaaagatagagaggaagagaatggggctagggatgggaagaagaaatctaggtttgctgatgggaatggtgagaggaggagcaggtttgaggatgtggctattgaagttgagaacaaagatgctcaagtctctgagggttctggggctacgaatccaaccagtggcgttacgatggtgagttctttataccttttcgttaatcttctttgtttgctacttgcgatttgttcatgattacctctagtcttcttcgctagctaatgcttgcattttctttttttgtgcagggagcctctacatatagttctattccatcggaagcttctgctgcccctagtcaaacactgctcactaaggtatcttcgatatctacaacggatgaaaataaggctagtgttgtcagatctcatgaggttcctggaaaatctagtacagatggaagaccattgtccacagctgggaaaagtagtgcaaacttgcctcttgattcatcagcgttagcagcgaaagctaggaaagcactacaattgcaaaagggattggctgatagattgaagaaccttcctttggtaagatgtacagatattctatacttttttgcgttcattcttctctgaaaactttgtatttgataaattgcttttcttattctctgtgcagctgaagaaggctactaagccaacttcagaaggtagcccacataccagagtgccaccatcgactaccactcctgctgtctctacaggcacatcttttgcttcaacattaccacatactggccttgctggctttgggagtattgccaacattgaagctgttaagcgagcccaggagctggcagctaatatgggatttcatcaggatcgagagttcgctcccgttattaacctatttccaggacaggcaccctcagatatgactgttgcacagagaccggaaaagccccctgttctgcgcgtggatgcactaggaagggagatagatgaacacggaaatgtgattagtgtgactaaaccaagcaatcttagtacattgaaggtcagcaatgttaatttgaatatcttaagttttcatgtttttctttatatgatcgagcttctaaagtacttggattttacaggttaacataaacaaaaagaagaaagatgcttttcagattcttaaacctcaactggaagcagatctaaaagaaaacccctattttgacacaaggatgggtattgatgaaaaaaagattctgagacctaaacgtatgagtttccagtttgttgaggaaggtaaatggacaagagatgctgaaaatttgaagtttaaggtatgcattgtcttttgtatggattctttttgacgatattctctcttggtggtcttttagatgtctcattgtgtgtatttctgtcttttctttatagagtcattttggtgaagcaaaagcgaaggagctgaaggtgaagcaagcacaactggctaaggcaaacgatgatataaatccaaatttgatagaggtatccgaacgtgtcccgagaaaagagaagcccaaggagccaattccagatgttgagtggtggtacgtaatttctctcaccttaccctttctgttaatgctaagttgttttgtttctgatttgacattcacttggcataaccttggtggaaacaagtcatcctgcacttaaaaactgaacttgtaacgattggagtatttgatgactgtgatgaatcaccataacaataactttagtttgctctcagctacggatgacattcatataatttgtttggtgttcttgttgctcatgttggtttagggttgtttgtttgttttttgaattactatctagtttcgtttaggtgggatatatacaattaatatttcaattctttgatttctttgagtgttcgcatatgtgctttagttttccacatacaacttctgaaagttcaatggttttgtcatcagcaacggtgtgattggtagtaaaatatggtaacatgaatctactgatgattatgatctacttagtacctttcaatgccagcccaaatagttaatctagctgctttgtgctctgtcgttttggtctattttcttggtatatgttcatgatgagtcttcttagttcataattgttttatgtttcagggatgcaaatgtcctcaccaatggcgaatacggcgaaataactgatggcaccattactgaaagccatctgaagatagaaaaacttactcattacattgagcatcctcgtcccatagagccacctgcagaggcagctcctccaccaccccaacctcttaaactgacaaagaaggaacagaagaaactgcgaacccagaggcgtctagcaaaagaaaaggagaaacaggagatgatcagacaagggttgctggaaccaccaaaagcaaaggtgaagatgagcaacttaatgaaggttcttggttctgaagcgacccaagacccaacaaagcttgaaaaagagatccgcacagcagctgctgagcgtgaacaggctcatacagataggaatgctgcccggaagctaactcctgcagagaaacgtgagaagaaagagaggaagcttttcgatgatccaacaacggttgagacgattgtgtcggtgtacaagatcaaaaagttatcgcaccctaaaacaagattcaaagtggagatgaatgcaagagagaacagattaacagggtgtagtgtgatgacggatgaaatgagtgtggttgtggttgagggcaagagcaaagcgataaagagatacgggaagctgatgatgaagcgaataaactgggaagaggcagagaggaaggaagggaatgaagacgaggaagaagaagtgaatggcggaaacaagtgttggttggtttggcaaggaagtattgggaaaccgagttttcataggtttcatgtacacgaatgcgtgacggaatccactgccaagaaagttttcatggatgctggtgttgttcactactgggatctcgctgtcaattactcagacgactaaatcctctctccctcatatcatcatcatcaccttgaaatgcgttaactatttggacatgttattgcacttctatgaacatatattcccctggtgtctggtattttagtttttgaacaagaaatgatctgttttttactaggtaaactgtttaaggttgatgatacaacatgaattatctgagtcacagccaaaaaagtaccattggttaagtatgattatgacttaaaacaaaactataatgttttaaaaatatcgaggccactaaccgataacataattatgtgtacagtcagaagaatgagccgcgcgtgtagatggttggacgaaacgtgcgacaagatgcgagcctgagtgctcaatatgtacctgacagctacacctcctccagctttctctttacccaacaattctccaccaacacgggcgcgtgacctcatgaaaatccccaaactaccctcaaactctgtttttttttccttgattaaagagtcttccttcgtgtttttcttgttttcattccttccaaatatctatctcttttgtttcttcttcttcttctcctctgcttttggaatcattatagtgataagaggagatggcggatataacagaatatctagagagatcgatgcagaattgttcacttattgatcggagaagtagtatgggagatggatttggtatgagcgatgaacatatcccgatctcagatagattcttggagctcagttctcacttctctgttccttctcatttggaacagtgtcttgatcttaaggtaaaagaaaactcacacaaaaagaaacagattccttccatgtttccttataattgatctttcaattttattttgttttgtctcaaaatgctcaaagggttttggtttcaagcttgatttgtaattgtatggctaaactaaacgccttaactgataattctagtattttctttcgttttggggaataaatatgtttgaaattgctatgtagcatcaaattttgagatgctgaggtggggtttttgtttatagacaggagagatttactacagaagctggaatagtggaatgagagtgaaagaagatccgagaaaatcgatgagtcgtggtaactatgcagaccaatccagtggtgaatcgtctggaacagttttttcatcagaagaagttagctcgtattatgaaagcgaagagtcttcatcagagtcgtctccttcatcaagaaagtatcacaaagaggaacaagacgaagatgttcttgtggtagctggttgcaaagcttgtttaatgtatttcatggtacctaaactctttaaggattgccccaaatgtgcaactcagcttctccactttgatcaacttcactctacttctccttgaacctatctttcgttgttgatttttttctcatttcattttcagttttcttcacatagatttgagggttgtcttctctctttttgtcttttaatctcttaactcgtatatgtataaactagtgttcgtgttgtggcattatatttaaagacaatgtctcaaagttgttggaaaagaaaaaaacaacaacatggattagtgaaaagcagatcagactgtgtaaactaaatagatcggatagaaaaaacaaaacaaaatgtggttaatggcttaatgcagatccggtggaacaagtgctagtgattgcatgtgttttatgggatttacgtaatcgtgaggttgcttgaatagactggtgtgtttttatgggactaactgatctgtcaggttaataatatcgattggtaatgaaaggagagagtcttgagagttttgtttaggatagttgttgcataaaagttggtcaatgaagcttaagactcgcgcgctgcgtggaaagaaaatttaaaaagcataatgattgcaagcatgtgatttaccacaatttctgtttcttttgtttcccattttaatttataaatcaaaagttaatccttgattatttttttggttttgaccaaaataaaaatggctttatacaataaattataatcgaaccataattgaatggcatttccccctaacattgtcaacttttgcaatcatacatataatatattgaaataaaaatggcagtaattcacagcaactacagctcacattcaatgaacaacttatacgatcaattaattattaatgcaaacaatcaaagaagaattatcatcagaactagtgaggctcatttctgtcacattaaatgtttaataatactatatatggaaaagtcaaattataaacaagatctttgggttgcattagctatatctcgggattttgattcattgacctcaatgggagttattacgaaaggaagctaattaaggcgagatatgtctagctatctttgtgatttcaagttgttgtgtgaacaacttaaccatattggaaagctattgtccgaaatgatgatcttttttcgttaatttgtgttaagatcttagtaaagaatacatgagtcattttgaaaatgtgatcaaacttctatgtattagcgttatatatacaaaacacgtatatatacgaagcacgtatcccatcttatgctcttgcaactatcactcctcatttgcgctttgaagctcatatttgcttatgagaatgaaacacctcattctgaactttcttaaaacaactacaatcttacgtgtaatggctagctaataaggcagatgaagtacttgatagggtttaggggttataaggtcgtgagaacttcttttactcttgggcgtcgtggatttcctcaacatggcctacaggctatatcaaaccaaaataactttgagaaacaaaaaacaatcgaggttctaccgacctcttcaaatcattgtaatttataaatgttggagtcactttcagaaagtggctaaattcttaaagctctagctgttatgttaatctatatggtctgcaatgaataggatggactcgtgattctagtgctttttctcacatcacatagagacatgaacctcttcaagaagcaacatcttactcaggttcaaaatttcatggttggtgttggagtcttcatacatactcacatgttggcttcatattatgtaccacttcatgtattatttatcttgagaatgttatgatttttccaactgttcatatcttttttttttttttatctcttaagaatgttatggtttttcgaacgatgtgataatgttccttttgagttttgtttgtttaatttcagataagatgggtgtctttaaaagttgggagacttaggtgttacgttgctctactcctcacccataactatagtgattatctatgatgtctaacattaagcgagttgtaacatcatttctatggatcctcaacctcgaaagaatatcaaacctatgtaataaaccagatggaaaagaattccaaactttcgtttcagagtttgttttgtatgtaccttgaccatcattgacattaatagacatgattttaaagcgttcgtatgaaaaacataccattataaacaaagaaatatcattttttattttatttttatataccatttattgtgagtcttatatatatatttggatttaatatatatatactagggttctttcacttttgtatttaagttaacttaatatttttttgtaataattggttcgtaaatgtttaaaatctgtgttgttcctgacaatactcaggtttatcttgtagtcatctaggctggactggactttgaaatacaaatccgagagaaaacggatctgaccaagccgagttaaaaataaatttacatgctcgcgaatttcaggttggactaaagtgcctttaccaaataaaaagacaatgctacaccaatatgagtattccgatcgcatctaatatgcatgctcaaaaaggttccttactacacagttatctttattctgttttaaaaccctttttctatattactacattaaattagcgagatatgacaacgaaatagtcaatcagtcgttgctacgtcaaaatttcgctaactttttgcaacgatttttagtaataatgtttcttataatatttcactaagattaatcagctgctaagttagtagatcaccagatcactcttattctacgtacgttggactcatgtttatcagttaatagttatcaccgtcacaaaaatctttttttgtttttgtttttggtataagatcataataaacaaaataaatgttatgttttactaaacattcataaattatcagtaattatcttctagtttagggaaagtatatacttcgatctatttcattgggaagtttgctaagcgaaaatatacatttatgatcagatattagggatgaactattatgatcgtttatttttgaatcaaataaactatgagcttataatacatagacattttcgtatattatcataaaagttctttttttatatttgaattatcaagaagcttcaaacattcgatacataatatgttccaagttcaagaagacaggaacatatcgaattaagttatttcatttttatttactgtcaaaacgcgaacttgatacgtagaaatactcccccttaggattcggctgttgtctaccttttttgtcgaccactatagactatatttgtggtataatttcagttgatattgatccaaaaagcacataatagctcttcggaaggtaagaaagtgacagcggcagcaaagacgacttcacaattatagacaacttagatgcatgcatgtacggatagaacaaaatctaaaaacattcggagtgcaaagtatatgtatataatcaggaagaaaaaaaaatgttatgtatatgaatgtgtaattgaataatttgttcgaaatgatagaaaacttgttatatgtgattccaagttaaagatttgagtttcactatcgacgacaattattgtggtctcacctttgctactgcttactatagatagacgtcttaaatagcaaaaatattcggttttataaatgtgatttgggtttcggtcctggatctatagctactaggtctggttatatatatgtatatattcccatgtatatacgtaaaaacaatcgggtgggggtcacatggagttcagagaaagagcagaagagtccccacgtcgtctgtggtttgggtcctcgggctatggggataccaaacaccatcatgcatgcccaactctctttttcattatttttctctttcttttttgattttaattataccattttagggttttcttttgtatattcatgtcatcctacaaccatcgaatatataacccacatttttcccttacatatattaaaaaggaaaaaaagaatccatgctttaccaatttctactcctactttatttcccttgcatcatttctttattattagcctttcattctctcttcacgctcccttttatggtttccttttcgtttgattcaacttcccatcatgcatgtatatatattagtactatattctatgtaaaattccaagtaatctatcttattattgacattttgacagatattgtcatcatattcctctccactctctgcccattccacttgcctcatttctaatctaaaggatatattttattatcttatcaagtcactcatgcaccctttctctgtttatgcatatgtgtaattaagtgcaactcaagtactccttcatatatttttttaaaacaatcttacaaaaataaacaagatgcacgtacctttgttttacacattattaacatcaaaaaccatcaatcactagataagcgtcgcagtgaaaatgcatttattataattgattatccattttgataaatattataaaacttatttaagataatagaaatatataccagaaagttttttcttaaatcaatatttagtttttcaagctgaaactaatactacaatatagaaattttcaatataatttactgtaactcctaggaccaaaatacttctacgcagactgtgatttgtagttataaatataacttgtagtagtataacattagcgcctcgatattcacaagttcttttgctagggttgatagttgatacacatgattaacttatgatgttatttcataagactttaatgaaaagataaagttgtaagactgttgaaatgttttaggaaatgagtgatttttatagaaaacaaaaaggagattgcaatgatcgtaattgaagattaaattagttgacgatcattacaacaaaaatggaacgtacatatatatatgatcttcttacatgtatggaacatggttcggattaaaagttaaattaacatgaacttctgtgcgttaaaagttaatcaataacaggtgcttttattccttttcagtaaaaaaatgcatggtctttattgtattttgtgtaagattatatcaaaaattctaaaagactcatgtgatgaataactctattgtatagcaaattaattgtttgataaaataatatcgaaataatatacaaattaacatggattatggtctgaaagatcagtacaatgaagaactaaatttgacttgagagcacatccttagaaattttcccttctaccaaaataaaataaaagagaaaaccaacttgaaagaaataaacagcttaaaattatcccaaaaatctcattagaaatccatccaattagggctaaaaataaactttctaaggatattagtaattaaattcccttaaaaacaaaataataactttgtctgtcaattttttgtcctcggaacatggccttaaaaaagcgattagctggatcgatcacacaccccatttcatccttttttcatataaggaatacctttcgtccttttaaagtcaataaaacccaaataaacttttacagaaataattaatattgtttattcattttgagtaagaaaaagaaaaagtgtagtcctaaattatataaacttttacattacgtatatatgatctctacgtacatgaaatttttcataatttcagatatttctattgaattaaatctgacagacagagagaccatcacacccctctctctttcttacattcccacaagcttccaaacaaagagaattaatggaaagtaagattttcaaaggaataatttctcttcctcgtcctctctcactcacaaccctacgcatttaaaattattgaaaaactatgtagtatattaaataattaaaaggaaataaataaacaaaacccttatcttcttcatgagaatcatttcttctccacaaaaccataccttctctaacccctcttctcacttttcaataacccctccatatatgactcatgctgagatcatatgaccaatatggttcctcttgaatcctcaacgcttttcggtgtttacggcggtttcacggactcgatgatgatgagagaaacaactaccaacaatcaagatcctagtggagatacatgttccgtctccgatccagcaccaggttctactgattattataacatctcttcttctccagtgaaagacgacggaacggccccaaagaacgacgtcgtttgttctattaacgtagacgataataaagacaaatcttggctccgcttaggtataggccctgaggagaacacggatggctcgtataagctccaacgttgttgtagcaaaaacggaagtggaagagagaattcattagagctgagcttgttctcttcatcctcaaccgcggttagtagtagtatagatcacctaccgacgcaaccgttgcagctgccatatcatcatgatcagttattgacgatgcgtggaccgtcgttggtttacaaccaccaattaatgaagcctcaaacgttattaaatcgcggcttttcgtttccatcttcaaagccgtggatacctcaatatatggcgccgtttagaccgtcatcattgagtgaccgtgacgtcactaataataatagtctttcaagaagctgttgtgtggatgagggaggagctggaccaagctctgagtttagggttcttgatcctccaagaagaccacattctggtctttggtttcttcttcaagcttcacaatttcagtaagtattttttttctttctagattcatttttagttaaattctatttattttagtatgtaacgcatgtgcatgtatatgttttataacgttggatttgtgaacgcagggaaagggaaccgttcttgcctcaagtaaataaaagctacttgagaatcaagtaagtctatttttttgtctcatgcgttataaaagttctttgtttaggggagtttcttctgttaattatattctaattaacaaatttgttttcaatttgcatggataagagatgggagaatcactgttagattgttaattaagtacctcatgaagaaacttgaattggatagcgaatctgaggtaaatatctaaactccaactcttttatatacgttttttatcttccaagtttaggggctgcgagatgaaaatgacattggaactaaatccccaacttattaggtcacaagtctgatgtcatagtgtcgtaacttcgctaacttatatagttcagttttaagtcttaggctatagatattcaaattatatattgtaatacagttgagtgaaaaccacattctgaattttgagagctacatgacatccttaattaggtgcaaatctaattaataatcatgaataacctcgggttcgaatttatgaattcaattatttctgtgttcaattaattaattagtataagcaaaaatgaatattttaggcttataatgaagcatcaaactaatatttttcctaagcaactttctaatcagaattatgatcaaccaaaaatcagtctttatcgcttttgaaaattaaacgttattgattgatcgtttctcgaagtacccactaccttatcaaataattatgataataattgttgttgttattaattctctcataggaaactggaaaacgagaggggaactataactggccgtttcattagtttcatgccataatattgttatattaataatgatttatagtagtgattatttattaagaaaaatataaaaaataagtctgagtcagcaggcatgcttgctttgagaatagtagaaaccagaaaagaaaggatatcttaatccaaacttaaaaagcttacatgcgtatgtgtgtttagatgctctcgttaatcagaaattactataatctatattgcatgtccctctcgctaggctcacaaatacatgttcatgcgattatatgaactcttgtgccctacaagaatcaattgcatgtataggtgtgtgtgtacagtaaaatacgtttgctaatttattaaagtgataatatacgcttgctaatttagtaaacgcgtgatatttcattctacatgataaatattttttcaaaaaataatgtctaataaacgaccattcaataacgtttttgtatttaacatctaaacatcattttggacgtcggataaatggctaagtctttttaaaaaactgtagttgcgttagttgatggtcgagactcgagactagcgattaatttatactaagcacattcattattcataatttgataatgaatattcttgaaattttatacgtaccatcaattgttgagttcaattggtgtacaaatataatctttaaaaaaacagcatgttttagcgatagtataaagtgactagctaatttagcaaattattttccatggtcagagaaacttttggacctaaaaatctaaatattttggttatcaagtaaccctaaatataacatgattttatttcacaaaaatcaattatatggagaagttgaatttcatacaaagtacaattacgaggaagttgaatgtcacacaaagtatagatagccatggaaattttagtttttcgttcaatgcttaagttctcatgtttttgtttattttcgtgagtatgttcgtcacaagaatatattgatatttggtccgactaataaatgtattgttagtataaaacattttatattgatactttaactacactgatgcatgatagacatagagatatatataggtgacatattaaattctcattctaataatcatttgatgaaaaacgtgatttgagagcattgatgcatgcatggctaagtttgtcttttccgtcgagccaaaaatattgcctttcccactcacaagcatataaaagtttccctaaatgatctttggatagtttcatactttttctagtcagttagttgatacatttaaaagtcaatcaaattagcttaaacattttaatgcatctatggaaaattcgaattaagtcatgctaatattgtgcatgattcttttgcttaggaatcgattatagagacattttctctttaatcactacattattttttacggcaagtactatatataggttttgaaaattaaggtgtgtgtcgatgaatagaaaaagtaaagtaatgatcactatgttagtgtctcaaaataggacatgccatatctaaattttcgtgtgtgttaagtgttaactaattaccgtcagaaattttggtaagaaccagacatatgtctacataataaaaggtgtgttttttttattttttttatttttataaacgttttaaaattgttaatactctataaattaagggaattacctatcataataaatataactatttctgaaatatatataaaattattaattagtactataagaaatctcgaccgctctatcaaaatacataattttccttgaacagctaatctccaatccatggttaaattttcttagtggaattgttataatgatgcatgtaaaaggcaaacaaaattaccgtaaacctgtcgtcatgcttatgcttgctaagctcagctattatcttgttttctcgttaaatatagtagcatatatagatatctaatatggggtttgtgtaaaatgtcgcatcataatcctaagtggggcagtttcatgaattttgaaatgccttgatcatctcctcaccaaccaatcacgttcctacaatagaactcaaaataatgtatttctcatttaataaatcaaacactaaacgcttgacagttcaacagcaaaatatacaaaactttgtctgattacataaaagaaacagttacatgttctttttgatgtatagaacaatgattgcaaaaccttgcatttggtgtatcattctgttttcatatgaattcacaacatcgtgagaattgacgcataaaattcaactataatctacaaaaatgacgcatatataggaacgaagtaaaagcaagcgtattgccggcgtgcatggaaacatgattttgaggtgctatcttattaaaaagaattcctactcgattacacaatattaaaagtaaaacaagatcctatatatatatattacaaaattagcccacaaatagtttgagatgatcttattcagtgtcaacttttgaaatttgtttttccacttcgtattttttttccctttgtgcaacttttacttcatatctttggcgtcaagtcgaggaaaagttgagattttagggtaaggtgtacgttacataattcttactacgactaacaagcccaagtttcctcaatggaacggttaaaacacataaacttaagttaagttgtttaactaccactagttatagtatagaccatgcaacgtttccaaatcccaacacgcaacgctatctctaaccggtcaagtttccagatcagagttcacggttcaatccaattgtattttatagacccatgtcaacaatatattaattattttaaaaatccgaaaaataaaagatgtaatttctatcgacaacaaaaattacttaatttacatttaacaatttaaattgtcgaaaccacacttactctaaccattagcgtctcatgtcacacacacgagcacataatatggataatgatgtgattttgactccaattttggtttgcttgatggaaacaggtagaaataagatgcagaggacaacaattatcgccgttgttgacgatgcagcatgtaagagattccatatggactccaaaatcatcatcatcttactctttcactttgcttcgagactcatcaactattgatcatgtcatgattttgcattatggtaggactgcttagttaaatctttatttcaatagtttttgcactaagtctaacatttttcgatcatcatattgtgtactttcgatcgagttttaattagatctccctctctttttttgtttgggttttcgatctatttttatttaatatatccctccaattttctcaatagtttttaaaactatatggctcatattgtagggaagtggtgtcgtacgagccaaacaagtggtctgaccactgacctataagccctagacacgatcttattactttagtttcctgcatttgtttggttatgttatcatgattactatatttctattttctattacaagtaatttttagggtcattgtgaaagtagtctaatcttctttccctttaatttgataaaataacacctttttggcttatccattaacaaagtaagaccgtcaaggtatcaacatatattgaacatttatatcttttgtaggttgtacatataatatatacattatcgaaactttttaaatttgaaaaattataaacttttcataaccttttgcaagtgttcgtaatgagtttaggaaacacaaactaggaacaatatgtgttcatgtatgttttaaacttacaaaagtttaattgtattctactttattacccttaatttctgtttgttgtcatattttctgttcagaagatatgatctaaaagacttgaacacagctcggtgtttggatttgttttacaactgttggttcctgacaaactaaaccgatccaatttaattcgaataaattaaatcttataagaaaatacaaactacactaaaatatggatagaatgtgtaattatttttctatacacgaaaccaaatccgaatacacttcaaaaaaaaaatgaccgaattttaattttatttataaaaacatatatattgaattaacatgaactaatacttcaccaaacacacacataccaattttttagcagtaactgtaaatctatatcaggacttacctaaatcgaaatcaggactggaccgttatggacgggcccaataaaaagttatccttctaatgggctttaaaggcctcatatcttattattttcaactatcttcttccccaaaggcatctctccttctaagattccgatctgtttagcttcttcttctccgactctcgtaatgtcgtgatatgttcaataagctttcttcaatggcgtatggttctttcggcgtctcatcaaaagctctagtctattgccgtccctgctatggctccattagagatctccctttctccctccgaacgtcaacagtttcgtctcccgctcttttccgctttgaaactctatgattcagttccatcttctatatttccttcttcaccttcgtaactaacaacgacccgaaaatgggtattgttcagattggtcattgcggctgtgttggagctatcgcagcacctagaaatgttgtgaaacctcgcaaggaagaaagtcgtggtgattatcattcttttgaagattctgattctattcaataaaaaagttgcgatttttattctaatgaagcgggaattgttttgttttgacttgtgtaaaaatgatcgaagattttagtggagcacggggaagtaataaggataaatcgatgccatggaagaagttagatgctaatgaatttggtattcagaggtcaatgataccagattctacacggatggttctcaataaactcaagaaaaaaggtttgctttttacgcttacttaggcttctgattggactctggcaattcttagtgtgcttatatgacaaatatcagcttctgttgggaagagctttgaattgtttggattttgttttgaactctgccttaaaatctgtgttttagtggctttagtgtaatgtgaaccctctcaagcttttgagattgtttagtttagaacaatgtgaagaatagctaaaggctttatttttgctatgattttccaggatttcaagtttacctagttggaggttgtgttcgggatcttattctagatagaatccccaaggattttgatgttatcactactgctgaactcaaggaggtttaaatcagcttatgttcttactacagacttgtatttttttatccttttttatgatgaactcaatcttgcctcacaaatttacgttttgaatcatcgcttgtgtgtataggtacggaaagtatttcccggctgtcaaattgttggaagacgatttccaatatgtcatgtttatgttgatgatattatcatagaggtttgttcaacatttcacttattttacactttttccctctctccctttctccatctttctctcaagttcgtaaaattgtatcctaagggatgatggagtttttctttttaataggtgtcaagttttagtacttcagcaaggactggtaaagcgcccaataaaagctttagacggcctgcgggatgcgatgagcgggattatattcgttggaagaattgcttacagcgtgattttacagtcaacgggtaaacagtacctctctatctgtatttctcttatatttgtgaatagaaatccatatgcagcatccgttaacattcatatgttggtttttcaggttgatgtttgatccatcggagaatgtagtgtatgactatataggaggagttgaagatttaaggaattctaaagtaggttttgcaatttaagctattatgctttatagaaatctactgacatgtgaatgaattggtataagtcctaatcagttgaagtttgctctgtaggttagaacagtatccgcagcgaatctttcatttgtcgaggatacaggtcagttgcagatgcaatgttttcatcattggtatgaaagattgaaatctatttgtttggaaatgctttaaaaatcgtaacggtgttcactttgtagctcgcattttacgtgcaattaggattgcagcaaggttaggattcagcttgactaaagacgttgctatttctgtgaaggagctttcttcttcattactgagacttgaccctgtatatctcgttaccttttcttgttctccttgctcttcttttttgtttgtaaggttaggactaaacatttttctatcgtgttccaataattctgcagtcaaggattcggatggaaatcaattatatgctggcatatgggtccgcagaagcttctttacggttattatggagatttggcctcatggaaattcttctacctatccaggtatggtgaattttctttagcagtgtggcattatggtgtacacactgagtactttctgttgttcacattgaaatcacttatgtattcgcaggcatcttatcttgtttcccaagggttccggaggcgtgatggaaggtccaacatgcttctggtacatatttttgcattctcagttagacatggcaacttcctgtctagtagtagtaacactacagagtgaaattatggttccatagggctaactgattacccttgcagtcgctatttcgcaaccttgaccgacttgtagcacctgatcgaccatgcagcgagttcctctggtgagaaatcttctttaatacatctatcttagtaattggttttgcctggttaacaaattttgggactattaacctcaggattgggatcttagcattccacaaagcattagtcgatcagcctcgggatcccacggtagtagcttccttctgccttgccatctacagtgaagtatctttatcagaagccatcgcaattgcaaggagcaactcaaaacaacacaactcacacttccaagaattgtccagtcctgaaaaggacactgctgactcagagagcaaaatatcgcagcaggtcataaaattagcagagtctataagatcagctgcgcggaaattgaataaccgagactacatagctaacgcaatgagcaaatacccgcaagcaccgggctctgatatggttggtacactcacatttcaataaaacattgcgatcacaataactgaaatgtttcatattcttcattgagattattgattgttatctcaggtattcttgtcaagacttatgttggagagagtagagaaaatgtttggaaatgtgagaagaaaaggaaaccaagagagagatgatgtcccaagtttagagcgtaggataaactacaagtctcttgcccttggagactttcatgagacacgtcgtgtttttgctaggattgtctttgataccatttaccctctggcctaaaagcccaccaatttttttttctttccaaattcgtctaattgactataaatgaattgatctatgtcctatcttacttcccatgtggaacattccttacacacaggaaaaaaattgtagctaacaagcaagttactgggcccaaactgattgcagaagaacaaagctttaacaagaaattgttcacttaacaacgtgatgaggcttagatcaaagttctcatgttttttttgtcatgtttagatcaaagatcaaagttctcatgtttctgaagacaaatgtgtattctctgattcaagagccttggggatgcagatgtatcttcagagaacataaacgaatgatgttaaagcacagtaagcttttgagttggtactacacactcaacagcagacgtttgctagttttagtacctgaatcctctgttccataagtaaagtacatagacttcattacttcaaagttcacacttgcttttatatgttttattgactcggtaaaatttgcattataatccattttttatcttcggtcttgcatatttgtggtactactattaactaatgaccatattttaagctgaccgtattattaactttgaacctcatttttgatggagttaaacacaatctattcatatgatggtcaaccaacacacagacatatcattaagcaaaactaaatgatacagttaaaacccataaacacccatttcttaagaaactagcttgttgccatgtcattgatcaaccagcaatcttgagtaacaagttgaaattacattagtaaatacaccacattttttctgaaaaccaaaaatcaaaacagaggctcactcactagctctcaccccttgtacatcaaattgtgcatcgttcgtgactactcgtctgagctacattttttttttttgaacttaaattaatctttttctttgggacagattatgcatgatgtatttatactttgtagaatattaatttattcaaaagtgggttaggcttccatataatctgcacaagaaaaacattcgactgacgaaatagataatgcggaaatatttttgttctcttgacgtaaatggaaaaatctattaatttcgcaatctatcgtaagcaaatcttgagagtgacatgagtcgaacctagccgtttcacaaaactccaaaccatgcaatgaaatgtcactacttgtttctagaaactattacacatttggattagttaactgattggttcatcacaaaatacgatattactttattttattaaaaatatagatgttacttgataattgcaaatcccaaattgtgtattggcctatcctcagaatctgatcactaaaaaagctgtacattgtttttgtccttttcctatttatttgtcaattcgtgcttttaaaataagatttatacagacaaagttaggtgtacatgaaatatgcagatcttaatgaatctctatgaatggcagattgtgagatatttcataaagtgattgctttaagacagtcacaaatagaagattgaaaacatatcaaagttccactaactttgtaaatagaaaaataaaaaagatgcagccaaatgctatcacacatcttttgccaatattttgttgtctccaaatttttgattcattagtgatctacggttcaactttttttctttcttgttttatctacgaaacaattttgaatttttgagaatgtctttgtgccgtattaattgagattttgaattgcaaggcatacacaaagccatgaccttcgcgccatggctcacagattaatctacataccttaagtggatgtagttttcacttttcagtttagtttttggcttttaaaataaataaataaaccattaaccttctcaaagctttgtagatttttttttttttgtttgtaaattcatataagacctcaaatatatagggcgagcaaatccatttgcgaattagactattttttttgttaattactcttaaattataatttaccgtggactagctacaaactgcttttacacaaaaataaacttagtataagaatgattgtttgatgataaattaaaataaactcagtatgcacatccattaaaaacataaatttagtaagacgacaaaaaagatgagcaatttatctagtagtagtatcttttaaacctaactattgtgtgattactaaaataataaagtagacaatgaatgattagggatagcgaatgaagaaggtggaagatgatgttaacttcggattggcgcgaaataagataaaaaagcttgttcttcagagaagaaagtgtttatgattggacaaagaaagaaagaagcaaagcctatccacttctcatcttctctattaccaacaaaccttccccttctctgtcggttcctccttttctattatttttaattccagataataaaaagaaaatctttttttgcttaaagagctcaaaccgaaacccatttcaagatttcatcctccggagtgtttcaacgaagcttgggtattgtttccatttctcttttttgggttcaatttttggttctggattagcctttgtaatgtagtagttctgcgaatatacttagtgtaattaatcagcttgcattgttgataatccacgcttaaatcgattttgggcaattgctggttttttattatatgattggacagatgaatgcaacagtttctgggttatactctgtttgatttttgttttaataagagattcctccaaaagttttgctgggttttttttctctcctacttgttttaaaaatatcccacttgcaagagtgtgaatttgaagacaaagatgagtcaatctctagtttttggtttgatttcatttgacatttgagtctgtgtcctcaatatccgttttctatatttctttttttgggatttatttcttaaaattttcttgcagtttaaaagttggcaatttggatatgatgattgtgttgtttacctaccatgtgtttatgattctgtctctatcttcttcatggttatataaacatacacatccttttttgataatagtttcattgattgaatgtgatgctgaagattctaaatgctttgatgtcaattttgggtctttgctgattggttaacatctctgtcattaggtacataagtctgatatgagaggtttcgtcataacttgtcttctaaggtaagtttcctcacctgtggcgtagattgcatcatcaatccatggacgttgaagaaaagagggtttcatctggttatgccaagcctccatggatattcaaaggaaggcaagaaaacactttttgtagcttttcaagaatctgatttctagtatatgttttgctaaattttcttcttactgtgctttcagtgcgttgtaccagattcatcttgtgaaggctgcgactgctcgagcattcatccccaaggagtttcgactagttgaagcttttgggtataaaagcatctcctgatgcgtgttgctattgattgtcttcttcaaactgcttaaccattgttgtgtgttgtgggattgtcagatacactcttggcggtttcttccttgctagctacgatgatagccccgctggtgtctttgatgaggtctccttttctccctacttactcaaactaaccaccccacaacattctctcagctttttgttgctttttcccagcttgtagtaattgcagggattgtatggaaccctcctacatcatgcgcgtatgttgattctccccttcttgtactaatataaccattttttagtaaagcagaatttgactaaagtgaagtgaccaagattatagattcatgcttatcgtaacattgagttatgaagtggtatttttttctattgcttcagatgggccgcgagggtacttgtgaacagcgatgaggcttgtcatcacggacgcaaggtaggtgggtctactttgtatatttgctctctatcaatggaatgatgagagattggcgaataataatgcattattgtataacatggtgatgttgcaggaagtaggactcccaagccaagttgcaagattttcaaaagttagtgacactttgttcttaaaagtaatttagcttttaattattactgattatgctcccaataagtttctttttaactacatatgaggaaaacaatattactcttgtctacataaagtggagacactgtaattatgaactacaaaaatcattcttcctaactcttggagaatgggatcaaacatgttgtcttgattgatcttcttttacattttgcgttgagtaaaagggattttttgtggttttgaacagaacattactgcagtcccaaaacaaaaaagggacagagcttttggtttcttggacacatttggtttgggaactactctgtctcatcctgagaatttgatggaggttaaggttagtgaagttgatagtgctgcttctactgatatctgcaacatccaaattagatcagacggtgagttcttcgcttcttggcctaactttagcctatgtgtaatacattctgagaaaaatcatgtcatgttttgatatctaactatgatcttaaactggctacctcaaaatcagagaccaaagttggaaactggatgggacctgcaatcaaaatggctctcccaagttttaggtaaaaatttggctctagtgattgtttttataggacacttggctcgtaagctcatcaaaaatgtcaaataatggcagtggcaatacaatttacaactcaaacttgctcaagtactcatgccatctccactgcaggtgttgttagtcgttactgcttctactttacaaaatctatcgatatattgaagaacacttataagaagaattttgtattgaactttgcagggtgaggccggtgagacctgcggttgtatcaggggctttggaagatgagacagagaagtttacagaacagaatcacacatcacaagagtcacttgaaaatgaaaggcagctaagcaaagccgtgatgctatcgaaaccaatcatagctcttcaattcaaatgcttaacaatgcaagtagaagctcctgttgtaatttacccttcaaagtaaacacaacactcaaattccaagaacatacagcttccttcctaaaaggttcacatctttacaaaaacaaatatttccgctttttgccgattaaataagccattcttaggataagtggtttgccaaaatctattattttatacttacataaggtcaagagatcatggtacaatatcagaattcttcaggaagaggatggccgtccaagaacgccttgaacaggacaagtgatctctcaggctgtgagaatgggacctcgtgtgaagctcctcgcactgttgcaaaggacaagacatttccatagacttgagtccatcctccaacctgagacaccaaacacaatgtgttagttttgttttcattttttctttttttgtaccattagagaatgttgcttgtttacctgttggcctgcaaaccagactcgataaggtacacttgttctcagtcccaattgtttggccaatctactcactaaggttctacttcctgtcaacgggatcacagaatcttgatctccactgttcttgcaagaaaaacatccaccattaaatcatgaagacaagtaaaagtttaacagagagacattgatatttacctgtagacaagaactggaactccagctttaacaaggctccctacgatattaatcgttggtatttccacatcaagcaattggtaatcaagcacactgtcataatcatgagaaaaccaaaatcaaaaaacgttcaataactaccaacatctattggaatcatctgcaaacttttagagaaaaaagtgatgactaacttgctgcaaactgtccattcacgtactcctatgagccgagcatgaagagcttcctgcacatctcttcggtttagatagttgaccgtctcatcttcgacacaaacatccacagattctcccacttgctgtttttttcaaagaatcaacaaaggtcataaacatagtcacagagcaaatgacaaaagctctaatatttatgtttggtgtgttgtgactcacattggggcttactactttggattgagatagcacagagggaatgcaaacatcgagagtgacatcatatttatcaacaaatcgactcgtctcagtgctaacttgactcatcaccttagagcacatactagacattgaccctctatagtactcactcacatagcgcgagtaattacagtaagatgtgaacattttgtaagtcgaatccgatatcaagccatgagaccagaagtactcagctcgcgagttgaaatctgtcgcaaactccaaaactggattgccaatctacaaaaaacaggattaaagtcaagaacataaaaccatattgaaatgagaatgagatcatgtttcttgacttacagcaattcctctcagattgaacaaatggtgcttcttgttgtactgaatcataagctcagctagttgaggaacataatggcctacatttgcatgcacacttcagcaacaaaaacttcaactaaagagcttaaagtaatggaatgaataaagaggaacgttaaagttattaccagcataactttcaccagtgatgaagagacttcgattgaggtaatgagggaatttgagaaaccatctttgcaagaacacaaggttgtctcttgctgaagtggaaataaagaagacaaaagagagtttgagagtgttaaagacaaacagaaggaaacaagaagaagagaataataacttcagatgtgatctgcacaaaaggttgaattcttttgttctttttgtcagtctcagactggacaaagaaacaaaagctgaatgaatcttttatttttaggaaaatattaataatattcactttcctgtaaaaggaagaacaaacaaaagaaatgacattcacaggtcatactactgtgtaacaccatcatcataacttctcactcaatcagaaaattcttattaaaatgaaaaaaaaaaaaaaaaacttgaaagccaaagcttttgtggtgtgtaaaaagatgtctgttttcatttctggtggttacaaaatcttacttttgatttgttgtttttttctgttgttgctgaattttgaaaaagggaaaaagacacaaacgtctgggttcctttatgcaaagtctaaatcaatagattcagcaaaacacagtttctctgaagggttttgtttttgctttctttaatcaagaattgagaattaaagaaaaagaagatacttaatgaagggtttaagaagattaaccagtgatcttatcattaacaccctcataatgggagctttgagttgaataagagaatccaactccaacaggtgtctctagatacaacatattagcctctgcaaccaccaaacaaaattaaaaatcaagacttaataaagttttttgaaatgttgaaaaaagagtcttgaattgtaattaccttggttccagctatgctgattcttgaccaagattggtccttttggtctaaatggtccgttttctgagaatgccccaacgcccaaagatgaacatccaggtcctgcatttatccacattttcacatttaattttttctaatctactataatgtaatttggtagttgagagtgagtgaagatttgaaacgaacctccattgagccagaggacgagaggtttagaggatggattggtttctgcctcggcgaagtagtaaaacagagctctctgtttcttgtcgtcgacagtgacataaccggagtattgctgaaatccgacccggggttgaccgggtaaacgggtgactcgatctgagtgggacagaacactagaggagaccgtgagagagtggaagataattagagcaaaagagattgtgagccattggagaggagacatgatgtcacttctcggtgtttggtttgagaagaagtgaagaggagactagtgatggactttggtctttgttttcccacttgctcctttgcatttatatcaagattcacctttttcttatgtaacttttttaattggtaatatttaccacatccgtaagaaatttatctcatcagtaacatttatttagtcaaaaatgcggtaaaaattagcggtgccattactacaaatctattagtatatttctctcttttaattatttcattttttaatcgttttattttccgttaatatatatggcgataatgtaatagaaaaagaaaatatctatgaagaaaaaagtaaaaattactccatatatagtttttctatgtacaatatataagatttcacacatatattatttgtcattacaagtatatcattgagtttttgtttaattattattaagataattcttctaagtctaaaaaatgatattgagatgttaagaaataaaataaaagtatagaaaacatctaactttttggaactaaaactgtttcaaaaaaatatctaacattttgcaacaaaaagaatatcaaatgtggaccaaagcactttctactgatggtttgaatccaataagtataaaatggaaggaaatccacatatccataatgttaatactcttaaagtccacgattattatttttcaaaaagagaaaagtagctatataaaagctgaaatataaatctacaagataaaaaaaagagggtagttagtgacactaaaaattagagtcaattagagcggcaaataagctgattaccaaattttagtacaaaattgtcaattttgatgatgtttgcaagtaaacatggctggagttcacttaaccaactcccacccacatccaaaaagtttctttctcctttgagctcttccgccattgaattaatttttttaatcaaatatattttctttttatagttctaccagattttacaataatatatagttatgatcgaaagtcgacatcaagaaattttagaatacgtcaatggaggaagagctcaaaggagatatcgcttgcataatggtcatggtgaaacgtattttaaaatgttacaccatccatctctacgtcccacgcacattcaaatctgaggaacacggtcagagactcaaaggactttccatctactacaataacaaaatactgaaagtctgaaactaacatttcgattgcttcgaaaacagatattgtgattgcattagtgattagtgtttgctaactaaaaaacacagcaaattcctacaaacatttgcaacactatccgttagggctttacagtagtgtttaaaattccaaaatatatttgacaaaatcagtaaaaaaaatggtaagtttcttcagagatgaataaagtgatttagcataatagacaaaaatcaagctgcaaacataaataatcttatttaaatcatgggaccctaaagaggattatatacctaattaacttatttattacaataaacttaaaaagtttagaataaaagaatagtaaattgagaagagcatgacactccagttataattatttaaatgttaggcatggtagagaaataaggccaaaacaatttgggagttacaacgacaagagtagtgtgtatggtatgcgtgtaaaggaacttttaacaatggcactcacagagaccactgcatgcaattatgcctttcagcaattttattactttttaagggtcactttttccagcatagaagatttttgaattatactagtacttattttgtgactctgttattattttgcttcgtaaaatcaagtacaatactctggaatttacgggtgatgatgttcacgtcaatagtaacatagctagtaataagtattcaacatctaagtttatataaaaaaacgtctgcaaaatgctatttttatttatcaacaacaaccaaaaaatgccaatcgatcgtcacttctatacctccaggaaaacatttttttgtttgaaaacgaaacttcattttgttttctttaatttttcaagcttcgttttgctcctatatttgtatttaatatatacattcaattagtaaatcctgttgtgcgtatttttttttaaaaaaatctttaatttgctgttatcttagattaaaatatcattactattaatatgaacaaaagtaatactccactatagtattaagtagccagactaagcgataatcaaaatggataaacagaaacaaacaaggagtgcattgcttacagccaatttgatgcttcacgccaagctttctccatctttcccaaggccaaatcatttctctttctttttttttccttttcattttattcaattaaaactttttccaatccaccatgcacccattttattcactcatcattcacttatcctatttttcgacgtgtttgaagataaggttaatacttaatattaccttaaaattaaaaagtaggaagtttaattttaaaggaaaaaaatgtggccagttttttagaaaattgcttttgttcatattaatagtatatgacattttatcatttttgttttttggagaatgtgtagaaaatgatgtatgacacgcttttgggaactttgagtgtaagccaagtcttttaaccttttctcttattcttcgtcgaagctttttgacatgtttttatacccaattataattcgagaaaaagctaaataactttccgatataaacaaggaaaaaagaaaaatgtagaactatataatattctttttgtatgtattgaaatagaaattccaaaaacaacaacataagacgatgtaactcatcgagccacatgtatcttgttgattcttaatcaaggaagcggtatatacactaatacctaacgctacgagtctacgacatgcaaatgattgttgacttaatggattattaagcgatttttaggtttaattaagcctttcttcccaatggtttcgctttttccatgtaactaacgaatctttccatgaacaagaacgcatcaaattgataacataaacacgtatcacacatattcttaactgtgtaagaaagatttgatttgacaggattagatcataacattcttatattcaatacgatgtcaaattactttttgaataacgttttgtgttttctagcctagctggatggttgtcaaaagagatataattgctcattgacacacgttggacgtcgtttatgaacgtaggtatcgcggagagaaaaagagagagattatggatgatatgaatgatgatgatgatggggtcaaaggtaacagtgttccccacttgagaatgtcgccggaaattactcctattcgttcctacaccattcctctgagaacagaagtcaccatatcattttaaaattctcaatatttattttccaaatattttttcgtaaattattcaaccaaaaatattgaacctaacacataacagacaactccgtgatcacgcccatttttcaattgcggaagtctttggttagtaattgttactgcgacaacgtcttttcttaccgcggtaacaataggccaaccattcaatcttggtaaatcaatgttaaacaaaactacataacaagaaaagcgagaacttgctcatcatgatcgcatatcaaaatttgtgctgtggggaaaattttatatgaataaccattttgttgggaactgaaaacagagaaaaaaaatgaaaaagggaaagagacagagtccatttggtctgaaactcaaaaacaacttttgcctttatgggttggctaaaggagtgggaatggcccatccccaccctctcacgtcttgtctcttgtatccctattttctcattatcctcttaataattacaaatggaattggaaacactaactaatctgaccctttgtttgtgtcttcttctcttgttttcttgtcccaatgtcttttggcctatattcacttattgtgaacaattattagtttacttaaagttcatttaaacttttgactctccatcgttagttgtatgttaaacatgtagggattagataacctacgttaaggtaattatatgatcaaaacaaaactatagcatgacttatgatatgattactaaagaaaggtaccccaaccaagtgtgttactcttgtacaattgaatgtgattattcccactcgcagagatatttgggttttatatgttcttacttagtaaacttatatatgattataagttaaactaatactgattcaaacaatcctaatgtttattctaaccctaaataaataaataacgctatttaatctatatatagttttcccaacctgttttcccatatccatatcaagaaccaagatccaatacaccttttaaagccctacttaaagtatagaaaatattggtttctgttttcaaaaatattatgtaagaggaagagaaagatagaggggtaggtcaaaaggaaaaaaaaggctttgaatttttaatgtaacattgaaacggtaacaagtgtatgtgtcttttttgtatggtagtagtgttgggaattgttaaatcgaagagagaacatgcatgcatatgaataaaaataacaaaaatagttaataatttagtgtgtttgttagagatgattaatcggccctctaagccatctaagtgcatctcatgtcaacctttctttcatatggcgtgtgactttgaccctttttataactactagtttcggtcttcttggattcaagttccctttgaatagttcagttaaaggaactatagtgccaagtttgattttgatttcatttggatatacatggattctcttcgttacgtgacaagcttccaaagaagaaagtgacaaacaataaaggacgtatacatacactatgccctctgattctctacagtatagtctttagatggttgtgacaaaaaggaaaataaatacggattgacactaacacttagagcatgtccattgcagggaccttacaagtttcttaagagaatcctaatgaaaagaagcaaaaaaataaatcaaaattgactaattaaccaaggtgcgaaccttgaataaggtatttttgggtgagtaaggttcgctgacgtggcactatatcattggaggaccaataaaacaaaacaagtttttttccttttttctttctctcctctctcttggtttcgtatagagtttctgagctttggtttatgttcaaatttgtgtttgatctgttggtttttaagataaaaatgtgacccttttgctgcttattcacttctcattagcattacaacggattggtgacacaaaataattggttctaggtttatgtttatgctcttttgtttgctcatttagttgatgttatcaaataattggttctaggtacgtgctttcatttaagttcatgacagtgtcttgagctggagatagattattctatgttcttcctttggtgacaatttcattaatagacctctcatctcggactttagtttcctcttggaagccttttgatttgtattctttttttctttttttttgcttttatgtcatcatatatgtttacaatttgtaatattttctaataacttttaagttttatcaaataaattattttaaaaatatttttgctttttaaagaaattttcataaggactccaccattggataacaaaaaatttagagactcaacaaaaactctaaactttaaaattaccaaaatatattattaaaaaatgttaaggattttttataaggattcaatcaatgggcatgctcttatcttttggtttcttcttgttacatcgtttttgggggttccaaatatttacaagacttaatataatccatttagactgctcaaaaccactatccaccatgagccaactcgtgtagcccgcattattttagcatcaacatttgtagccttaactcgtctcatggtagggtaatttatgcccaatccacgggttctcgacccaatcgacactcaaaaataatagtccaaagggtttgcatttctttgtcgtcacttttctatattttaaaaaaatattcaagtttaagattttagtcaggccattaaaacaaacttagaactctgccattggtaatatcgaaaaccctttgattccacttgctcatcagaaatatcataaaggatattatcatgattcatgaaaaatacaaggcaatatcaaagtaaagagacggtccattctatagtgttgcaaaaagggttcttttatcataatcaaaatgcaaatcgatggggtaattgttgattgttccatggtttcatccacatgaatccatattaccacagttttttgtaaacgtctcctaatgcgatttacgatatgtcaaatgatcatttccccacattgtctgatacctgtaacaacacaatcattaaatttaatccacgtcgaatctaaaaggaagagaggtcatatggcgatttcgtgtttatataccttacaagatggcttggggtagaggatatcgtaatggcctggacgatacagcaaggttataaatggagcagaagcttcttcatctttctcattggtaatgcccacaggaacaaagtcatgatgattcacagtgacgcccccactatcacatgagctacggtcaagatacacaacacggattgcaacaccaagtgcgtccgacaaagcagttatgtgaatatggtcactctcttcccccattggttcgaccgaggacttgcaaaactataacaatgtagtgttaatatcttgcattcacctatgctctaataatctatgaggaggtattcagaactttcaacagaatctttagtttaaacataagtgcaagagacttaacgtctcacaacgctgactaatcagagataaagcaagcaagtttggaaggacattaaaattgacagagatatcacagagacggaaaaataaaatttcaaacatatcaccaaatggcctgaattccaaaacagagtaagcgtgtgtacaaacctgatccactgttgcatttgataagcctgttataaaaggctcgaaaaaatcggcacgcgttcgtatatcaccagcagtaacaaacctaaagaacattacaactgagacaacaaaaatttgtcaaaactatgtaccattggatatgcatcgccagagaaaattagagtaacttactgtaatctgagactgactgatctctacttctgttaaccagctcatcgtagctgtaagagaaagatatttgcaaaaaggatgagatacaacgagaagagacttgtgccatttcatgaaagtcagaacttatccacacgaaaacagaaatcaaaattaaatgccaattaaaaagccatctggataaacagttctctaccttatagactcttcagttccttggagaatgtcatctagttgctcaaggaacaactgtattttcaagaaagatgaaattgagtattggtggtgatcttaccagatttaaaaagcagacacaatagaaaacagaaaaaggtggtcgatttaccgcaaagaagtcctcaaatgtaaaatctgtataacctaagttttgcagagtctttctacatttctcaacattgaccttgatacgatcgacttcagcacgatcttgtgattccaatatatgctcctacgaaacaaagcagagaaaacaacagcaactttaactaaagatacaatccacgtctaaccaaaataacaaagttcaaaaccaactacacaaacaagagctaggcaaaatagaagacattctgagaacatacaaggtaagagaacataaaacttcggaagaagcaatttccatctcctcttgttcgccggattccgatatattgactgtccagtatctacaagcattgcaaacatgataattcaaaaagactgaaagcaacaaaccacgaaaaagataacagagcagaaagtaaccttaatcttctccagcaaaatgggactccctgattgatactctgcagctaaactagacagaggttcctgcacatcattgaaccaaaacaatcaacctttttaacttctttcgataaataaacagagcaagataacacgtagaagccaaaaaacgaataatatgaaacagaagatcaattttaatattggctctgaccttatcaccaacataaggaactttagcagcttcttcttcttgaaaagatggttgatcttccactgatgaacaatttccccattcttcacccttaattgctgaaatcgatgcagctacttccgcttcatccttcaccatatcaatctgattctgcatcttcactacttcactaaactctcttcctagcttattattagcttgatctacaaacacacaattcaaatccgatttgaaacaaacgactcaagattctatcaactgatcctcaattcaacgataattcaatctgaatactgataacgagtttgttgatcaacaattcacaaatctgacaatcaaacaaatacgaatccaagaatcttaagataaggagagaaacggggaaatcgatggcggaggatttaccagaaacgaagatcgattgaagaaaagattggattgtgaataattgagatcgtttgcgacctaaattgaagcaggttgggacttgggaaccaacactaagcaatggggaaggaggaagagtgatgatgatgaaaaagatttctcaaatcggggaaaccatcaattttgattggaggggtataaatggtaagatacgtttcgctttttcccaaagtacttaattttttatatttaattttttatttttctctacacgaatcaggaaaaaagtcgaatcgtttttggaccataaaaagttaaaatgacggtagagcttaaaatgggcctaaatattttggcccaacaataatctgaactttgcttagtcactagagttttgttttctttttctttacaaactgaccataaacaaagtgaatcaaaactacctaatttattaagataaacgatttgtttgtttatcaaaactacgtaatttatcaagataaacaataaacaaaggagatgacaaaaaaaaaaaaaaaattaacaaaggaagtttaccaaaaagtatttcaatagtaaaaaatgattttaaaacaaaataaaaattgacaaataaaaacattaactaattaaacacttcaaattttagaaagagatccatcaagccaagagtacaaatatttgtcttaaaataagaagtcgaaagagttgaataaccattcatattattttttaatatttgagataaataagttggaaaactcattcaacacatttaaccaaaaacaatacaaaaaataatatatatatatatagaaaatttgttcaacttatcctactatattatttgggaagtacattttaaatgtaaccttaacttttataagtaattacataggtatgccattagaaataaaattttaaagagtaaattaatttatctctttaaggattaaaaagtcaaatactaatttaattaattaaatttaattaaaaaacgaaatatattattattttccaaaaataataaccaatcaaaatcaacatataagatttgatatctaaattttaattaatttaatttaattagaaaaacgaaatacattattaatttccaaaaaagtaaccaattaaaatcaacaaattagatttgatatctaaattatcatattaattttttattaattattatagttcacttctcatctttatatgattctatttttgccgaaaaataatatcatcattataaaaaaataattagagttttttcgcatatgccatattttgaatttttaaaaacgaatataaactattcaatacatgaaaaaatattataacggaagaaaaatagatttaagaaaactttctactgagtaacggatcataatttgaaatatttctattcaatttcacacatattataatgaaaatttataatcttatatactacagtaattaataacatattagatgtgattcaatttttaatacaagctgaaaaatcctagaattgacgggtttagatcgatattaatacaagatgatatactacatgtgaaactcttaaattaacaatcaaactacaagtgtataatcttaaacactaaacaatatagataatatcaacaaaatatatacaactcacagattactatacatttaaaatcaaataaaataatatcatatatatttaaatcatctttacaataaaagtttttagtttaactaaagtataagcctacctgcggtatactgcaggttaataactagattatagggcttattggatctaaagacgggtcatcaaagatttcctaaactgaagcaaaatatactgaatattcaaatatctatctgttaccaaattataaacaaataagttcgtaaaacaatttaatattttatatacgaaatcaattaaatcttaatcacataaaaattagcacaaaaaaaagtattcaataattaaaaaattatcaaatctctgtgttatataagttttgatactatattcgaataaagtgtaatataccttttcaatttgtattatttaactaatttaagctaactaatatagttgctaatcttatacctatcaaaaccgactatcgtttcttatctctatagtatttttgcaagatttttttggtggatttggataaaagtgcattcgggtcatatggtacagtctcctattaaataaatatggtgcactcatttgttattagctaaaatatttagattataattcagagtcatatcattaataaaataaatggctttttggcaagacggatttggatggacgggtttttgaatcaacattaataaaaaagtaaaatataattaatccacaatttcaatacggattaaatctttaatttattatattttaagaccactaatattaaacatatcaaatcatcctaatttagaaaaggttatataaaaccaaaaatgttatgtggtatgtataatgttattatatataaaattaaactataaaatataaatgtattagaaaatgatacaatttgcaaaacttttatatataaaaaataattcttaaattttaaaaattactattttaaaaaaaattacgggacgggtaaaaaaattacagaacgggttttattttggaattgggttatatggtagatgtatttgaatcaatatttataaaattttaaaatatgtttaatatgctgttttaataggggttaaaacttcaaatttttaacaattgtctcatggattcgtggtatagcgttacttaataacaattataaactgtaaaatataaatattttataaaattaaaatttacaagttttaatatatattactttaaaaaaataaattgtcccgcggtatatcgcgggttaaaatctagttcatctactattttgtagaggaatgagcagaataatgtccaattttttgttcagattaattttttccaatcatttatctacatgcaactatttgcacctttttttttctacgtaattatatgctatgttcaacagtctatcaaatatcaaaagaaacgtgaagactagaagttttcggtcagatttgcgactttcataaatatcatatcaacataatttctgttctaggaaaagatatcggtgataggattaaattttaattggtaaaaacttcggtttagcgatttttatttatattttttttgttttctaaaaatataattatagctgacatatgtaatttcatctctttttgataaatttcattagacgaaagaaagtacacttaaactttgacataaaaatgtgatcgcgatgtgtggatgtttatctaaatataattgttgcgattagacagttgacaagaaggagatttctctttcttttttgtgtggctttagaagttttccaataccctaacgttagttttcaaaatcaccagattgtgtttttttccaattctagcaaaacatgcatacatataacacgatcacgtttagacatgattaggatagttgttatttttttgaatatgataactgatgaggatagtttgtggagttttacgactaattatacagttagacgacgagcttgaaaatctggatggtttcgtctcttagtttgtgtgattgtgtagaacttcagttcatttctaatattttattataaaaagaaagaaagcagtttcattggatccaaatagtttcgtagttttactatgttccgagtccaacaagttaaatcactcccgagaaagtctagagtgctgaaaaagtcctcttgcctaactcttttgcataatgacaaaacgtaagctctgacaaatagagtaatctatgttatggttttgtctaattatgtaatgtttatatattcgtttgtggttttgagatgtttaaaggccaaccgaaacaacatgttctattacatctcgtcaaccaaattatatttctttcacatgcaccctaattctagattactatttaattgtgattttcgtcttgttagaagacaaagtaataatacgattttaattaaagaaaaaaactataagtttttaccttttttctttatctttccatgatggagcgcatgggcaaacgactaaataaccttaaacttatgccacattttttaaaaaacattgatcaactaattattggtcactacgccctaagaaaaattattggtttctgcattaatgcaacattttttaaagtctagttgtcggaactatgtttgacccgattgaattagtttagtgtttgaacccacttggatcaagtgtcataagaaaaaaaaaacatatttagtgttagatttatccggaggttctacagattttaataagtattaaagtgagagccggttgttagtattaccgactaattaggacataaatcacaaacttgtgacttaagtgtgatacatggctttgaccaacaaagaaacataactggacccagccaattgagtaaaatcgaagatatatatatgtacttaacattatcttcaacatttgcccatactttaaagcataaacatttacctttcatggggattacatttttaagtctatagctatatccattattcagttatgtgcataaatcagcttcttcttcttcttcttttgtaactaaagcatgcataataagaaagccgatattggacatagaccaacaaagctatgtaattggaatgatcagccaattaggtaacacatcaaagaaaagaaataatagatcctccgatgtttggtaaatttattaataattatttacacaagttggtaattgtggaataatttgtctacacaaggttgacaattgtggctgagcgattatgttagagtgcatcaagttgaaagtgtaggattttgttggactcttttggtgccttggtaaaataagatgatataatcggggtggttttgattgagcttccaccaagatagagtgttcatattttattagctagtagacttaaagatttatgtcactcatcgtaatgagaaatttctacaatttccacttatatacaatgcaaaacaaactaaattggtacaacaaacatatattcatgtgaacctcatatgttcctcatgcatagttaccaatagttcgtatctctcgtcttttattgggagttatcttatcaatgtgctgaatttggctataatgatgtttttcaaattgagcacacgaccatgagtactttattttttgttttttcaaaatgacttaaaatcgttgtgtatcatttatcgagtctctattcgaaaggccagactaactcgatttggactggtgccaagacaaaagcttgtttttggggaggtgcggaaaggtgaaaccctccgtagtacgtgatgtatctcaggaatagaaatgttctgattttatcatttaatctttgtggagtttgatgaatatataaaggtgatttagagtttttatgtcattatttacatgattactaaaagaaaccctaggctaaaagatatttgcctcaaaattgaaaaagttgaatattttaacactttactaatatatactttgttaagcaccatttttccctcctattttctctccttatttcaagactacatgtgccctcatagagacacttgcttttgcatttcactttatgttaatctgagcaataaaagacctctaaagaccatatctaagcaaatccctgaacaaatgtcctaatcaacaatttaattaatactagtttcttttcggtttcaaggcgtttaccaaaaaccaaacaactctttacacaaaactagttctattcactttgggatcggtgatgtgcttattgctattaattaatactagatatgatcatagtctcttctattccaagcaacgcataccactttgtttatgtggtacaccagtcatttacttgcctactcaatagaagttttcacttttgattttgtatttctctccataagtataatattaggaataattaaagctatataagtaaagaatgcgaaaatcttgatggatttaacattatatatatatatatatatatatatctttctagatttagatttaaactcggattgttatgcaatgacgcaactagtataaatgactaggctacatcttacatgttatggtcagctaaaaattgttatgttaaatgtgtgattaaaattaatttaattgaggtgtatgtacacacgaaggattttatattgctatagatagataaataaataaaaataatttatactgtttggactgaccaagttataacactaagaaaaacaataatatgggaattccacagtttatttttcactaattttcaaaatccgttatttttttttaaaaaatgttctaactaaacgagagaattaaagttatattctcttcaaggaagctggcaaatttatttaaagtctcacttgtacatcaaacgtacgttgaatcatttataagagctgagtgtgtaagatacgtaatttaaatttgacaagtcattagctttgccaaatatttcgaacactatgaagtctgtgatcattaacttatttttcttgtcaacagaagtcacatgttacatcacaaatcctaattagtagaacactagaaatcagatttagctataaccatccaacatataagctatacacttgatttttggagacttgtgggtaaactaactactcttgaaatgtgagactcacatgtaagtcttgtttcggtaattaatctctaaattttaatcttatgtaaccctacgttaatagaccgaataatattttttaacttgagtaaatcgaaatcaatactcatattactagattataatctcatatcatattcctaatttttattgtattttttctgtttctcttattgccatttatctgaaattttctttttaatttattttctcttatggttttgtcgtgattcaggagtagtaattaattcacgtcatgcgcgatttaatatgaatttaaaaatgttatctcagtccatgagaagtagtaattgtgttgtgcgtattggtttgaagtagtccaccaaaagagcaataaatgcaaagctcgtaactttgacctattttttgtttgtcttattacactactgatttttttttcctttgccatgtctatacagtatacactattattctctcttatttttcaatatatgaactacataacacatttaatataaacaacatgcattagtttacattagatagaaaacttaagctgttacatgatccaggactttggtatcctagtggcatgtccgcatgtgttgcaatctcttaaaactctcaaacagcaactacaacatattctacatagtctctagatttgtttgggtcaaccatatagtctcgaatttaaacgtcaaattcacagtacgtatatggttcttaaccactgtatgccaattattatcactaaccctttcaattatactgtatttgaaacccgaatcttatattaaccttagcgttttaggcttaagtttattgttgactttcgaactgttaacatacttttatgggtgtatatatatgacttatgctacaaccaacttttgatcctttaacttctagcataagtccatgactgtagtttccaatggatatgcttagaatcccgttgacatatattttgagtgaagaattagatgatgaacaatataaaagtatttaagccttttaacaaaaatataaaaatatattaaaaaaaaatcctgttaataaattcttttacgggaatgaccaatcaaaatatatgtgggcttattgttccacgaaccaggatgaaacacatcagatgatacatcattcaaaggttttgcgaaagttctttttatctaactaggatttcggatggtttgcctaaaataacataatagaagaaaatatgggcgttacgtatcaggaaaatattatcacaaaacaacatttcaagaattcattacttttaaaacagaaatagtaaggttagaaaatattcaaaaagagtgcatgtcttttaaagttgatgggtcggtcttatagattgcgcatgtcctgtatctctcccaaacattgtggaccggtctatgtatttgtgaaaggaaatatgccaacttttactagtctctctctcgcatgtgtgtgagtgaaatagttttaatatttcaaatttatttccaaaacaattcttacaaggattatcaactgcgcagcttaaaaaatccaattatactcaactagtattatcactctatagttcagaatacttttcttgaaaatatgaaatatatataaactataaattttatgtttttatattatttaatgaagacaatcaatgggattaagaccattaacgtgtgaaacataagacatatatgatttatcgtaaggttgagaatctatgtatgctttttcagggaccaaaaggaatatataacatcccttcagaaaaaaaaagatttacatgatttgggttgttacgtttcaaaaagaaaattaaaactctagtttaaaatctggtagatgtttcagccccttgtttaataaatctgaaacgagattctcaccatcatttttttgggataaattatcactattattttcatatatatgttattttaaattgattattaattatttagtagaatggtataatcatgaattataaacaaatacgtggaataaaataactaaatcgagatgtttaattaaatcaacttaattgtcaaggaaaagatttattttagttttatcattaaatgactaaaccaaaataaactaagcaatataaaaagcctaaagcaaaggaattgacgaaacatgcctaaagtgtatgacatagcgtatttgaatgaaatttgttcacgagaaaaagatcatcttctccaaaccctctcaggcctcttttctctctgttcacatctgtttcctcgtcacacaagacatatacattaacctaattcaactgttccatgtcttttaaagttttcttgatggaattaagctgatgcatgttattttatgttgtaattatcatcatttatggttagttagtcaattggtctatttatattatatgtatatcaacgtaacgaccctatcatatgcatttggatctgcatcaccaagatgatgactttataatatccaagagatttaacaatcttaacaatccttctctctcttaatcttgattgccataagtcaaacttgagattatttaattactatatggagcccaattatcgcatgtaaatgaggttaatataaataggcagatttaaactaacatatatgtcaatggaatttgaataactaagagttgtttagtatttcacagcaatgcaaatatacaggttttaagaacaatatgcaaatgaatttaagggatatataaaaagttcttaaagaaaattccatagccacatatataaagaatttgttaacttaagctatcatatacttctttttagtataaactttatttgaaaaatttgcatgtgagttcataaaggtttcaacgagttcctaaataaaatctagctaagaggcaatattagatgagtatagtgaagaccaagtgagtatatcttttggcagacatatgcaaatcttgtgaatatgattggattgatattattcaacggatcataaagaaagagcttgattggaggattaaacagcatataaacaaatatgatattaaacaaaaaataacatataaaattatagggaaagcctgcacaggtaatattgaccaacaatagcttctttctaactagacaaggccatgtgtgttgtaggacctcccaaatatatattttctaataattatttcatcatttgccaatttattatataaccatttctcatccttctcctcataccaccaaaaaccaaccttcaagaacagagaagaagtgattctctaaacaacaaaaataaaataaaactcttctttctctatttctgttgaaggtacctcatcattgcaacacaaacttaaagctttgtttgtgtctgctttcagacaatgataccaagttacgacccaaatgatacagaggctggtctcaagcttctcgaggatctgacaacaaatgcagaggctatccaacaacaagttcttcaccaaatactctctcaaaactctggaactcaatatctccgagcatttctggacggagaagccgacaagaatcaacaaagcttcaaaaacaaagtccctgtggtgaattatgacgacgtaaagcctttcattcaacgaatcgctgatggagaatcatctgatatcgtctctgctcagcccatcacagaactcctcactaggtaaacatattttttcaccaaattctacaaaaactatcgttatatactgttctcttaagaattttcgttatacttattagtaatttctttgagttaatattggatgcagttcggggacttctgcaggaaagccgaagttgatgccttctacagctgaagaattggaaaggaagacatttttctacagcatgcttgtgcctatcatgaacaagtaataaatgagtttttattacttcaatcttaatttacgtaattaatttttttgttttgtgcattaatatctcttaaattcattctcattccaaaataaaaaaaaaaagagaaatacagaaatatttcttaagaaaataaaaaacacaatagtatataataatttttgtagcatccaacagaaacaatatacgtaaccagctctcttattgggcttaaaacatttaggaaatatatttggcttctctttgctacaaaacaccttgcagattgaatatgtaggatcctagttacactcatgagagggcaaaaataaatcaattatatctgttttctttagtcaaaagattaaaacagtgaaggaatttttttttgatagattggattgtgtttacatatttgaaattgcagatatgtggatgggctagatgagggaaaagggatgtatcttctattcataaaaccagagatcaagactccgtcaggtctaatggcccgtcctgttttgaccagctactacaaaagtcaacatttcagaaacagaccattcaacaagtacaacgtctacactagccctgaccagaccattctttgtcaagacagcaagcagagcatgtactgtcagcttctctgcggtctagtacagcgatctcatgtcctaagagtcggagctgtctttgcctctgcctttcttcgagcagtcaagttcttggaggatcattacaaagagctttgcgctgacattagaaccggtactgtcactagctggatcactgactcatcctgcagagactcggtcttgtcgatccttaatggcccaaatcaagaattggctgatgaaattgagagtgagtgcgctgaaaagtcgtgggaaggaatcttgaggaggatatggcctaaggctaaatatgttgaggtgattgtgactggttcgatggctcaatacattccgacactagagttttatagcggaggtttaccgttggtttcaacgatgtatgcttcctctgagtgttactttggtatcaaccttaatccgttgtgtgatcctgccgatgtttcctacacgcttcttcctaacatggcttacttcgagttcttgcccgtcgacgacaaatcccacgaagagattcactttgcaactcactccaacaccgatgatgatgatgatgctctcaaggaagatctcatcgtcaatcttgttaatgtcgaagtcggtcaatactacgaaatcgtcatcactacattcacaggtcagtgactctctatacgaacacaatctaggtctgatgtggattcctaaaacggatagtaacttgtagcacaagtgacctgttacatatgtttttgtcaataggtttgtacagatacagagtaggcgatattctaaaagtgacgggtttccacaacaaagcgcctcaattccgtttcgtgcagcgaagaaacgttgtactaagcatcgacactgacaaaacgagcgaagaagatctactaaacgcagtgacacaagctaaactaaaccatcttcaacatccttcaagcctcttgctcacggagtacacaagctacgcagacacgtcatcaatcccagggcattacgtgctcttctgggagctaaagccacgtcacagcaatgacccaccaaagcttgacgacaagacaatggaggattgttgctctgaggttgaggattgtttggattacgtctacaggagatgcaggaacagggacaagtcgattgggccattggagataagagtggtgagtttgggcacgtttgattcgttaatggatttttgtgtctcacaaggatcatctttgaatcagtataagactccaagatgtgttaaatctggaggagctcttgagattcttgattccagagttattgggaggttcttcagtaagagagttcctcaatgggaaccacttggtttagattcttagactttacttctttttctttaatgtatgattaaagtcttgattttataagtataagatcttcatttgttaagttgctaattggtgtttctttttttaattgttaagcttttgtctcttttgtaacaaactttcagcaaagtcctctcattttgtgaatgtatacttttgtgtctctttctttattattctttgtctccctctctttttcgaaaagattaaaaaaaatcgtaccaaaccctttacataaaatctagctcatctctttttttcttcataggaatggtaatatattcatattgtatacataaatcgaacataactgaaaaataaaaacagagattttaagaccgaaaaaatattataaaagagaaactttcgaagttctcttttgcaatatatctacgttagtataagataaagatgaaaataaaatgaggagattgaaataattggatagagaggtgaagagtgacgtatagatgcacatgaagatggtgatggtttaatatgccagccaacacacagcaacatcattgagatccacatttctttcttacatcatttctattttttttcttgcataaatctcaactctatctctcgtcaacagttttcacttttctttcttttttctcttctaaaatcctgaaaataatttatataaatgatcgttacttgtactagttgtacatgtaataagtgttgaagttgattaaaaccacacaaaaagttttgttatgaatttaatataagttcactaatatatgcaaaaccattgtttaatatggaaactataaagattttcggagcaaatttcttccaagtgttgacatttaacaagtcttggatttgttttcagctcaaagtaggtttaactcattattagtagaaaaccatgtgcctgaatagtattgtaatgtaaactgcagaatataaaattttaagaatattcgaacaacaataaacgatgtgtggtcttatgaaatcattattatataaaataaaaaccaaaattctttatatcagctattcattttcacatcataatctaccttttcaaattgtggttttaatgacataattaaaattaaatatactaactatatgagtatttggtaggactaccaacgtatatctattactacatttaatgtctgtttgaatgtggctgtcgacatacatatatagccgtaaaatttcaatatacaacctatgttaagatattggatgaatatattttaaaacaaatcgatatattaccatgatttgatttttataaaaacattaaatttgtagaaatttttcttgaaactatcatgaacaaaaaaaacagatgacataggttttgatctaaataacaatactgttaaatatattttgaaccagattggctaccgaattcaatttttctattggggctataggtgttctcccggggaaaataaccaatggagttgattacgttgctcctcgcagttctccctttaacaccaacggtagataggaaccgaaatgtctcacgacaatctaaacccagggctcaggcaagaaaaccagggaagcgtgaaagagctcactcgtccaaagttagatctagcgaatagcgatagcgtttttgtttgtataacaacttgtaatccacactcatagtttcggatattcaaaagtttgatcgaatcaaaacggtaatgtggctaatatgcccacccacccctcgtagctagattcatcgtaagaaatgaattgaaagcatggtaaaataaaagcaaagcatggttaatgtggaagtaagtaaccgacaagagttggatatgatggatgtgttgctataaagagtaaatggggtaaaagagacagatctatgaccccaaatattaaagcaaaagaaaaaagggaacaaacttaactgttcacttaagagaaaacgatgagtttcctctcaactgtcctgtcatgttactttccgtatcgctctccagaacaaaaacgctgtcgttttcgtctcgctaccaacacaaaaccattgcaaccccatctaatcctgctgtttcagtgtatataaaataaataaataaaactgttcattgcatgtaagtctggaaatatatacacgtattgtcaacttaatgacagattcgaataatgcatttttcttcgataagaatctatccacaatagttttgattagagagcgagaccccatgaaagttagtgtctgagactttatcagcttgtagccttgtagtcctaaccacacttagacgttgtgaatctacagtggtctattccaaaaatagtttataaacattttatttccgcattcgtaagtcgtaacccgtccttttctgtagaaaaaaaactacgttaaacaaacatcatagaaggctagtttttatagacaaattaggtataagtcgcacaacaaacccaaggtttagatgatgaacacaactatttcactatcatagttaatcaaggtggttaatcaaaggaattctagatcgaaactcataactgttctcgttataactaaataatcgaatttgatcaaattttggggtaagttctcgttataactaaataattgaattcgatcaaattttcggataggctcgactacgcgttcttttggaggggtctaatactcaccactagtccaatactcatgtgtaatataataactcaatcaagctttttttagctactataaatcatataaaactagtcaaagaagatgttaaatatgacgttgttatactcacatgcaaaataaagtacatttgtaactgtaaaagttttaataatcaacgaatcatggattgagaataaatttatgaatgtagctgggagtcattaaaactttactgcatgttaatttttcgagttaaagcatccttaatagactaatggttgaaagtttggtttgttgatattagaaagagagtatcatttaaaccaaaaaaaaagaaatagagtatcatgactctggatttaaatcctgaattgataaacggcaaatgcgcagtaaaatgtgtttgtagttgcattactacaagagtcaaatccaaaactactaaatttgtacaaactaaatagacatgcggccgagaatacacactaagctaagaagaagaaaactaaagagagttttaaagtttttcttaagtctaattataatatcaaatcataaacaaagcagacgtgaaagatgcaactaaaagtggaatgattaactaaaaaggcaacaaagtcgacatgcaagctaaacaaagaaatggttaaactcaagattaataaattgatctatcgttttaaaagtagaaaaaagaaaaggaaatgtgagcgtgtgtgagccgtgttatgtaaagggagaggctagaataaggccacgagtgcaagagggaacaaagagaagctaataattagaaggttagggagagactcaagaaatgaaaagaagagacaaaagatagagagagaagagagacccacaaaacaaaacacacacgagtagagatgcagcattagacacgactcctcctttttcctacgcacgcaatttggagctcgtcctcatattggaggtagggactctcctttaacacttgctctttcccttctcagttttggtcggattcatttcataaatctctctctctcccccattttctctcttatccaacttcttgtctctatttccaattctaaagaaacaagcaagatttggtagagattatatgaaagatttatcttatatacaataacttgtgaagtagagactcaaaaaccttagcaattattgattgttcatagttgtcacattttggtcaaacttagccatgtatctagtatctacattggaccgtccaacttatgcatattaatctaggtatttttgaataatttgtagccatgttaataaatgacaaaactcctagaagattgagacagaaagcaacaagactgaagagagagagagagagagagagagagagagagtgtgtgtgagaccataatattagtattaagagtcgaccatattagtcgtactctgaacaccgcatttaacaccccactcgtgtgtcctgtctttcaattgcttgtcccgattcacgttcaatgacagaaccttattcctaatttcacgctcgttgtttgcaaacttaacaactcttacttagcattttcctatctccattccggaaacccgcatacatcacaatcattgttggcctaaaaacacgctaaatctattttgacacacatgaatagcatggactaccatggaaaagagacctatatccatttaattgtaggatcatgcgtcttaactgatattcgttttaaccatggtcactttccttcaatatggctaataacaggccagaggaccggaaaatctgtacgttatactcggaagtgactggttgagttcataattgtaggagtaacaagatttctaattttctacccttgtagttcttatggatcataactttagacatcttaataccacagtaacacggtcggacatgtttcctcggtgaaatacaactcacaactagggattttgggttgaaattttgcggacagccaggctcggttctggataggacggcccgagctggaccattttcattttgtcacaattggaccccgattaagtctaatcccgcttttttcattgcactttccaggtaagatgggggccatagacaaacaagaccatactaaatcctaaaactcaagcctaaataaggaccggcctaatcagtgcatcaaattgagccgggccaggttggcccatcaaaacacactgaggggcaaaatatcaaaaataaataaaactacaaggggatgactttaaaccgggtccaaatccgggtccgactgaaccaggttgccccattttttttttttttttttttttttgaatgtcaaaaaagaaaatatgagatgcaaccaactctcaatcagggaatggacattttgatggcatttgtattgtcacttctaagctactaatcacaatctacaaactgtgtttatggtagcatttctcctcagtggtaaatagaatctatggatacaaaatatttacctgttcttgaagatgcttaaaacattccactatcattcagattcttaccccaacttttcttgctcgagcttttcaactatagccttcttttcatcatcagaaagggacatgaacgtgaaaacagatttatctccgatatcatccttcaaaaaccaaacaagattatagatgattagtattatgacattttggtactttcataaatagcaaagacctctatgaaagcttgtacatggcttatcttcagagaggaacaatgtaccttaataggctgagtaaactttcttccagcaaatactagaaagagagccatccatgttcctagcaacaccagttttacctcatcattcatcagaccactctgcaaattcaatttaccaatttaagtcaggccaatttaacaaataccaagatcccccaagttaaggaaatttgaagctttctctttagagaaacgacgcagcagatttgatctcaggagtctaggcagctaaagcaggatatcttaatcaaacaaggtactttaccaaatgcccaagaagaactgaaggtatgatgaatgtaagaaggccagcttctagctttccataacaaagacctgcagacagaaattacatatcaagaacattggcacggttaaagatatgaagccttatgcagaagcaagatatttaccttctttgaaaacgagtcctgtgagagatgcgaataggggaccaacaaaccaaacagcggatggatgatcaacgacataatgaaccaagttatcaccagctggtctagcaagggctgcgtaagtagcgaaagaaccaacaaaaccaagtgcccataaagcttgaagagtcctcttaatctccgtaacatatatatgtattagaaacagagatagccccaaaccactagcaccaacaaagtaaaacagatcatggttttgcttgattgtttcacttaaccaagagtctcctggtaaaaaggcagcagaagaagcagctacaaaagatgcagcagcagttactagtcctgatctgtacaaaataacctgaagagaaaaaggtactcatcaacaacttgagctacctctaaactacatgactatgagaatatgaacaaattggcctaaaactatcaaaaggattcaactttgaggaacccaagtgtgaattgggcaggaatcgtaaggagagaagagaagagacctctttgacatcggcttggtcaatggtccaaggaccgtaaacacctttgtaaacggttccatcgacggctccttgcgaactattgctcacagccttaacgttagcccttcctcttctcaccccaactctggccgttaaaaacgccggcgatttgttgaaataagccggcggtgtgacgagtgtcgtcgtcgatagcaaacgcgaggccataagtcacgaatcgaattcacagaagtcgtaccggtttggtctggcatagcttgctagtgagccagattgatcagaggtatcaaaacgcggtcgtttggttatgagtcttaatgtcttatgacgtggttgggttgaattggttgaaaataatctgtggttattatcatttcatcgtcatggacaaaattcaacagtaagctaagaaatatctcttatgaaaaagatcttttgatattgtctttagttgtacatttggtctcttccaaatttgcgtaatgcagagacttacctggattcagtaatcagtacaagtatctctgattatccacaaaaatgattgtaatctcattgaagattcaaccaacaaaaataagtagtaagacctacactatagccacacaaatacctatctcaaatttagagactagactatggatgatacagagtgaatgtaaaatctttgtgttgtataatttgtcagattttacgcctcaatgcaaaagccatcttgttagcttgatttgattcgactgatctccaacactctagcactgtttagatcatcactatcttgattcaactaccagcaaagaatgtcatactcaaggacatgacatacctctgtaatgtaaaagttatacataagagagtctgtttctttctacataaagaacacaggggttacatacaaaaggtccttgcagatggtaaatactgcagaaccaagacacctcattcaatctctatctgttgaggagagtcttcatcattggaaacaaccccatctgcatcaacttcttcttctgtaatacccgaggcttcaactgttcgcgtcacccaatccttgagcggctcttcgtttagatcaagtcttagaagtccagcaaacatcccacccaagaatgcaattggctcctatacaaacaaaccacattgaaacagagagcatttgatgcatcaatactaccatccaatatgaaaacaaacaatgtaacacttatctaaggatacatatgtgaaacaaacagacaaaaaccctccaagattgatcaacaaacaacacacaatcacatcacaaaattgggatatcaattgcttaattgctatctggaacaactcatcccaagtacagattacggaaaaagaatcaattttgtcatcatctatataattgtaccttgagagcttcggagagaatgggttcttgagggagattgaaacaagatgatttcgaaattagggttctacgagtcggacgaaaccaaagttcattgcttttgactccggcggagaactgaaaattgtgacccacaaaagagaattgttaaacagattgtgtaattagaaaatcaaaatcagaagacgaagaaggaagacggacctggtgatggtgaagctgagagacgacgacacccgaggacggaggacaagtacagattaagacaaaacccatctcttcttcttcttcttcctcggctcggctcagaaattatctctatctcaaaagactgaaccaagaccacagtgatttctcaatctttattttattatttttaatttaatcaaacctaatctgaatttttttaaccagaaaataaaaacgaaacaaaccagaaaattgtgcatttgcattgaggatttgggttaaatccgacgttgtccgtatctaacatgaattagccgaaattttccgaataagctgaagattaattggtattatttgcgtaggttagtacttagtagtgtatatcataaggtcggacaattatatatttgtatttctctgtttacaatctataatattacagtgatgatattttgtgacttcttttatacataaaccgcattcgtaactgaattttgcttttctatataatagttccaaaactccaagagagaagctcatctaacgggattaagtaaactaatggtttcattggtttgtatttttatgtctttttcaacattatttctttctaagggttattgttttcggggattttaatatgtttgtttgtttagttttcatagatatttttttctattgaaatgtgtaaatttttatataatatatttcagttgaaagaaaaaaaactaactaaatttaaatttcagaatatctacatatacatttttgcaaccattttagcaaataaatcctctacttgacacttatttacaatggcatgccattggcattatttttttttccttaattatttgatttgatttttaatttttgatttaatatatcaatcacattattcattcaaatttaatccaaacaactaactttaaatcaaattccttaaaattagctacacatgattatttaaatgattattaatattatactttattaaaaggtaaatattgtaattatttaaagtttataaaacgtttataatatttataaaatataaaactatatgttacatatagagaaatattttaaatgtgaaatttataaaaatcaaataactatttgaaagacacattttaaatttatttgaattataaatcttttaataaaaatattatttaaacaaaacaaaaaaaataatgtttaatttcaccgaacgggattagatggtatgacaggtttagaatattaaaatatatgaactttataaattataacaattaaataaccatttaaaataaaaagtttgaaattgatttgaattatatatatttaaaattaaagtattattaaaacaaaaataataaaataatatttaattttattgaacggggttagatggtaggacgagtttgagttgatagtaatatgagacagtatacctaggatgaaatccattaaatatgtttaatttcattgaacggaattagatggtcagacgggtttgagtttatagtaatacgacacgttatacaacgggtgaaatcctataactaacaattaaaatacaatgatataatttaaaatatatgacaaaaaaaacaatcttaacaaaaatcatatataattttaaattttaaattttaaaaatcgacttacggtgtattccatgataaaatcaagggattgtacaatatatagaaattagattatatatttataaatacaaaacaatatgttacatatagataatttataaaataatatattcttagttacttttaataaaataaatagttctgcggtgtaccgcgggttaaaatctagtattagattaaaactctaagaccaaaaccaatatcatatgtaaatcatctatatattatagattagttaatttttactttgtgtactatcattcattaaagcaaaaattaaaaaacccggaaaaactcgactaaattgaaaattcattgaatatcagtagtatttttcaatcatatgatactattttctagtgtttttcactttctcgtttatttcgtgctacttaagtattggttgtatggtttgtggagctttaatgtgtatgttcattgatacattttgtattatcgttttcaaattaataaagaatgaagatgttaaaaatatatatatatatatatatatatatatatatattatgacattattcagtaataattatacacaaaagtaattcatattcacacgatatatctcttgtttattttctttcttggataacgaacatgttcatgctcatgctactaatcattataaaagcattgagattagtcatatgaaacgccacaaaaaaataattaagaagacgataaggagtagttttatatagcaaagtttctatattagaaatataaatatcgcttccttttcagtccttcagtgtgaaatcatgtatataatttgatatctaataaatcatgattaaacgaaatgaaattaatcatttggatccgaaagattgcgagactttgcaatcatgagtattgtaaagcatgtgattagcccatcatttgatcaagtggcacatatatattcaaggaaaacaaatgaatccgaaaagagtctaggaagttcacatactatatgatataacatattaattagtaccgttaataaaagaactgaattgagaagtttactcttcctgatttttgattaaaatttttatatcatgactaaatcgttgttgaattgtagacctatagaagtatatatactgtgtattatttatcaaaaacaaaaatatagttctgtttgataaatagaaactatacatagttgaagtaactattgcatgtgtatttgaaggtaactattgcatgtgtgtattgaaggtaagcacgttgaagtaattttgtcatgttcgaactcaaccaatgagtaggtaaataccacatgtatacatgtatgataaggaaatagtctttaccttaagttacatgcctctatgattcaaattgattgccaaaattattttaaaaccaaaatggcgaaagataaaccgattttggaagacgtagaaaaaaagataacgattcatatggacgattagttgctaacaaacttgcatacatccagtaattttttttttgtttggttttaaacaaaagaaactgataatcaacgttcataattgaaagccaaaacgtcttacaagttacaagtgatcataagtaggcgcaaggaatctcacgctcctacaaataatagcaggcctaaaattaaaataaaagaaaaaaagtttggaaaaagaaaaagaaaaaatccattgcagattggttcatagtcctgcatgattcactagggccaatcctaaaagcaactaactcatttcactttcacttatgattagatggtgatgatcatctgattttgcacatttccatgtgacccactttttgtatcttaaaaaattccaaaagggacctttagaataaaagagagggtccctacacaaacacatagtgaaggtgatctatttaagcacacccatattcattgttcaaacataaccaaatccatcatttctagttatctttctatcattttacattttgactatttgataaactatagtaattagctatggagttcaatggtaatttgaatgccggttcttgctctagatcaaaaaagagtcataggcaaaagcagcaacaaccgcagccacagccacaacaacatattgaagaaataaagtatgtaggagtgaggaggaggccatggggaagatatgcagctgagataagaaacccgacgacgaaagagaggtattggctaggtacttttgacacggccgaggaggctgcattggcttatgatagagccgcacggtccataagaggcttgactgctcgaaccaactttgtctactccgatatgcctcgtggctcctcagtaacttcctttgtgtctcctgatgaatcccaacgtttcatttccgagttattcaaccctccaagccaactagaagctactaacagcaacaataacaacaataacaatctctactcatcgaccaacaaccaaaaccagaactctattgagttctcatacaatgggtggcctcaggaggctgaatgtggttatcaatctataaccagtaatgctgagcattgtgatcatgagcttccacctcttcctcccagtacttgttttggagctgaactgaggattccggagacggatagctattggaatgttgcgcatgcaagcatagacacgtttgccttcgagcttgatggctttgtggatcaaaacagtcttggtcagagtggaacagaagggtttaattctttaccctccacattcttctaccaataacagtcatgagttgtccaagtttgtgtctttgttctttggtatttcttttgttatcactgtccttttcgcctttataatggagtggaatgagagatatcaagtgtctctctctcgcttgtagagtttatgtttctttgaaaatttatcaaatgttttgttattgtcgcttaccaaatgcaagactctcttgattagtacttgtaaactttgtgtaacgcatacgattgtgattgcttcaaaatctatttatttttcggtccatataccttttgatgatattgattttaaggtgtaactggctaactagcacgattaaggtttttcaattagataattagtatcggaggaaaataaaaaataccataaattaaaaagtaccacaatcttaagttttgctttaaacataccatcactaattgttatctcaatagcaccataaattattgtgtgaaagaaaatattggtttaccctaaacacaatataaacaatatacacaatcttgatttgtgactcatgatgtctatcatttgttactacttttgtgtcgaattc

SEQ ID NO: 1148 - DNA, 121720 bp, Arabidopsis thaliana
gaattccaaagcaagctatgtgaaacaagcatatgacaagtgtaacacacctgagcgatatgcatcctccctgatggttcaaaaccgtcgtagcaaaccggagcagccttcttagccagaagatccttcagctcatcatcatgtatgcattgctcaccaacacttctaactacattgtatcttttttcgacctccttacttattctgaatcaataaaagatctaatccggtaagctgacaagtgcaaatataaactggaagattcacaaataaagtatctatctttatttttctaaggtttctacctgacaagtgatgcaaaaagagggaaatcacaaaccaaatttcgatggtgaattggagaatacaaacttaaggacgtgcctttatcactgaaatcttatctaaaacatgcggaagaaactagacaagagatcaactaataatataacaccaatattggttacattcacttcttaaatcctaggcaataaaattgcaggggagatagagagaagaaacttactgtaatccggagggcaaagtagaagcctgagttggtgcgttgatggaaagagcctccatctctgacgatgaagctgtttctgaaaatcaaaacacacacaaaaaaaatgacttaattttgaaactttatgcagaaagaagtcagagtgaagtaacaccttatcctatattctatcatctcctctctctgtatctctctctatctatattgtttggtttccaagctcttggcttttttcttttacttacaaactcacacttgttctcattgtcaccaacacataatcggttatgcaaagttggtagctttagcatataattcgatctaagctttgagtattgagatcgatttcaatctagaaactgacattggctcctaaaattgagaactcctattgaaaaacctccaaatacaacctaacaaagacagaaatcgagctgacctctgagattggtttatcgtaggcgtttgtgttcactccgtgaaaagtctgaaccctgaagatagaagaaacagagaagaagaaaccctttagaggctttgactcagatttggaagaaaatgaaatcagaaccggtttaattcggttcactacaaaaatgggagaaagaaatgagagtagaaaacgtgcagaaacatgggacaaagttattgtataagacacatgacttggagctctcttatatgattttctgctacatttttgtcatccccaaacatctttattctggttccctttgttcatttccatatattcaaggctttctcgaagatcttgaagaaagttctatgtagttatttttaatatacttggtgtagagttagagttttatggaagttgaagctgaagctgaaggcgagcttgttagcgagattcaagaaccacatcagaagcatgcttcttgaggacaaagtcctgttttgtgatcaattgatttggttctagcttctaggagatgtatccattgagtataacaactccacattcggttgttttcaactaacatgtgtaatatattgaaacgtaatttttatgttctagttatcctctaaactcccaccagacaaaagtaccaaaggactaatcccataaaaactgaacaagaaaaatcgaatcctattctatgaactggataattaaaagaacccaagaccatttacaaatgtatttcctcttggtcttcttcctgtggcgagcaatgtggtagacatgatatgaacattttgaccttgtgggggtttgggattcgtgttgctgaaaaaacccaaagaagattgaaagaagtgactcaagacaacaagctcggtccattttccacagcggtacgagcttggccatggttattgtgcccgtgccgtgacatttggatgtcatgagatacgtgtgttctctttttcgcataaggagctcctcttgctgcaatattttcacagtgcaggctcataaaggtttgttttaaaagactaaatacaacttcctagtgacggaaatgaatgtttacctgcaatctgctgtgcccgaagaatattctgtcgtcgtttccaccatatcattgcacatgcaacgatcaataagaatgctagactaacaccgaatgcaatgccaatcttggctccagaagaaaggtgaggcccgcaagctggtagccccgggattccgcaaagacctgcattatctgtgaagctgcagagatagagaaaacagttacagggtagtgagtgctatttgccaaacatcattcttcacatgccaagtccaaatatttctttaaaaactttgtctctgattcaatcatcttacttgaagcttgctctgtgcaacagccttccacctacagccgctggtacttttccagacaaagagtttccgttgagattcctgtaatacaataaaaggtttcatgttgccgaccatgtgaactccactggccactgaaattgacatggagacaaacagaaagttgataatcttacagaatccgcagggatgttaactctcctaaggtttcagggatagatccattgaaggaattgtaggagaggtccctgcaaagatgcataaaaattcagtttcagggttcagaattgaaaagttaacacataaagtactcaattaataaacaaactgattacttacaatacttccaagctcgtaacgcttccaagcgatgcaggtattcctccacgaatgttgttttcactcaagtttctgaaatatggacaagatatggatcaagaagctttcactgtaagggggattacacaaatgagggaagaaaaactaatgacacacaagaaaaatggacacaatttcttcattagacaagtcattttcttggagaagataacaaaattgttcgtttacatacaatattcgtagacacttggataaacatttgcaggatgtgcataatgtattgacttacatgctctgaagatgttttagctttgatatatcgtttggtaggaaacctttcagaccttggttatcaagatcactgcaacgaaaaacaaagtttgtttattagaaaacctgataaaagaccagaaactcaaagagagatcctttgactctaagactctaactaatgagatgcctaagcaaaagaaagggttaatgaatctgttatttatgagtatacacaaaaagaagagaaacgagctatacagtccatcaatgaaccatctgctggtgttcttgtccaactgacaattagccccgctccatggatgttgtgggggaacacatggatcaccattccatccaaacctagaaggaagtcctaaagcttttttcattttctgtaacgcactgactgaaacagaaaacaacaagcaacattatgtacaattataataatctagtgatacagaaagcaatcaaccagcttagctattagaagaataaaccatgagtgacaagttttctccaacatcagaactgtattcctacttagattagcacaaatacgaataagatttacttgaatcacacattacatataaaccaaataccattctacaacagtagaaagacagctgacgacaagaggcacacatgtctcgttttcaagtaaccaaactttatatgaatctatgcaggaaaacgaagagcggtgaaaatacaacattaaaaagtgtccatgaaagaatgtgtaccttcatcccgtaatgttttaaactccgcggttatgatttcaaagacctcaatggcattgataatagcatgaccacctgccttgggttgtagaacgacagttaaggttcttccactcacagtcactgttgcattaagaacaagtgctgcataacgaccaccactcatctttatgatatccacatcttcaaagaaagtatctccatttatcacaacatcaaacaccctttttccttcagcagtgatagtattatcaatctctgcaaagtgcaaccatacagagtaatttctgttgggttccacatccaagctatacgttaaatcaggttggtcgtcagtactaaccaacgcagactgataaagtccttctggataaaaatttggtgaaactgaagccttcttaatagtttcctcagttgatctaggagaatcagcactcttaccaaaagatctcatacgattccaaaacctatcaccaccccaatgatcccctctataatcctcatcaaacctagacttcccagtaccacaagtcaacctagtggcagttcttaaaatcactccttgaccccaaccttcaccaaagctgtaagctttatcatcaacctgaagaatctcaatactcaaaatcgcaggatcgccatgaccagtactatgaaaacagatagtagcagtcccacccaaaagaaaaatgagagcttcagcgaaaacttgatcatcttgactactccaaccagatttaagagaagaaatctgagtgccttcaatagaaatgtcaaagagaggttctttatcaaaactaggttgatcaacaagtccaaagaagatcctgacagagtaatgacccttaggaactctgacaatgttgtagcaattgttaggtccttcagagattgggaaatatctaagagtcttcaaaggaggagttatgtaagtaggcgttgttgcattggcaggtacgcctcctgtatatgctatatccttgaaccaaagtgcgtaagttggtggtgttcgaacattcttcctagctccacaactaatcctcaaggcatatggagctaagcaaatcaagcgaatcaaagtcaaatgcaagtcaaaagatttcgaatcagaagaaactaaatctagaaaacgaacctggtcgagctagagaagagtagagactaaaagaggaaaggagaagagaagctaggataaatcgaagcatcattgattgatttttctagaaagaatctcaaattatgaagcttttttctgtatcttctctcacgaatctctcatatcgccattagagagcactaaaataactttatttggttcgtttttgtttgttttcctttcgtgtaagagtgaaagaagaagagagaggacgtgagtgcaggtaaataaatatcttattaaatgctcccaccgttctttttttttttaatttggatgaggaataatcaaatgttttgatgcgcacttaagttatcgtagtcaagctcaatgtcatttatctttaaccattggattgatgatcttataggctttggaaatgtcgaccacaaaatccatgtatgcgtatatcgaataagaaagctcaaatgagagaggtctcgttaaacttctagtaagggtataaaataaacttctagtcacgaaagtggttacaaatttgatgtagaacaagattaggaaaaaaggtcaaaacaatatctaatccttttagggtcttgttagtttgcttatttaggatatgcatccaaatagtttattcaaatgatccatctcattaatttatctgaatgatgttcgtttttatttttttggtatttatagtatttagttttttttttgtatttataacatttagtattttaaactgaatcacttccagttaactgttctgatcagaatcagccagatttcgatcatttttggatgagtttattaaaattcatttaactgatttatctcattgctctattaagttggttaaaacgaacatcaatattcaaatccattcagataaatgatcttaatggagaaacgaacatcaactaggtaaacaaatatttgtatttgtatatgattgtgataggttttaccgtaagtcatagttgaaaaacttagatttaacttttgtttcaattgacaaaaataatttaatgtatgtataatgactgaaaaatgtactgatttacggattgtggatttgatacaaaaaaaaaaactacaaaactgattttgcggaattgtggagtcggtggagtagtttttgtagtttttgcaatcaattagttgttagaacaataaatcagtgctttagtgattaattaaatattactagttgctaaaaacggttttgtttgtaaattaataacgataaatgttggtgggaacgaacgacaatgaaaacgtcccgtgacgaacattcccggtctcgtggtcaccagaaatgctagttgtcattcaaaaagacagaataccctttatttatcggacggctgagaatggtcgtaatctatatagctttgactttgttgacttttgtaaccattgattgatgcgcaatctttggtaaacacatcaaaagcatttccccactcgagtcgttgaaccaaaataagaagtcgttggctataaatctctctattacatataaaattctctactacaaagtctacaattgaaaccatttgtaaaagttttttttttgttttttttttcataaatatgaaattatagtttatcatcagacactacaaattgctctatcgtctccatcctccacaacatctatcattgatttaaattgctagtattattaggagatatctaacaagatttccactaatagtaacaaagagcgaaattgtagactaaagatacacaagtgccataacgcaacttatgaagagtttgcgagatcgtcttttcttcctgctgcaaaggtgtgatatgtttttcttattggttttactgttctatgtctaaccttgttgttgtcattgtattcaatagtatttactcaaaactcaaaacttcctaatctttacataaacatgtaaataactaaaactcgaatagaagattagttaaactatttaggtattattcaatcaacaaaataatgtaacaacaaatgggctattgtgaatataataatacttgggcttggtgatgcgcatggatagtttggccttcatcatttaaagcattagctttctaagtcaacgggtagcttcaagagtgtaagcctaactatctttgatcacacgatgtggaagactccatccttcttttatcttttcttgatgctccaacgatatcttatattagttttgacttttgtaaagaggggaatgtgtatctatgggtaaaagtaaaactgtaaaagagtcatgtaacggctagatctagcggcccatgtgttgctgatatcgctagcttttcccatggttttgcacatttgtgaatgatgatgatatagctttttctggtgtaaggaagaatcttcatcttttctttcttctcacgttaactctttgaatatgtggaaacgagatgttgatataaggtccgtttagttgtttatgcattatacctcatatccaaactttaattagatgaaagattaaaaaaaattacgatatataaacgcaaattaccaaaatttattctttactagaatttggtaagaattcactagtacaaaccgtcagaccataaattccgaacatatggtttattatattacaatacaacacttattataaatatggtttgatttttactgtaaatacaaaaaagttaaaaaggcatggaggtaaaatgtatgtgcactccttaggtgttttaaattttaacaaggataattgcagaaacaaaacaacgagtcttttttgtcgtgtggcctgtctcctggacggcaatcaccataccctttatacttccgtgcacaattagcttcacatcttaggaaagaacacgtattatttttattaaacatacgcgaaagacacggtacttttccttggactcctattcctgtaatatatcaaacataaaatatgagtttcaatattcaaattataagattgttatgataaaatatagtttatttatttgttgatccattgattattcttgagaaaatatatataggaactaaaaaataattattatatacatgtagtttgaaaactacataggatacctttgaaaaatcatggtatttgtaatattttccatttagaacaaatatatggattatattaaaacgagtttaaatgtaaaaacaaacctaacacaagaatggagaagataagtagaacggctaccgagacttgagagacatttttcatcttaaaatagataaacgaggatgatttttgaagattacaaagaaacgaaaacatgtatttatatatgtaaagttaaagttacatgtatcacacattcaaatatgtctaatttaagtaataaagtaccgatttaaaaggatcatgttttacacaattccggatatgtaatattgaaggaaaaatctaaaataggtttctaattaaagatatatatttattccaaaaatggaagtcaaaatcaaaaaataatttaacatatatcatttagctatgtaatttaatagaatttgggttgtacataactacatatgttcaagtatgaagaaatagatataaaatcaagcatgaaagacaacacaaatgttaaatgagcaaaaccaagaaggcaagaacaaatatagggccttcgtggaaaccttttgtgcgacatatggaaacccattaggctagcgatgtagttggcccaagaaaccggctttgactcagaagatatagttattgattttcggcttcgtcaatcaacaacactgtaattgtaatgacaatagttggtgccgacaaaaaataataatgacaatagttgggcttaggtttataagttcatttttctaaaagttaattggtgaaaatcaattgcaaacaatatattactctcttttcttagtagtcttctatataagattctgtttgatcatgagataaaaataaaaataaatactctttttaatctgtgggtaaaaggtaaaagagacatgttatggttggatctgacggcccacgtgtcgctcgcactccgatctcttttcacttttggtcccagtaaggctgtccgtatggagacatcttcccatgcctttggacatttgtgaaaacaagatattattattagaacaactgaacaagatattgcaagtgttacttttatttaatttcactgtggtaagataaaatttgaaaatttacttgttgctctgatcttgatgcaagtaacctcaagttttgcccattcttggagaatgtaaatataacttcgatccccaaaatgtgcctcctgtcatgttggaataactggtcagattttcaaaaggtgaccatttgtctgtccataatcatcaatcccttatattctattccacttcttaaagtttttgttctattgttaaaacgagttggtttggtttggatcatttgaaatgaatgggtgaatgcatgaattctaagagtttgtcatgatacttaggcttcacataaaattctacatatggttaagaagaaattaggtattctgaatttgacgatatttcaataattaccaatttgttaccttgtgataatttcacgaagctcgaggctagaatactttattttataggtcccacttcaatgactcatcatccttatctagatttgtgtcacattccatctagcacttttttttatttgcacaccctccccactccttttcttttgtgatcctaaaattaagttcaaaaattattttaattttggaatcttcagattataagaagaaaaaaaacattgaatcttacataaatacttaagtagatttgggattaccggattagtagtgacaaaattaactaagaaatattattcaataataaaacaaccagtaaaataaagtcaccaaactttttaaatggcgtggccggtagtgaaaaaacaagaaaaaaattaataatgtaaataaaaatcaagatattttgataaggtgtctataaaagtcatatgccaccaccaaaagtgtttcactgtctacaaaatcattgaagatctacccaaaaaaaaaaaaaaagagatggttctgctagagaagctttgggatgatgttgtggctggacctcagcctgaccgtggccttggccgcctccgtaagatcaccacccaacccattaatatccgaggtaactatctatattttgactcaaaacactttagctcaagcaaaaactagacttaaatctaataattagtgtgttttgtgaatatggaaagatataggagaagggagcagcagtaaggtggtgatgcataggtcgttgaccatgccggcggcagtgagccctggaactccaacgactccaaccactccgacgacgccacgtaaggataacgtgtggaggagcgtctttaatccgggaagcaacctcgccactagagccatcggctccaacatctttgataaacccacccatccaaattctccctccgtctacgactggtaactacaatttttctgttattttatttcatatagtacatgattataacatagtcttagactcttagatgttgtagtatagagagaaacaagttatttgatcgacttaacctttaagatttatgacttatgaaacaaagaaccggattattctacgaacggataggttggtttagtccggttattgatttttgttaacaattatcgaatattttggtatgtgtcagcgttgataatgaagctcaaaggaaggaacatgtggcactgtgtttagtgggcgcgtggattaagtgaatagttttattctgatttgaccaaatcaaccttcctttttgtgcatatggtataatatcattaactctttaaccttcatggccaaagttttagagtgctaatcacagccgttgtttttttcttctgagtattgagatttgagattgttgatcggatggttcagatcacgagttgttggttcactaattgaccgcacgtggggtgtttgcaggttgtacagcggtgactcaaggagtcagcaccgttagggatggtccgatggagtgtgacatgcgggtgatgtaaatatggtgacctgatcttccgccaccttactttgttttttttatattgtttttgtgtactttatcagagtggataaagtgacggggaatgtttttcttttgtacaaaaaactgtcttcccacctaagcaatgtgtgttagtttctgttttgggctgtgttttgcaagtttttgtatttcagagttgtgtagtgtagttgcaagtggcggttggatctttcactatcttgttggattttgatgatggttgatgcttttgctttaatgttaaataaataagcatacttttgctaggtaccattgcatcagttcacatttcctagttttcttgtacaatatcgtatgaagaattcttgcggagcttgagtgacgtgcgttgttgagacttgagagttgagacaattgttttgttatagccatgttcaatttttttcttattaagctaatgctaataatttaatctcgaagacttagaaaaacagatggagctacatgttgagtttgatcgatagaggtctttggttctatatatggatcctagcttaaaaactacgtaactcagaaagagtaatcacgatgaacacgatctagtgtgtattactactaatcaaagattttagcagaaaaagaatcttagaaaataatttcttaaaattaaaaagctctttaaaaactcttaatactattataggaaaatttggaaaaacagaaaaatggaagtaggtctatcctaaaatgtaaagcttgcatacttgttcagtactgatgcgaaaagtttgttaaatccttgaaaaacctaaagaacaaacacatttgtcgaagaaatagtcaaataaagagagaaatttaagttctacaatgaaaaaatatgaaacaatccagtctcgataaaataccaaagtgttcattttatagtcgataaaaatatttgaaaaataaagtctgggtggtttcttattggtaaatggtttgatgtctccacctccaccaccaaatttgttgctcccactcttgattatcttaaggtgtcttcatatatccaataatctgtagcaaaaacagtattcctagtaagaaaaatatactatattgtaacttcgatatataaaagggttcaagaagatcaaaagactcaccacatatccattgttgaagttatacattctcaatccaccaacactgtcttccttgttcacaatctctactctgtctctgtggggatcaatcattgtcaactctgccaccaactctttaaccacatacatctcaatcttttcagcttgtgcctcaacgtaaggagcaacgtacatctgtattatggaaaagttttaattagactcatgaaatcgataagcatgcattgtttttgttttggattaggttaaaattaaacatacctcacataatgacttcaatgtcacgttaggtttgcagctgacttgaggattctgcaaatttggtatcactgacgcatccattgaaacaagcaagacttgaatgtccatctgcatcatggaaacaacaccgatcaaaatggaaaaactatgaactaatgtttcacaatatagacagttttttacctcatcttgagtatttttgtgttgtccaacatgattttcgagtatgtgtcttttccatgtgcccttacgcatgctgcgtttcccacgttttccccattgcagactcaccaaggacattaagttggtctccatgaattcttcttcagtgccactttcatcactatcatccgtgctttcaggcccaaaaatttcaagcattaaacgatctttttctctgttacgaatggtagtttcattttcaaatgggtaagatagactatctccatcaccagaagaagaagtaagtcctctaactttgactttcttggaaccaccagaccaaccttcatcatcatcaacatgctttcgaacctttctcattcctttaaaaggaataggtcgaaagatgcactgacctgtagggtctcttcgaattacaaaattggttgacatgcgtttgccgctatctactttagcttgtctcttcaatgtttgcatataactggcttggccctgtttgaaaaaagaagaagtcatgtttcgattaagtgaatagaggaacactaatcaaaatcatttataaaaagctaagagactttggaagctaaacataatatttttaataaccaaaccaacctgctgaatattaatctgttctgtttcactgagtattagctcctgcggcaacataaaagcaaaaataaataaatcagatttggtctatcttgtaatgacgagaattaagaacactcaaagattaagaataactctcttattaaactctagaaaactaactcaaaaacgaaaactctctttagtctctcaaatctctcacaaaactcataagagatatcacaccttgatatctccttatataagaaaactcttgaccaaatccaaaatcaactaggaatgtatttagataactcctaaacacatcttagataactcctaaagatgagctaagctctatcccttcacacacatcttgaacaccaatgagatctctcatctctttaaacttcattcttacaagggcctttgttaagatgtctgccctttgctcaattcccagaacatgttcgacttctatttgttcattctcgacacgctctcttatgaagtgataccgcctatggatgtgtttgccctcgccatgaaatacagggttcttcgtgagagatatcgctgatttattgtcaatccgtataacaactcttttgcttggtaacccggtgacttcactgagcaaatcttggagccaaattgcttatcttgccgtttcaatgcctgccatgaattcagcctcacatgatgacattgccacaatatcttgcttttgtgagaaccaagagattggactttaatagcaaaaaaagatatgaccagatgtgcttcttccatcgtccggactccagatcaacgttatgactattgtcgctatagcctactaactttggtatcttagacaccgagtgtttaaataccaaaccaaggttagtggttccttaaagataccttaagcagtgcctcatagccgctccatgtgattctcttggactttgcatataacgactcattactcccacagagtaagataggtccggcctactatgtagaagatagcgcagacaaccaacctttttcctgaatcccgtagcatcaatttctttctcattctcggattttgctagttgtactacggactccctcgatgtatgaatcagactgcaactcaccattgcagtctcttctaatatcttcatctcataacgactttgattcaaccttatttcttcttttcgttgaaacacttcaattccgagataataagttaatttcccaaggttgctcatgttgaaatttgaagtcatctctcctttgaactcatcaataatggttgtatttgttcctgtaacaaataagtcatccacgtaaactgctacaagaagaaactcaccacttatagttttccgataaaccgacggttcctttgaacatttttcaaactgtagctcttgaaggatctggttcagcttgttatttcacggccttggtgcttttcttaagcaatacaaagctttatggagcttgtaaacttttccttcttctcccttttctacaaaatcttctggtcgcgtgacataaacagtttcctttaactctccatgtaagaaagctgttttaacatcaagttgtatctcccaatcatttgaagcctcaaggtcgacaagaattattttctcaatacaagctactggaacaaagacttcatagaaatcagtcccataacgttgcacgtaacccttagcaacaagtcgagctttgtatttattgatacttacatcagaatttcgtttgagtttgaatacccattttaaaccaatcggctttattccaaatggaagatctacaagactccgagtctcgttcttctttatcgaatagatttcgtcttcacatgctaacatccaatccctcgagtccattgcttcaccaaaatttcttggtccattatttagacataacaatagtctttcaccttcctcctcggcaagaagaatataatcttcaaggtattttagcttattgatttgtctctctatccttcacaattgtacttggccgtgagcacttgagctttctgttcccgcttcttgagttcccgtacatgtgttagtgttctccaagctattactagtctcaaagtcattaccaatttcattaacatcctcatcctcatgttatccttctttggtttgctcgttctcgacttcttctcttgtttcttggattccacggttgccatattctccgaacgcaaagctgaaaccttcatcttgttcttgttccgaattaatatggtgccaattccaccgttttgtttcatcaaatacaacgtccctacgtacgactatcttccttacttgtggattaagtaatcggtatgcctttgatcccggttccgttcctaagtgaaccaacatacgcaatatgtcatctaaattttttaggagtggtttctctacctttgcatatccaatgcatcaaaaaatccgtaggtggttgatgtttggtttcttagctcgaaaaacttcatatggggttttgtcctttagcgctctagtggctatcctattgagaagatatttcgaatgttggattgcttctccccataggtagtttggtacatgcatgtgtttcataatgcttctcgccatttccatcaaggttatattatgcctttcaacaacaccgttttgttgtggtgtgtaaggagcaatgatatgcctttttatgccatatgagttacaaaacgagttaaactcttgagatacaaactctcctcccctatccgttctaaaagtttgtatctttaagcctaattcttgttctactagactcatgaatttggcaaaagcatcgctcttttcttttagaagaatcgtctacatgtacctagagcaatcatcaataagaacgaatacatacctattcccggctagtgtcgttggagttatggggccacaaaggtctccatgaatgagttcaagtaccttggtttctcggtaaaaggtggcttgtgggaatacttgtcttgtttgcttcccgagtaaacaagattcgcaaatctccctttcaaaggtaaaacttggaactccttgcacaagctctctccggatcatggacttcatcgtttcaaaatttatatgcccgaatctcgagtgccatctattcttctcgcttacagttgttagttgtaggtatgcattgcttcttattctcatgtggactttgtatagttgattgcttgatctattggccttaacaatcaatctcacatcagtatcatgcattgttaagcacttttctttcattcgtatatcacatccggattatgtggcttgaccaaggctaataatgttgcttttccaatcagggatgaaataaacatcggtcattagccttggttctccattcatgtcaacaaaagagatcgaccccttccctttgatgtcaatgcgagagtcatccccaaatcttacctttctcgtaatagagtcatctaaaacagaaaatatctcttatgtccggtcatgtgattgctagccccgttatcaagatagcaagtatactcctcacccgtgtttgtctcgtattcacttggtatacaatgtttctcatttaagaagacaacctcatacatcaaaagatcatcaactgtttgagtcttgtctcgtatctctctttggtctctcaaatctctcacaaaactcataaaagatatcacacattgatatctccttatataagaaaactcttgactaaatccaaaaccaactaggaatgtatttagataactcctaaagatcctaagctttatctcttttcttaaataataacttattacttaagttagctttgagcttaaaccaacagtctaatgataagtaatatcatcaaggaaaaacaatgatggttacctctttttggtacttgtcatcacccggatacagaaatgcaatgaatgcatcaacaagtttatcatctttgagagagtgatgattgggaaagcagatacaacaagaagggcattgaaggtctcttcaaaaacaaaacaaaaaaagaactagaagggtgagcacaaaatattttcaacttataaatcaaaagtgagtgaaagtagcaacatgtttgttaagaaatagtcacatacgtattgttcatggatgtttcaatgcattctttacagaaacggtgcatgcattccacacaaacttgagcttcgcgaacaatacctgaagaaatcccaataattggtataaacatgtcagtgtaaaatattttccttttgatagaataactctcaaaatgcctttttaacgaaacagaaacaaactctcaaaatgccatcaaaataatattaaatactatgattgaatattaacatatgattaattatatacaagcatgtcagtgtaaaaactctcgtgggttgttgaaggtaaataaatgttgtacccgcaacagagcggagaattgatgtgatcgatgaatgcgatcgtcaaaaaaaaattcaaaaaaaggtagactctacataaagagaaggaaaacatggctccaaacaaaatttttgttttttttaatacatgaatggctttaagaaaaaaacagtaacacatgcatgtacatgaattagatcttttgtttcttagctctagagataaaagtatctcccattaaatatattttatattaagaaaaagatttttgttacttgacattagctaaattttaaattttattaaagccggtcaaggaggcttacatatgcctgatttagatatgtataccacaaacaaatacatgaaaaagttaattattaagatacctagacaaattggacattccacttccttgcgaatttcggaatcctgagaagtccatgatcctgagaagttcaccatgacaaatctacaagcacaaaaaatgcaagaattaggtaagttgtagcatataatcattattgtaaagctctactagtaccaaagaatcaaacaaaaaatacaagggcactgtaaattcagaactgaattttactttctactagtgatatatcaaaactagcaagtctgtatctacctggaaattatcttagttttcatttgtttactattgttccgagtattgtagatttaatatggagggaggataatttcaggtccgtacgatcaaagcgaattcttgtagaatttttttttcttgctttgaataaaaacgggagacagagtctcccgcccagttaccaaagaaaaaaagtctcccgcccagttactaaagaaaaaaaatcaagcaaacataataaatgtgaagaatcgagcccaaaatctaaagacttcatccataattgacatatccaaaccaaattcaagcagccaaaatataaaaaacaaaaagtgacacacatttacacaatatgcacattcattatgttcaaactaaaattttaaagtgcacggtaaattacatgtagatctgttaaaacatcgatgtcaatcacaaagaggaacacaaaatatacgataggaaatcacaaaagaaaaaaacaattggcttactcctaaatttctgtctcctcgcttgatggtgagttccgattggtatctgataaaaaaaaaattagaaagaaactaaaatgaaataaaggaatagcttttatttgaaagaattttgtttaactcttaaattattttttccttgttgaaataaagtcaaaagaaagaattaattatatacctttttattattatcccaattaatgttattacgtgtttcgttttgcaccatatatttttttaaaatatgttaaaatagcatatcaaattttttacttaataatatttaagatgtgtttgaatagctaatatatggtataaaaatatacaaaaaaacgaatcattgcatgcatagcctaccctgaaatttggggcctaaatacgttttaagagttttatagaaagttataaaattggaggcctttttacaaaagtaaaataaaattggggacatattttataaacaaaaaacgtcagaaattttggatcaattatgggatcggcacaattaagtgatggacattataagataaaggcttttttaatagcttatgggattgagtacttatactgaattctcaagactgttttaccctcttcttcagaaaagctaaaacaagatccttcaaaccaattaaacaataagacatcatgtctttttttttttttgaacaaagagatcatgtctctcatatacactaacaaaaggaaatccaaaacccagaattcgaaacatacacaaccaatgaagaagaacaacccgtgattgttatcgttcaaagaacgccataaacatttcaatctatcattttttttcttttttccccaaaaccaggccaaaggtttcatgaatttgatttccaaactccaatttgagatttgaaagttgcagtttgaaggccaaatcgacccgcctttgaaattgatttcccctttcaagatcatgtgttacgaaccgcgacgacgatggtaagcttcatcgacactaacaattagattcggtttcgaattatagatgaattaaagattaattgattcgatctgcatctaaaattagaatatttgggttccctaaatgttatcctcttagggtttagattccttgcattaacaatcgtttaattagttccatagagttcatcagaggaggttgatgaaagaattgtattgtgagtcgtcggaagtgaaggaaacgatattgatggagttgaaagtggtgattttgaaggagtgtggagtttaaaaacagaagaagacaaagtgatatttcatcaacaaattgaggagaagattgtcatttcacaaacaaaaaaaattccctttttataagcccaactaaaatgtgtctattttagagtttctggcccaaaatatgcttatatctataaaagcccccaaaaattttaggggccataacaaatgcttcatctggttatgctcatgaccggtcctgtttacatgctatgtaatatatgaactagtgtgcacgttgacggacttccctaagtatcgatacactttttccaagtcatacataatagagaacactggaaaacaagttagctcatacaacaaaccgaagtttgtaagtatttcatgataagtttaccataatttttctccgacgatctaagctctatcttctttttgggatgggcgatcgaacctcggtggctaatactactcgaatccaggtggtggagacttttctctcttgtactaccggacttggtttcaaagagtttttttttttttcaaacatgtactgatataaagtttctcaaaaaccaatattagattaagaaaatttattcatgtagcttacaagagaaaaaaaatatactgcaaaaatatgaaacactaatcaaaacaaaaggtataataattgtagttgaactgaaatatttttaatagtggtaaccaaacgagttctgaaagaaattgaagaccgaaccatatcacattatcacctaattaccgtttggttcggagaaccgaaccgaacccacccgaagacttcaattgcccaatcctagccaaaccgtagccgccatttccgtgaatgttgtgattagcttattattatcttcgttgcccaaaaacttaaaagatccaaacttcgaacaattttggtgtctgctatacagaatccaaatccaccttctccgattaaaaatcccttctctttcgatcatggatgtgtctaaagttgtcagcttttcccggaatttcgccgtcttggtcaaagtcgaaggccctgtaagccctgatctctctttacccaattcttgttttgagattctatccataaatttatctactttacacatgatcgagtacaaagtgttaatcatacttggtttcaattttaggatccaaagggattgaagatgaggaagcatgcttttcatcaataccagtgagcacaagatgactttttttacatgtattatatgctttagttttgtttctatcatggaacttaatgtggctgtaattttgttattgaagttctggcaatgcaacactttcagcttctgggatcttgcttccaagagatatttttttgagtggtgaggtcgctgctaaggttctgtttgaagctggtcaggacatggccctggttttgaccgttgcatctgttgttgagccattcttaacattaggtcacagaactagtagtagtatctctcaggttagatacacatgctccacttcaatatcaatgatacatgtttttgcttgatgtgctacttcttcaatcttgatgtctgttttttttttgtaaaggatccggtgaagcttattccgggtgctatgattgagattatggtggaggtatacagatagtgtttatgaatagtttatgttgaatggtaagttgtttggagtttttaaggtgtgatctagatgcgtattcttttcagggtcagctaaagtcagaaaaggaagctcctttttgggttcctgcgcaacttctttcgctggtacggatgcaattcctcttctttcttgctattagaagtgactgttgatacctccctgtggtgatgatttatgaagccactaaattgagtttacaagatgtgtgatatgcacttcttatggcatatgttgtagctccctttttatggcatataaaattctgttcgctgctgatttttaactaatatgttacaaggttgatgtccctgtatcttctgctgcacttcaatctcttattgaagcttcttctggttcgaaagattctggatgggatattggttggtctttggtttctgctgctaatggttctcagccttcaatcaatgtaagtcaaatgcaaacctgtaatactctttgatggtctttggtttgaactcctacctgaaattgcttgagtagttgatgcgtgtttgtatttccttctttgaaatgaaagatatctgtctatttctgagattaagtatcatttttctagattgaacattacagcaagcccttgatgcaacttgatgagccacacaacgctaacttcatggccaagtctgccactcgaatggctattctaggagtccccttaagtttactggtaaatatttccctgattttcctccccgtttccttctttctgatttatggttcatctttgtgacgcaaatattttgtaaatcagggtcaaccaagcatgaattttgcttcatcaagtagcaagggtgatacacttgtagcactaggctctccctttggaatcctttcacctgttaacttttttaacaggtgaattatggctacactagcgttactgtattttaatcgactagaggtcatcatgatttcctttctcttgatagtgtcagcatttaactccgggaatctaaactggtttgaaacagcgtatcaactggttccattgcgaatagctatccttctggatccctaaagaagtcactgatgatagctgatgttcgatgtctccctggtatgtacgattatcaatagttcttatatatgctctatttgtttcatcttaagagctaaaacatgttccgttccggttcaatttctttcaggaatggaaggggctccggtgtttgctaagaatgggcacttaattggcattttgattagaccactaaggcaaaagaatagcggcgttgaaattcaggtttgtcaacggcagcctcatttcctttatgtccattgaagttttattgtaatgtttcatgcaaaactgtagccttcggtagcagctggtggttccatggggagcaatcacaactgcttgcagccacttgctgcttgaggaaccatctgtagaaggaaaagcaagtcagtgggggagcgaagtcctaagtgttaaatcagatgctagtattcctgcacaagtggctattgagaaggcgatggaatcagtttgtcttattacggtcaatgatggtgtttgggcttctggtattattcttaacgaacatggtctcatactaacaaatgctcacctgcttgagccgtggaggtatggaaaaggtggtgtatatggtgaaggatttaaaccctatgtcttaggagccgaggaattttcttccacgggaagtaaattttgggaacagaagagtcaaacattgccacggaaagctccacgaaatcattattcgtctgttggagagaacatcagggaatacaaacacaatttccttcagactgggcatagagacatacgtgtgcgtttgtgtcacctagattcttggacttggtgtcctgcaaacgtggtctatatttgcaaggaacaattagatattgccttactgcagctagaatatgtccctggaaagctccaacctattactgccaatttttcttctcctcctttgggtacaacagcgcatgttgttggacatggactcttcggaccaagatgtggtaaagactccgttaatcctagaattgtcttgttgaatcagatttttgctcaattcttgcttatgttgtgcttccataatcttgcatagatttctttgcacaccctgaaattacattctcttgtgccttacatgtgccaagtgtccttaaatggaagaaataaatgatcctctctattcttctgtgtttgttattagggctttctccttctatttgttctggagttgtagcaaaggtagttcacgcaaagaggagattgaatacgcaatccatttctcaagaagtcgcagagttccccgctatgctcgaaacaacagctgctgtgcatcctggtggcagtggtggtgctgttctcaattcaagtggccatatgattggacttgttaccaggtaaccgaaaatcattctcaaatacaatacgtaggtcttttagatccattgatgagatgtgtcattagaaacggacagttcttctttaatcatgatgatatgtagttgattgttcattgctatgttttctgtatctgcagcaacgcaagacatggagcggggactgttataccgcatctcaacttcagcatcccatgtgcagtcttggcaccaatcttcaagtttgcagaaggtttgtctaatcttgttggtttgtttcacttatggaagcagaatagagagtagatgtgtcaaaaagtgtttgcttattattgttcccgtcttaaaacagatatgcagaacacaacgatccttcaaacacttgatcaacctagcgaagaactctcatccatttgggctttgatgccatcactatcaccaaagactgagcagtctctacccaatctgcctaagttactcaaagatggtaataacaaacaaacgaaaggatctcagtttgccaagttcattgcagagacccaagacatgtttgtaaagccgaccaagctttcccgtgatgtgatccctagcaagttatgacaagattggcttctttgcagaatttgtgccttcttttactccttttgctggagtggcaactttaacttttgtatagatagagaaattacaaaatgttgctgctgtttctggattattctgtttgtaacatatataaaaccttataatacgttttggcaactctgtttatcagtcttcaaactgtggttctgtttttctttggtagcctttttacctctcgtctcctcatatgagagcagctagtgtttctacacattatatgtcgtccattgttcatgccatatctcagtgattgcaggcaaataccaagcactaataccttatggagtaacatgttcgtagatcatacaaattttcatgatatacgaattttactggcttttttttgtgatagtccacattcttgtatacgtattttgttttgaagatattgcgttgtttgaatatatttgggcaacttcgtgttatttgaaactatgtataaaaagtttcgtcactttttttgtatatattaaagataatatccttgctagtttaatctgataaccttatgtaaaactattctcaacaacatcattctcttctttgtcttgtattcgcaaggtcttggataaaaacaaaacaaaacattctttttctttttttggtataataactggatatgcttactttaatattgattgtgatgcaaaggaatcgaaatcaactgccaatcaaactgtgagaacactatcgaccaaaacaacaaaatatgaaaagaaaaacacattaaccttctttggcaaaagcaagtatttccaagaaaaagagtaatctggagaaggcaaagtaacatcgaaattcgagaaaatagaacgaaattcagaggaacaaacaaaaaaaacaaattaacaataatctgacaaaaatgaaataaagaagagaatttttacagtaattaattagagaatagaactttaggggagaagagaaaatcccttggagttatacaaaattcgttagtttccctatgctaatgcttttgcttttctttctcccaatctgcctcccacatgcatcatcgtaactatatattgacacatacgtacataaatatatatatgccctaattaaaagtatttgtgtacactctctttttttttgtgtggataaagtgtagactctttttagaaaaatgagtaatgacttatctaagaagttctttggagatttttatttggtgaatatgagtttttggtgatctcgttagacattattaccaagaaagaggaggattagaagaaagacatgtatattaaggaataagtaagtacatatgtaaaagtccatctagtcgggacatctatatatacatttttgcagccattttatgaaataaatcctggagttggaacttatttacaatggctgccactggcttttaattatttatttttttctgcaataaattaattaacaaataaaaaacattccaaatatatttcaatctcatatatcacgcaaatttctccaaaatttgaattagatttcggttagcaaaacacacctaaatacatttatgttagtgttgtcagggcattacttaacatagtttatggctctacatatttggtaataatcgtttttggttaatattttcgaaattaaattcaaatttggtaaatataatttccgaaattaaattcaaagtaatagtttcaatggcataacattgtaaataatctcaactccaggatttatttgttaaaagggttgcaaaaatgtatatatagaacaatatacatttttgtataatgatttaggttagcaaaacacacctaaatacaattatgttagtgatgtgaaccaaaatacaattgcaatcccttaaaatgagcaaaacacacctaaatacattttttatcaattcactaaacttatttctccaaaatttgaactagatttcgacaattatttaaaacaaaaatttgtttgacaaactaaaatacaattgcaatcccgtaaaacatttattttcattatatatttaaattagcggtgtattgcgggttttttttacgggatgggtttggcggaacgggtttggaaggacgttacttaataacaacagtaaactataaaataaaaataatttatagataaatataatttgcaaacttttatatatactgatttaaaaaaaaaaattgtttcgcggtataccgcgggttaaaatctagtgtatattaaggagagaacgaatgagcttttgtgcggttcatgcaaaaaaattagcggttcatgtacattttcttttatttttgtgcaaagtacattttattttctaaaactagaataattgaatattttcttcaatcctcccaagaaaaaaaaaatattatatatatggtcgtacataacaatattttttatgaagtttttgcaacttctaattgtttttgtaacgctaatctttggctaaatgattatggtttatggttatctcatgataaatcaattgaaataaataatttttgctgtagtatagtttaaatgctattaaaaaaaatatatgaaaatatgtagtaagatgtgatatgttttagtttctatacatagtcctaagatctaattatattattttattaaaaagtaaagaaaagcaaagataatgtaaggaaagagacgatggagaataaagtaaagattggaaatgtgaacccatttggggttggcagtgagtgagatggaacatcacatgcacttatgctctattttgtcactttcctcttggagctttcacttctcaaaaaccttcttctcatttgtttttcttgcaactctaatctaaccccatttcttattaattcttaaagattctcattgtttttttcctatttcatgacttagtaatgatgtgataatttgatctaccatgcatatagtctcaattataattagacaatattggctatttcagaatatatcgcatgacttttccaagaccgtcgtagtcacataaacgcgatttgattttgtgacgtcaatcaatatgaagtaactactatacaataacctttgaatttaaactcaaatatttaatttacaaaagaacattatttgtttacttcttattatattgtgctttgctatcattcttgccttggatgtataaattatctatatctctaaacattctccagcttgctaaaatattgtaagaaatctcttgaattattactaacatcttaaaagttgcaactagtattattttagggggagtagtacgatataatattcaaaccgacgcgtataaactatatatagtgagcttattagcttgtatgatagatatgtgtatataatatgattgttggaatgtatataaattaaaatataagagttggaagtgggattgatatatagggtgatgtgggtctagggattcactccaattccacaatatgcaaaagaatgtcacttatcgtgatgagtgatgttcctcgatccctctgaaagattcacctgttacattctcctttattgtctccatctttttttcttacattttcgatatatatatatacactttagtttaatgtaagttattcgattagggatctagatttagtttaagatacgattacttaggtgtcgaattaactcgcattgttaagctaaaatcagggctagtaataagacaaaacttacgtaaaattatgaaatagttactacatgctttgattcccacaagcatgtaaacttacaacttattcctttatttttttattcttatttcatcagcttacaatcaattaatcggacaacaaattagcatcgtcaaactacgtcaagtaatttggacttgttttgttgccctaaatttaaatgtttctttgtaaaactatttaattttctgtaaattaatattttattagctatatgcctatgctgaaagaaattcattattgaggcttttatatttttaaacttataatcaatatgctttgatggacattgtttatttatttgtgcttctcaatttagcgtggtacgaacaagtaataggatatacttagggcgtcgaatgggactgttatcaaagtagttactggattatttgagaaaaaaagaaaaaatttcttgaaataaactaattaatcctacatatctctagcttaattcaaaatgtgcatgtggccgattttttttggggaaaaatatcaaaaaaagcctgaactttcaaatttggaatgaaaaaaacatgaactttgtaaatgtcgtattaatcatgaagttttagttgatttctcaaaaaaatagctaagttttgttgaccgagccgttaaaggcttgccgttaaattttcgttaacagaataataacagagttatcactccgttagaaatttaaaacgacgtcgttttaaattttaaaattaaacagaaaaaatgaaccttgccaagattcgaaccgctaccatgagaaactcattacgagattataaaccattgacccacaattacattttgtcaaagtgacaaacactaatgtatatatatactcaacaattcgtattttcattcatctcctctatccctagaatcggagttctctccgtaaacaggattccatcggcgttttggtttcgttccattagatagatatcggagtgagcgatttttgttttattgatctttgttatggtttgagcattaaccagctcttaggtatcaaaactgtaattttgttcatcttctcaaacctttttaataatttggtttcaaaattgagggaattgagaaaaaatacatatagatccattaaatcacaatctaaagctcatgttcgacgaagataacacatatttgaatcgcaaatctcacaatcaacataaaaattgaaatgcgattgggttttgtgaacttgagaaaaatacagagctatggcacgcaacaatagagttttgttagtttctgttaattatgtaatattaaatataaacttttgttatttgatacgaagatgttattgtgtctaaatggtttggatgcttgtaaaagtattctcatgtctcatgtttgagctcaggtggtagtcattttttctgtttaattttaaattttaaaacgacgtcgttttgggtttctaacgaaatgataactctgttattattctgttaacggaaatttaacggcatgcctttaacgggtcagtcaacgaaagttagctattttttgagaagtcaaccaaaacttcataattaatatgacattttcaaagttcatgccttttccatcccaaatttgaaagtttaggcttttttttgacatttttagactttagacctattatctaaataccgatggtaaaacatgagtccggaaaatgtgatgtgacatatttaaacatttaataacctaatttgcttgcttgcgtactcttttttgtcgttaagaaatgttttcattctttaaaactgttttgttggatcgtacaacaaactatctatatccaattatacatatgttacagacttacagtaataggtacaagagaagggatccaggaggaagaggatatatatgaaaaccggaataaggagaagatgattgcgtaatcttcaccaaaatatgaaggtttctaaaattttgtgttgtttcactgattgagcatcccaatatatatgtccctgatttctgaagcataagggcaatacaatccggcaaacaggcgatgacaagttgagatattacaatggagaccatcagatacgcaaagacaacagtacaatccagattggagtagatgtgaaagaacaagtgacggataaaattaaggcatgctacttctattaacaatttttgatatttatgtttcaatcaattgtacaatttacactattaacgttacaaaactagaaagtaaaaataagaaactattgtatagtcattagatagcaaaacaatatcttatagggatgttattggtttttaatttaagacaaattttgatgacttgaataatatcataaaaagtgaataaataaaatagtctaaactattgctagatagttttctataattttgttgactagttttttagtaaatttttccaaataatcttggtattttgacgatatttttcatgtttttgttttataaaaatatagaaagacataaactaatagcataactatttaattcattaacaatcataattttttttaattttagttgaataacaaaaaatttaatgacttgataaaaatataaattcaataacttcagatttatgaagattttaaattattttttataaatcttaaactaataacaccaaattttaatattttttaaaattcatgattgaataacacaaaatcttacgtaatattttaagtcactaaaactctatttaaataacaaaccaataacactgcttaaattgtctaaattgataaatagatgatatttttattttatattttgaattaaaatatgatgaaaacgattttgtttaaagtcggtcaaggagactgatgttgtttttgtcacagaaaactgtttttttcttttaataatatatttcagtaaaatgagccggtgtaaggagtaaggaccatacttagaacaaaggcatcttgaacctgtagcaaatcttatttaaaaactagtagctatatgttaataagtacaactagagaagaaaaccctagtgcaacacacacataatataatatataataataatcaatagtggcacgaataacaatattacaaataaaataaaataaagagcttaaaagaacaatctgtcaagaatctttgtgcttcaatctttgaaagctaaaacagtaataatagcttcagtagccaacagctctttgtctgtacactgctggtttcaaaaggattctcttttatacaagcaaaagaaacaaagaaaaaaaatcaaaagagcttaatcaagaaagatatgtttggcaattgtgaccagaacaagaagatgcctatcatcagctctcccaacaccaatccactggtctctctctctctctctaaataatatgactcatttatcttttgtttcttagcttttggatccgaataatatcctcttgtcctctctttgttctcttgcctttagttaaaccacacgatctaaaaatcccttctctctttctttctttctttttttctctccctctcttctcaggcgagtatgcaaagcaagaacatgatcgtggcttcatctcatcagcagcaacaacaacagcaaccgcagcagccacaaccgcaacttaaatgccctcgttgcgattcttccaacacaaagttctgctactacaacaactacagcctctctcaaccacggcacttttgcaaggcttgcaagaggtactggacgagaggtgggactctcaggaacgttcccgtagggggtagctaccggaagaacaaacgtgtaaagcggccatcaaccgcaaccacaaccactgcctccaccgtctcgacgactaattcttcatcccctaataaccctcatcagatctctcatttctcttccatgaatcatcatcctttgttctatggtttatcagatcatatgagcagttgtaataataatcttccaatgatcccaagccgtttcagtgattcttcaaagacttgttcatcaagtggtttagagagtgagtttctctcatctggttttagcagtcttagtgctcttggattagggcttccgcatcagatgagtcatgaccacaccattaatggtagcttcatcaacaactccacaacaaacaaaccctttcttctatcgggtctattcggatcctcgatgtcttcttcttctactcttctccagcacccacataaacccatgaacaatggtggtgacatgttgggacaatcccatctccaaaccctagcatcacttcaagatttgcatgttggaggtaacaatgaagatatgaagtacaaagaaggaaagcttgatcagatctctgggaacatcaatgggttcatgtcatcatcatcatctttggatccttcaaactacaacaacatgtggaataatgcaagtgttgtcaatggagcatggcttgatccaacaaataataacgttggatcctccctcacctctttgatataaaccaaaactttggttatatgatctataactaggtagggtttatctttctttttttcctttttgttatgagatgagagaagaagcttggatcagagagatctaatcaggggaaatgttgatcttggcactataaagctccctcggatcctcttcatctcaccatctcaatcatcttccttcgcgtagttcaacaaaaaacaaaaagggttcaagattggttcaaggtttactatggtctcttgttaagtttactcgaggtaaatgatatgtgtatgtacataatatggtcctgactttgatctttttccttttctctttcccatctgtgtaattctaaggtccaccacatgggttggtgtttcttttcattgggattaggagggtatatttggattaatttgggtttctcatggggtcagagaactcaatagtttaatttcaagttttatatctgttttttagtttcacatttctttttttggtgtggctttcattgggtatacaaacagagggaggggtgtggttttgtgttgttataacttttgttattcatgtatgagttatgttcttacggtgcttttggatacatgcatgtttgtgtatatatatttaaatgtggatgacttgaattggctgaaaagaaaatgtcctttagctaatgtcaaataggagatccataaatacgagaaaattaccagaaacaacgtcaatggatacaattgcaagcagtatttatatgtgtacgtgttcttagaccaacaaagcgaacaaacctggttagatatttataacgtatattgctcatatctatatcatattgatatgattttgttctttagcatgttggttataactcatggttccacatatgttacaagggagctatatgcatgagaacacaagttctggtccagacttggagtttagtgtggtgtttttctaaagtgggcacgagttcgttaccagtttctttatgtcattttctctgtaatgattctttccgtgcaagagttgtctcgaatcaacatttgagtcggtatcctttggacacatcagttttgtgcggatgaaatacggattcaaatatcacacgattgctcaaaatgtcctgctgagttgatattcctatcattattatggaaagagcgtaacaagcggttctactagaataggaatacatatatattcttctgtgtatattatgaagcgtagttaatagcccccctagcggcttttgttgtacaatatttcttacatagccgagtacgaaggggttgtcaatgcagttattagactatatggatatgaaacgtgcttatcgaacttcattaccctctttcgacatgaacgatcgtgtattgtgacaatgtaagtgtagtacctctccacaaaccggatgcaaaatcatctgacaaaacatgttgagttggatatgttgtctgtctatgaatgagtagcactcggccaggttcgtgtcctacatgttccttcctcccatcaatatgaagaaatattcaccaaaggcctccctacttgtctattcaaagcattcaagttcaaaattcacgttcacaatctccatggttcgagttggggaggatactagaagaggaatacacacatcttcttctgtgcatactaggaagcttcgttaatatagcccctaacaactctcttgtacattatctcttatatattctcagcaatatagaacgactccaatcatcaaatggattaacctagttaatcaaacaggttccacgtatgcgtcgaatctcatatagagcatcagacgttcatgtgttttgacctgattattatttttttggtggtttcgttaacctttctttttctaacttgtttcaactctctatctaatttgttaatttcttgtaagtactcctaacttttctctataatgtttttttttaatatgcatgatcaagagccgttacaaacttacaataagagaacaccagtaaaccaaacaggtatgctagcaaattagggatgcaaatcgatccttcaaccaacattttgtagacgcacatgatatgagtgcatgctagccatcatataagtttaaaagatagagaactattttacacatgtaaaaatttagtcaactaacaaaaaaaaactttagtcaactaatcaatatgtagtttgattcttcttaaaaactctatgatcgctttcttaaccgaaccgtaataaatccaaatgacattttttatattcacccatgtttgagtcaatctcatcggatagatatttttattctaaaaaatcttctcttgtggataacatcttaattaataataaaatttaaatatttacttgtataaaatcaatcggttaattaacatgtatcacaatcacattaattatagtggtttcatgtcaatataataagaacctttcaaatggactattgttttctcttaggatataggaatatcgactttttcatatctcataattgtattgtattaaatttatacatcgttgtgttagaatatatttaagtaataattttttttgaattttatacatgcagcccaggctcaaagaaaatataagtcttagggaaaaaaacttgttggcctattattgtaaaaagatttgtggtttctaattataaaagaatgatatagttaaaaaatatttggatcttttcatatatttagtatttcagaatttgggctttttgagttataatacttggattattaacaatttttaaaaatatttagacttttttatatgaaaaaatttccaaacaaaaaagtctcgggccattgcatctcttgttcatgtaggaccgcaaaatctcgatttgaaaaaaagaggtagaactctataaatacgattaggaaatacgattttcgaaaactagtgaaatcgagatctaaattctcttaccgtaatccaaactatcttccgcagtgtggcggttttatgagtagcagatcacaggatacaaccactataagaccggtatcgcaacactcgataacagaatctacgaacttgaaaactactatatactcttgagacttactttgagaagaaagggagagatgggagagagtgttcgttcaactttttgcgagaaacgagtgaataaaatgagaggaggagccgttgcttttatagccaagagaggagcaaatgcgatccgcaattaagggcgaagatcgcgtgatccgctattaactcggagtaaagcgcaagtcaaaacgtgtgcgagattttatgagccattatgactttccgtttctcgttttaaatttgaataagaaatattcgaataatctcttttcattatgcaaactgatttcttattgggcaataatttatgtagcaaatgttacataaaagtaacaaaagcctcataagtattttattcaaaaataacatcttttatgggtcgaggcccacattccccaagagcccaaacccaagcctggcctggcccagctcggctcggcatggcggtgcggtcgcgcatgtgatttgttttgcataatgaacttgcatctcctacaccatagtgtcttctcccaataagtagtactgaaccatatactaaaaggagaaccttcaaacttccaatgtgggacaaatgttattatttattattataagtttttaagctcactactttgaacctcaattactcattcaatataacttcaatttttacatgtaaatacattatcttatagtgctcattataaggaatccaaaaactccatgatccggtcattccggtgacggccatcaccggaaaagttgccggaaagatggcgagagccacttgtgtaaaattgagttccaacaatcccccacatgaatagaattgactctaaatatttgagactttttaatgactctataacctaaaactgacctagatttgagagacttgactttcaagagtatatgcgaaaaattagatgtgcatgagatggtagcatttttgccttgaactagtcattgttaatatctgtcaagtttactcgtccgagaggtgaatattatgtcatgaaccacccagatttttatgaaaacctagacaacaagtgaaacccatctactttttctcgtaaaaacaagttctctatattatgttcattttggccttgaacattcctggatttcatgagtgaacttagagaatatagccttacatatttccctagaaacgaccacatttcatactcattaggtgatttgtcacttagcatttattttgagaagtttcctgtaaaactctacttatatattaaagctttggattcaacttttaaaagcattgcttatcctttaaacgtacatgaaacactatttattatcctagaaactgggctgcgactattagtcatttcgtttgatttagtgttcccttttaaacctagttcttaggatctctagtcatataagtggggtatccatcaaaatatcatctttatattacataagctttaaatccattattcttgataattttatcatttgatctcgtgtcaaacccttggtaaatggatccgccagattgtcagcgaatctattgtaatctaatatcattacactattagtaatcaaatgtctaatgattttatgtcggaatatcattaaaaagttggtttgccacttatcagatgtttatggccggatgaccacataaattcctatggtctcgactttttggtgaaaaaaagacaactttagattagccaataaaccaaaacactgatttgctaccttaattattaatagaaattttctaaaagtttggagacaagaaaatgtaatccaaaaatagcaatttatgtatacaaataatatattaagtacaaaagcaatataacagaaggaaattaaaatctaaacatctgaagttgagaaaaaaatgaaatatctcctagtgattctatttgtttatggcctatgcataattgttgtaaatggtagcagaacaacaaacaagatcaatatctggaacgatctcgatcccaatcacaagcacacaaccctctttgtgcattgtaaatctaaaacgatcgacaaaggaagacaagaacttccgtggggaaaactatatcaatttcctgttaaggaaacatggttgaggaatacacttttttggtgtactttaagacatgggcctggttatacgattggccaacaatttgatgcgtataaatatacgggtgtgcctcaaggaagcgattatgattggatagctagagaagatggaatatattttagggtaaatcgaggtacgatccgtaaagtgcataactggaagccaatgccaccgtaagaattgttatcttggtatagatcttgaagaatatatattctacaccgtcacaacttcattatgaaataaattccgtgaagtccaagttgtgaacgggaaaaaattctttagatctctgatattattgttgtttaagtaatatttttattttctttcatttctttactttttgtatatatattcactgcaaaagatgtaatgcatcgtgaatatagaataagtcaatagctatgtaacatttctgttattatattcaaaaaatacttttgatattgaaatgaagataatgctatatatcttctaagatttcttagaatgcaaatcaattcttctacaatatatattgtatgttgtttgatgctcagagaatgcaaaatattgataactaatgtagacaaagttgtcaaaattaacgtagtttatatagaattctaactcaaaactaataaacacttgaccaataaaccattatatattactttacaatcatttttaatacaaagatggtaacattcatgaatttccatgtgttctgaaatattatactctgtacacattcctactcttgagtcttgaaagtcttgaaattgcagtgtttataccacaaatgacctgaaatcaattatagattacaaagtcgtcggagaattcatatatcaatgttatgcaaaaaaatggtagtgattcaatattaaatgcttgaaaggtggtctttggcttcattttcccacccattgcatatcttgtgtagccagttaaacacaagacaaatatacaagttagattagaattctcaaaattgtagagttgaagcttaaggttgttctctggatttggtaaaagccaggaaagaagcaatgagcttgtcgccaaaacctgttgcataaagtacattaaaaaggatctcaaaaagactacaatactaaaggtacgccaataaaaaacagtagcaaagttgctcccatagtcttttttggctgaactggaaaaccaaatcctttgaacacacatgcgaatcaaaaacttatggtaagagttatgtgagacaactgtaaccctaaattaccaagcatcgtgtaagatatcctaaatttctcaccccataacaaaagctagatacactgaaattgatttttagatcaaaccttttccacttctgaccttgaatccaattagaaattgatttcaaattaattgaaactccatagcgatgaacacctaagatgaagaagctcatgaagtttcgatagtagaaataatgatttttcaaaaagtatctgcacgtaaatataaatataaagtttaagttttttactactcgaaatgtgtttagatacaacaagatattttagataacataatgtaattatgagatataaaaaacccgattttgaattctcaaatttgcaatagtattggcaatagtttttatcgtgagtagaaaaaaaaataaagcaaaacataaaaaataaaacttatgccacatgtcaaaaggaaaatactgcagtttttggtaaaatatatggacgatacacagttttggattagccaaaattccaatacactgatttgctaccttcattattaatagaaatttcctataagtctggagacaagaaaatgtaaatctaaaaatagcaatttatagatttatatatataatataacaagcacaaaagcaatttaattagcagaagaaaattattagttcaaaataacaaaaacagaagaaaattaaaatctaaacacctgaaaaaaaaaaatgaaatatctgtcagtgtttctatttttttatggcctatgcataattggtaatgtatatggacgagcaaacaagctccatatctggaacgatcttgatcccaatcagaagcactcagacctctttgtgcagtgtaaatctggaaaggccgacatgggaaaacattatgtcaagtatggaaaaatatatcaatttgatattagggataatttttggaagacgacacttttttggtgtacctttagacatgggcctgattataggactggccaacaatttgatgtgtatgaatataaaccgggtgtggctcaaggaggcacatatgaatggacagctagagaagatggaatatattttaggttaaatcaaggtacgatccataaagttcataattggaagccaatgccaccgtaagaattgttatcttggtattgatcttgaagaatatatattcatctaggtcgttaaaacttgattatgaaataaattccgtgaagtccaagatgtgaacggaaaaatatatattctttagatctttgatattattgttgtctaagtatatttcatattctttcatttcttttctttttgtatatatatctattcactgcaaaagatatatgtaaatgcatcgtgaatttataataagttaataactatgtaaaatttctattgttatatccagaaaatatttttgatatttaaatgaagatatatcttctaagatttcttagaatgcaaatcaatgcttctacaatatatattgtatgttgtttaatgctctgagaatgcaaaatattgataactaatgtagctaaacttgtcaaattaatgtaggtcatatagaattttaactcaaactaataaacacttgttagataaacaataaaccattatatattacattataattattattattaatttttgaatgaaatgttaaatctactactaataaaagaagctaagacttgtaaagctagccacattagcaaactaaaaatcatctaacaagaatcccacatcagcaacctcttacgccgaagaaattatgggcctgttcaaatcatttaatttcattgtactgagagtcttattgactgcttagaggtactctttagtttttatttgatgtctgatctcattaagagaattgatatcacttagcaatttagtgatccttttttttgttattctgagtattatacgcagacatttgccactgcattttgtttgggagtgttaagcaaacactgtactacgtggttgtggtttcatttattgccatattcttttttgaatcataatgatgatgatggtgattttctattttgttgcataggtgggattggaaaagcttatcatgatggggttgagggtttaaaaagcttatcatgatggtgttgaattcttctcttttcactctgtttcaggttggatcatcttcatcttctccatcaaactctaagtctgttccctctcttctctcaagttctctgttttcgttctcttctttaccctctgttttgtttcttttgatttagagtgaaagcaagctaacgtattaacaacttagagagatgacaattaaaactacagatttttcttcacatagttatatttagactactcactatatttttgttttctgagcttctttgcctacagttcacaaatttttttcccaaccttcctatgtttctgtttgatcaattccttgaccaatatctctcttttgcaggcaactaattggagaaacctgtgcatagtttctatcttctagctccctcttggtgattttcgccttatcacataaaggttggtttcttacttcttccttgctttggtcagttgcttcttttcccatgatcattgatttaaacttttcgcttgggcaggttttttaacactatcgagttcaacatgttatctataacgttgaattagaaagaaagttctgaatttcgtaattggagtggtggaggaggagcgatggagatggaactcatacaatcgcacttgatcaaaaggcttgattacagtcttcaataatatggttgctctgaaatctcaacagtgataatacatataatgatgttggtatcaaatcacattgttatatatgtctttcaggcttctaaaatgaaggacaagaaaaattatttcctatactggccaccaccaggttgttgctaaacgttgttatagtcaatttgattcaaaatactgtcacttttgatctatgtatatctttacaaaaatctaattagtgttttatcgcatctgcttcatttgtagtccttaattcattgatgtccaaagcttatttgaaaaatatataattttattgtcgaacctcatctaaagatttgagcttcaataacaaaatatatatatatatatatatatatatatatatatctttgagttcatgatttttttacatagaagactatatagttggtgatatgtactcttacaacattttgttaagaattctccaaaaacttatatgtcatcttacgaaaattgttaaacatcaaacagtaacatttgtaaaaagctaattacaacaacatttattaacagttaaaatataaatctcttaggtagcccggattaaaactcttaattcaattgttacatatatattcgggagtagtccaaattttcttctaatctaatataataaagtaatgctattcttaggaacaagttttgagaaactgacatgtagatatagaactctaaatatattatcctaagaagctatggatttactaatttcatcctatccctatgtgaatccctaaactcaacgagagcattactaagacatgatcatagaagcatatatcatatttgaataaaattacataaataattcaaaagattatagagtttagaaagtattattttctttataaggttttgaaatctctaaagaattcttgaaaaatagaaaacaaaaagtaaaagcttgataattctaactattgacccaaaatatattaataggttctcaaaaacatttaggaacaaataatgcaaatacaaaaatcttatgggacaattatgtaatcttctaatttttaaactgggaagacttttgttgggatgcgaacggtgtctatcgacatgtcgatcgacattgattacttgatctgacaccaaattcgttttttcagcctttatttttctgtttggttccaaaatacttaacgaactccaaatatattcgcataaataaccgaaaagatttttaaaataacatagtaactctaaaaacaatatctatatcataaataataacggaaaataatccatgatatatcaattataactcaaccaaagccaacgaacaaaaaacatgaagcaaagctacatatactactaatgataagtctaaatcgtcttcgacatatctaacaaaaccaaaatatatatacttggaaacaacttcttcacccggacacaaatttctcaaagcaagtgtcaaaaactctacgataataacaaacagagtatatgtagctatgcaatccaaggagctttcctcttatctaaaagtgtcacaatggcggaccggtcgcaatcttatgtagctctacgctaccccttttggctacggaaggtgcttgaaattgataaatacattacattgttgtaatgattttctgtagtttgattgcttttgtttcctctttgtaattgtgaacaagttgttgttaatatcatgaatcattcagacagaaaaaaaaaaaaaaaaaaaacagagaaaaatcccaaaaaataagaaaatatatatgacgctacatcactatatttcccctacctccttagtctcgctaggagttacgagtcgtgcgccttttccagtatttgccataattaactgagtgggatctttttgtccatcaacccatgcctcttcaatattttttactaatccaccatttccttccattgttattgatatatatgtttcaccaaatatacctatacaaaactatatttcaaacttataacgaacaagaaaacgagtttttcaaaatttcagagtttatggccgagaataaacatgagctcggcggccgcggtttagaacaaaatttgtgtccatctcctcgccaaatgtaagtttctgatagagcataacattgggttgggacgaaaaaggaaaccaataagatgatagaaattgctgggtaattggaggtgttcttagggcacgagttgaacatgttaccaaacctaattcatggttagaaatttggtgacagtcaagcttatattatctttgataactatgtttctagttgtttcattattagtatagaaaaaactttgttttgtagagtgttctatgggttatgatttcgaaaagaaaaaaaattgtgagacacttaataaaattatttcgacaaaaaaagtagcttgtataaaaaaatcagattttaatttatgtaagaacaaattccaatatccaatagttaaaaataattatttgttccgattaatcgagttttgcaaaatatgcacaaaatctatcatcgtaccatttctaagactatatatttggttatatattttatgccgtgtgttctgattccaataaattttagcgcatagtaaattttctaaaaagcaaaattttctcaaaagtgtactaatgacaattaattgagtttctacaaaataagaataactattgactcgattttcacaaaactagtatgctaaatatcacattacttttaaaattaaatggaattatctttttcaatattggatacgaataatttttacactaaagttattttaataaaataaccgtttattcaaaatatgtaaagacgacaaaaatatatattaaatggaaaaacgactaacttagtttttgcaaaattaaatggatttgtccttttcaatgtttgaatacaaaaaaaaatctataataagtttattatattaaaataacccgttttttcagaatacgcaaaaacgacaaaaaaatattaattacaaagaaatttagtttatacaaaaatatgaatggctattaatggtgtttactctaaatttaattattatgcatttatgctaaatctttctaaaggtacaaagattcgttttttcaatgtttgaactgcatattaaggtatagatttggaccttaacagagttaatatataaggaagagagccaaggaactccaaaataaaataaagagccttctctctctctctctgagaaaaaacacatatagccaatgaccttctcgtggtcttctgtgccataaaagccattatatacattcaaacacaatctggcgccacatatacacatgtactagtgtatgtatatgtcctaacctctgtattcatatctctctccttgtctgagtggtgcgatgggtatccccataagctgcaaacattgaaccatctgcaacattttgactcgttttcttttgtgtttttccaacatctgtctcttcttcactcgctctctcctaatcaatctccccaacgacctctctttttttttgtttcttcactcagatctctctccctctctctctctctctctccgggaaaaatggataacttcttaccctttccctcttctaacgcaaactctgtccaagaactctctatggatcctaacaacaatcgctcgcacttcacaacagtccctacttatgatcatcatcaggctcagcctcatcacttcttgcctccgttttcatacccggtggagcagatggcggcggtgatgaatcctcagccggtttacttatcggagtgttatcctcagatcccggttacgcaaaccggaagtgaattcggttctctggttggtaatccttgtttgtggcaagagagaggtggttttcttgatccgcgtatgacgaagatggcaaggatcaacaggaaaaacgccatgatgagatcaagaaacaactctagccctaattctagtccaagtgagttggttgattcaaagagacagctgatgatgcttaacttgaaaaataacgtgcagatctccgacaagaaagatagctaccaacagtccacatttgataacaaggtttggtttttattcgtcccaatttttgaatatgtacgattttcttatttattttttggttttcatgttattatatgaatatatacaattttgggtgtataaaactttatgatacaatttttaattatttttattttgttttggttgttgcttgtagaagcttagggttttgtgtgagaaggaattgaagaacagcgatgttgggtcactcgggaggatagttctaccaaaggtatgtgaattcttaaaattctttttaatttctcgaaccaatacttggtaaaaaattctgtttgttttcatgatttttcttctttttctgttattgtataatgataaatgaaatgcattgatgaaaatgataatcatcaatcacgtacgtcattgaaaatttaaaacacaatcccataaaaaaattcttagaagaataaagttattttatgaggattagacttccgtcattttatacaagagatttgtggaacacaagcacaaaaatcgttgcggccacatattatctcattattcaatttcactgagtttttcttgcacatttcattttactttcaaattttacataatatgtttatctaactgttttctgtttaaccaataaaaagttttaagtctttaaaataagtatccacacgaaaacaagatgaataagaaacatgagaagaaaatgtggactgaagtaaagttagtttaatcaaattttgtttggtttctgtacgaacttttatgtttttgattttttatttatttagcaagtagtatatgaattaatttaattttttatagttttaaacttgatttttttaaagatagcttataattattgaatatatggaatgctacttcttccttcaatgttgttatttgtatttgttaaatttgaaattgggttgaagaaaatgaaaggtcgtttatatgcctttcctaattaattgtccattgaatggtttaccactttacctcgaaaaagtgaataaataaaaatcattagggaaaaagattctacatatcttggggttttatcaaacttttaatcaattttattttaatgatatcgttcttatttttcttagcaagacactaatacgtgaatcatggctttggaatgcagagagatgcagaagcaaatcttccgaagctatctgataaagaaggaatcgttgtacagatgagagatgttttctctatgcagtcttggtctttcaaatacaagtaaataattcgctttctaatccatttttcatttcccaattaacacaactttaattttatgctcaactgttagtccctttttgtgttaccggttctcatacttagttttaaattttgattttttttttatcaattgggaacagtattataattagaagactaaatgctcgtattaatgacataggttttggtccaataacaagagcagaatgtatgtcctcgagaacacaggtaaattaaggagctccaatattatttcaaaagtacaaaatcttatgtaaaactacttttaaataaatatgatttaccttttcctttttttttgtggtgataactaaaggagaatttgtgaagcaaaatggagctgagataggagactttttaacaatatacgaggacgaaagcaagaatctcgtgagctctctatttacttcatttccctatttaattttgtaaaaagacatgaaaaagttaaaaaaaaaatgattaattagtagtccaaaattggaaatttaaaaagtggtctttgaattgagtttgttaagcatccagacaaaagttttaaaacctttttctgtcaatgataactgttcttatatggtaggtattaataacttgtgggcctagggggaagtaaatactatggagaaaattttataataattgaaatttggttaatttagagtttataatatggtttgatttggtttggttaggacttatgacttatgtgtctgtgtgtgatcgcttgttcttattacagtacttcgccatgaatggaaattcgggaaaacaaaatgaaggaagagaaaatgagtcgagggaaaggaaccactacgaagaggcaatgcttgattacataccaagagacgaagaggaagcttccattgcaatgctcatcggaaatctaaacgatcactatcccatccctaacgatctcatggacctcaccactgaccttcagcaccatcaagccacgtcctcatcaatgccacctgaggatcacgcgtacgtgggttcatccgatgatcaggtgagctttaacgactttgagtggtggtgatatggtggtggaagttctcaagttcataaccccctttatgaaaatagaccttaagatatacaaaagagattaaaagaaaaaaaagttagtatatttcatcatatctctcattgaagatgagatttatatctataattgtttaatagtgtttttattacttttctatcaatatattaaagttttaattaataaaaacgatcatttatcttcagtataattagtttttaattacaaacaaaattattctgagttttatcacccagaagagattatcgacatcttgttagcaaaaaaccattaaaaacacattagcacaattagagatatggactttcgtctttcgggatttcccaaatagttgatattccgttacaaataatggaacgacataggtgctggattggttataacgttcatagctaacttgtaagaattgtcgaaaacttttgaatttgttaaaaaaaaaaatgacaattaaagtgtttataatatgttactagtgtgaaattatattgtatatactgtatcaatttttatttttgtttaaaaaaatcatcttgcttctatttagaaattaaagataacttgggaacagtgccttgccttacacgcgataaacagtactatcgcctacaagttttcttttcatttgatttttggtcggcacctacaagtttttctaaaaaggatgatgcatagtagtcgccgatgggtaatactaatagcttttctatcagacaaaaaaacatatgatttttgttttcttatttgctaattagaaaatcaagataagttatgaggccttgattccctaaaccctagccctctaacgctagcctagattctaatccaagcccaaaactattactagtataactctgagtatatccgagctcttataactattgcccatactctatttatagctagcccaacagaattactcaatactccaaacccaatagtctaaccctacctgggatactacactgatcagttagccctgacagaaaccagttgacaaaaataccgaaccttcatagaactgaaaataatagagataaaaggttcatgcaatacgtaggtttgatttacaatccgctattgtaattagttttcaatcgtttttgtgaaaatgaaacatgtaagtttatcaaattcaacctcttatcaaaacctatttaatttgaatagatactatgctttttttttggcaaaggaatagatactatgctttaaataacaaaattcactttaaaatgaatccacaaccacaagattaatcatttttggaaaatgatataaattgagttgtggaaccaaatttcttaggagttagtctttgatctgacaatctgatcgaaagttgatccatatgagtgtcaatatatcagtaaactttgacactagaaatatctgtatggagtcttagtacattaacatgtttctaacttttaaccaaaaaaaaatcatgtttcaaactacaatcaaattgtatttgcatataggcacttaagagttaagacattagacgtttgataacttacaaaattacaacgaatattgttttaggctaacattatttcagtgatctttttgtttactggatttacgctattgatttaaacataacacggtcgcacctaaatacaaaatcctgtatattatcaatttaaaattagatctaggaaataaatgtaagaatccaaattttttaatcttgctattctccaggatatgctcctggctttgctccgaaggatgattgcagaatttcacgtgaatacatgagcagatgagctagtttcgcttttagtaataatagtcaatagataaggattctcctctcactctctcaggtatactgaattatgattttatcatctacgcgactacgcttaagtaaactataataaacaaataaaaagctagttgactaaaagttatttggtaagtttgacatcaagatctttttttgttttttttgagcaaaagttgacatcaagatctaggcacaataaatcataaaacaattttacaatttaagctctgactgataatatgaataatgatataatagtgcttttaatgagattatgcaaaaaatttgtcaaaaaaaaaaatctacataattacaatagaaagcacaaaaaaacaaaatttgcatttttacttaaaattacaaataaatacattatgcaaaaaattggatatagaattacttatccacataataaattattattattctacgcataataaatattagaaattataaaagaaaaatatatattttttatacaaaaaattatttcattaataatatttaaaaaatattttcgcaactttttaataaattttagtaatcttatatttttattatcaaatattatttaaaaattactaaaattaattaaaacatggttttgtttattaagtatatatatatatattaatataatattttattttgctgttctacaaaatatattcaatcaatatattttaaaagtaatttcgttttcttgttattcattctgtaaatttttattatgcgaatatttatcgtgtaacttataccactatgttattatgcaatttacaaattggagccttagcgttagatatgaatacagcaaaacatttttacattattaaacaaaaattcagattttttttttctaagatcttttttaatcagatttttttttacacatttgaataaaatactatgacaatatataaaaacacaaaaatgcaagaataatgaatttgaagtcaaaaatgaaaactgaattttgctagaactattaaaataatagatattgattaattaatatttgtaataaatattatgcccccaataatattaaatttatagaagtttttgctgtagatgttcagttttaaaatttatagtagtcggagtgagtggatttattgacagtaacatttaaaaaaatcctttaaacagttataagttataaccccattttaaaaatcatagtttcattaaactataatggattccacagctcccaagttctgaaattcctaaataaaaaaacgtaggaagcgtggaattcaatttgacattaaatgtcatcatgtgatatatatgtcatgtgtggactatgaaactttttatgaacgttcaatatattacatgtgtacataggtgttctgataatcaagttggtaaataacgcatatatgaatatgaaaattggcaattaaaaaacttatacttagaaaagtatatagatataagccaataatacaatcaatcactaatgaaatttcaatcaatcactaatgaactaccatgtattaacgacttggaacgaattttcaaaatgtaaaattttctcttcgcacagcacaaacaagttatctaataaagtactgtatatcattagcccagatatatgaaggcagatcttgggccaaaacttgtatatataaaggtagcataatatcaccagaattaaatccaaacatttcaccaaagtagtataaagacaattggtcatgattagttttaagagattgttgggacttctttttgttgatgtgaagatcccacaactatatcggacactaacaaacctaaccgttcatatggacgtgggaacaagaacatgaattaaataggataagatgaataatataattaaaacttaaaaactgttactaaagggtacttgtatatttcatatatgtatttgtttgtctaagagtttatttcttaattatatttattttcgttttattcataataaatcgaataacggcaaaaatgtttacacgtacaatttataatcttaagagattggggaaacaaatcaccaataaatttgcaacaatgatattatcctataattatagactaatgaaaatttatatatacacaaaaatgtaagggcaaagactaccacgaaagtagccatatttcttggagggaaatgtggtaagttcacgatgcatacttttttgggcgtatttattatttttattaaattcagtaaaacgtaaaagcaaagagaatcattccaacgacaagaatgattagtctactatgtaaatgtaatgatacatcatcgcgttatcggatttaaacatttaaacaattatggcccataattgtgttatatctctagtgagacgtttagaccaaagcatccaaagataggttttatttgaagaataaaaaattgatagggtgggtgggtccaatattgggtccatcattttttttccatacttttgcaggtaacacgaaaatgtaacatgacatgtctctctccggacaaaaacatttctcccacaactgtaataatttaagttaccagttcgtgaatattactgatcattgtagaaatggtggggtaagacctactcgtgaatcgatttagaagttttaaaattaatctttacacagaaaaaaacaaaaaaaacattcagacaaacaacaggaaaaatatctaagcgtaatttgtttaactatttgaagaacagtaatctcaataatgatggattcaaatttgaatatatttggcttgttaagagatgagtaatttttgtattatagagttgtcttatgtatttagtatgttatcagcagctgacttgtgtaagaatattagacttacgtgaccaaactttaatgtattatgttacttgtttttagcaaaaaaaaacattaaatcgtattatgaaaataaatgttctaaagcaattgagcgacatgtgctattcaatgcagcaattacgctcaaagtctcccgaagatctcattcagtgatctattataagaaaatagtgaaaaaaacacatcagatttacataaatgtggttccattaatcacaatgtatcaaatgaaagttttgtttgctcttcatataagtaatggcaaagtcacttcgactctctacttagtatatagaaaataattgaatactacatgtttagtaggacaattgttgaaatacttttatagaatggtagcttaacctgtgtcacaaatgccaatcaaaatgttatacatactactttcaaaacaaaattgtttgacataatccaaaaaaaattcaatcaattatgcaaaccagatttggtaatttataacttcggattacaatcaacatcgatagtatacaatcacgaatcagatgcctgactactatatcaaagttttttactatctcatatgtgaattatggtactaaattcctttaaaaaaaattaatgcctgttattaccatcacttatgatttttctaaatacatagataaaaattatcaaaaacttttgcatgttagcttggatttcaaaacaaaattgctttctttgatataatgtcaaaacaaaaagttcacaaaacaaattataatgacaattcaaattcaacattactattactcatgctataaaacaatttcctaaattttatagtatcccaatatcttacttttgttaaagtatttactaatgttcactttatatggatcaccagtgataatagtaaagttattgtgtgtgactatatatcttttttttttttttgtgactatattattcaacaaattgttttttttttttgataaaaatacaccaacttgacatatcttagacgatctaaacacacatcaactaattaataggcgatctaaatcttacttatattaaatctaattttattatcataaaaaaaaaagatcttacacttattagtccttttttatatattttagacgacaaatgtttactagatgggtaaagattttttttttggtaaaattgggttaagatctttttaacattggttcaccagggatgtgacttttgtttggtcgtaatagtagaaaatttgcatatcacattttttcagatgtgtaggaaacaatgaccattttaatgttgttggataactaaagttttccatcttgaatatctatcagaagaaaaaaagagtaacaaaaaaaagagagtaacaaaatggtactagtgactttttttttttttttttttttgggcacaaaatggtactagtaactaataatggggtaattcatgtcgatcgattttgatttactatttacaaataaaagggagtaatttcatgacactcgaagcgtgaaccttccacctatatatacacccatttcataatctcaaaacatatcactaacccaaaaacaaaacaaaaaatgggtttcattggtaagagtgtattagtgagtctcgtagcactttggtgcttcacttcctctgtcttcactgaagaagtgaaccataagactcaaaccccttctctagctcctgctcctgctccttaccaccacggccaccaccacccacaccctcctcatcaccaccaccctcaccctcaccctcacccccacccaccggccaaatctcctgttaaacccccggttaaggcaccagtgtctccaccagccaaacctccggttaagcccccggtttacccacccaccaaagccccggtgaaacccccaactaaacccccggtcaagccacctgtttccccaccagccaaacctccggttaagccaccagtttaccctccaaccaaagctccagttaagcccccaactaaacccccagtcaagccaccagtttaccctccaaccaaagccccggttaagcccccaactaaacccccagtcaagccaccagtttaccctccaaccaaagccccggttaagcccccaactaaacccccggtcaagccaccagtttccccaccagccaaacctccagttaagcccccggtttaccctcctaccaaagctccggttaagcctccggtttctcctccgacgaagccacctgttacaccgccggtttacccgcctaagttcaaccgtagtctagtcgccgttcggggtacggtttactgcaaaagctgcaagtacgctgctttcaacacactcttaggcgctaaacccatcgaaggtttgaactattttctttgttaattactactatttcttccacttcattattcagtttattcactcatacatgagacatacctcagtaacaatctctcaaacaactcaacttggctctgcatacgcattcaaacagtgtatatatctataaaataatacgtacttcatatcttaatcatgacgcatatttcagaaaataattcaaatttgaaaacgttacaagtgggacctttgttacgtaagtagtcaatgtttcgaaaataggtgtgaaataaagagagtgactatgtacacttctgcactcatcagtcactgttttttacagtctggccaataaatttcactacttcccacaaaaataattaaaaacacataactatatccttttattctataaacatatcggactaatatttttttatgggtttgtgcaggtgctacggtgaaactagtgtgtaagagcaagaagaacataacagcggagacgacgacagacaagaacggatacttcttgttgttggctcctaagacggtgacgaacttcggtttcagaggatgtcgtgtgtatttggtgaaatcaaaggactacaaatgcagcaaagtctcaaagctcttcggtggagatgtcggcgctgaacttaagcctgagaaaaagctgggaaaatctacggtggtcgtcaacaagctcgtatacggtctctttaacgttggtccatttgcctttaacccgtcttgccccaaatgaagatgatttgatgctctggttactatcttgattgtttcatgtttaaaaagattgagagagagtgttgttatgcgtctactgtacggttgaattttaatcaatgttagctagtctttaagttaaatgcttgggtattatgttgtatctctttaagtgacgtcgtttgagtttcgtttgaataaaaatagcagctttcaagatgattccattacattacaaaacgaatgagcaaaatgaatgttaactatagaatcttacaattagaatgtgtaactaaatgaataacttgaatattattttctttctcaacttgtatatcttttttgtttgatcaaataaaaatgataaaaatagttacgctgcagacaaaaaaaaaaatgattacaaagaagggtgaaaagctcgatgggaagggggactcatcgaatagggtttctagtctgttcttgaatacggagaaaaatcagctgcgtaattgtcggccacggggctgacattatttcccatcacaatctcaaagttacaaaggacaaataataattcaagatattaataaaaaacagttttaacaaaaagtgttaaacaagattcaagaagagtttatgggttgtggcgggacgattaagcgattgtacatttaaaaaaaaaaaaatattttatagggtgtcatggatcaagattctccttagctcataaagcttctcacgtgctctcttaaaaatgttaaccgggttgttatgcattggttaattaggcctctacatttcgggtcaatagaaaaagtatgttgtacacactcacttggcgtaaactagtaacagtatcatgattgattttttttacaacttctccttgtcactataattcagttttttatgaagcaaagaagaatttagtcgcattgagaagaagctaatttgatgaaagtgttgatcacctgtttaattatcgaaattgtatattgcggtgtgaatcttttctaacttcactcttattttcttctttgaacagacacgagatcaaatatctatccatgagagattcataaggtttgatcatttctagtattgactatttggataaaagcatttcaccaaaaatcgtaagagtgaaaaggaagaaggttttgaatctcaagcctaaattctagcatcaaaattcaaacatctaacgtattgaataatgaatatgtcatcgatactccatagtttgataacaccaatgtgaaaatataaactatatataatacatggcccaaataaatgaacactaactgggctcggtttcttaacccacaccgaacccgtttggcaacaagtaaagcaacaacctaagtacacatagattttcaataaatataaggcccaaaaaactattaaagcccaacatctctccacatatgttaagttcacttagtcaaacgactaaaacccaatgattagattacttccaagataagcatttcttggttgaatatatatatcacgacgacacgtagataaatcaacttaccataacattcatttcgagttatattaattctattgaccaaaaggtcacataaacgtcctagtcatctaaaccatcattgcttattgagttcaacattttcctctcatgatattcaatgttctttgggtaaattatctctacctctatcatttattgccaagactaaaaccaaatagagcacatttttcctcccactttcaacgacggcgcgtgacacgcactctctaaatcagcgcgtgagcaaagacctaaagaaactagaaaaaagactaaagagccaatagcgcccaccgaaaacattttcttaccgaaccaaaacacaaagcttattaaactcaaaaacaaaacacagtttctctctctctctctctctctctctctctctctctctctctctctctctaaaagctctcttctcttacaatggagaattcaccgagatacagagaagcgacgaatctgattccgtcgccgagatgtcacaacagcaacaacagttgcggtatgagcagtagcagtgaaagtaacaaaccaccaacaactccgacccgacacgtaaccacaagatccgaatccggtaacccgtacccgacaacattcgtccaagcagatacttcttccttcaaacaagtcgtccagatgctaaccggatccgccgagagacccaaacacggttcatctctcaaaccaaacccgacccatcatcaacccgacccaagatccactccttcttctttctcaatcccaccaatcaaagccgtacctaacaagaaacagtcttcttcttcagcatcagggtttcgtctctacgagcgtcgtaattcaatgaagaatctcaaaatcaatcctttaaacccggtttttaacccggttaattcagctttctctccccgtaaaccggagatcctctctccaagcatcttagatttcccatctctcgttctcagcccggttacgcctcttatacccgacccgtttgatcgatccgggtcatcaaaccaaagccccaacgagcttgctgcggaggagaaagcaatgaaagagagaggcttttatttgcatccatctccggcaacaactccgatggatccagagcctcgacttcttcctctattcccggtgacttctcctagagtctcaggttcttcatcagcttctacttcttgaaaaaaagacctaatttttcttttttactcaaatttttattatccttttgtgatcttaattatatattataattggggaattgagatgaatcatgttgagaattatacgagaaaatttgtaatgttgagatgtttgctaaatccaattcgcgatttcaattgtattaatggtttaatattgatgagtttattctgcagaatttgataaattagattagtactgataataattcagtgagttttgtacaattttagtgaaatgagcaaattgttttttgtttctattctattttatttccataaacacacaattagttgcattctacatttgttttttttcagtaaacaaaagatgaagagattggtctttagagggaaccaaattggtccaacctttttttgctaaggattgatgaaagggtaaacaaaaagaaaaaggagtgtggaaaataaaagagatttttttcttgttattattattttcatattttctccttagaaaaaggagaatacgaaattgaaaaaaagaaagaaaagagtaaattggatagaaggaagataaagagtggggcttagctgtctaaaagagagagtattaattaagaggtaaggaatcttttgactatattttctttgaattcatgatttgatgatagggtttttagagatttgaccgcttttacctatatttgtggcctaatgaatgataatgatattgtttgtttttaaccgtaacaagaacaaaaaattgtggttttggatacattagagtacaagttttggttgtggtcactattgggtctaataatatcttggggtaaaaaattatgttttgagtgtttcgttttaaaatatagttgaaggtggacttagtggcatatggattgaggtaatgggcatatgctaaattggccccatatgatttttatcttttgaatatttcttggtcaaaggtttttttgtttagagtaaaattaggcttgttggaaactttcaaaaattaggtgttttaattggttacacaaaatggacgtggtcaaaagaaataattaacactttaattatgttagtatttatcattgaatggtcttcgaagactaaaaattaaattaaacttgactcaatcttctcatggtggaccggatctattatctcttctctctctaaacaaaaaaaattctcatgtgaagagagttgaagtgtgggccccatttccactattggtgctattgagaagttgacctatttttaaaatttctctctttataaaacaaaaaataatatcctaaattttattttatttttaacttttccactcttttgtgaatatatatgtactattgatcaaatcttacccactagaatctaatcccgatttttttttatcatgttgtacctaaattccttaaatatataccaagatttagatgacaaatgcttcttcatttacaagttacaacaaagaatattattccatacaataaaatgagaaaggttatttgtaaaatttcattttctagtatatttaaaaaagttaagcttttttttttgtggttttcaaaattagaaagcaaaaaaagaaaagtcaaaaagtaatggagatgtggtgtgaatagcaataatgtttcaaagttaggttctcatctcacttcaaagtctactttggctctatttctttttaaaatttaatgactatgtagaaaatgaccatacagtgctgaatgaagtagtagtgcaggtgggtcttgtgaccatgaacctactaaacatttcctcagacaaacaaacagacaagtaaaaaaaacacagcaagcaaatcagtcagaacacaggatgggcctcagtgaagaacattagacgttttcttagggctctctttattgccccatgaacttgaagctcttttgacttttgaatgcgaccgcataaatattctccactctataagttagtttagtgtcgaagtactaaactagaagtgactattaatgccagccaaccaaattatgttgtcacccatttcagttccaaattatcatccatggacattcttagttatgaaactcctcgatttatttagttataactaagaagtttaattaaggatgatttgagatcttatactgaactccaaaacacttttcctaaccatgaaggtgcgggtgatttgggctcggacttgggcttttccaatccaaaatcaagtttcacttttagttttcagtatttcaatattatattatactttttggtttagttcacatgtttcattacacgtcattccgtcaaaaactcgtgttctgatatgtaactgtagaaataacggacggagtagaattgatctatctctaataaaatattctgtactggcttgaaaacattgtgatgtgaaacatcaatcatgtgatcatatgattgatctaagtcatagtttcatgtagatacaccccaaaaccttcctctcgacttggaaatttaagcaagagacctcaaattatttctcatttaatccaaggtacagtgcggcattttgttgataaaataagaaattattttgatagaattgggtttaaatatcggcttccaacctaaaaccaattggcaataggtggagtgaccctaaccctttatatatcacttcataattcctccaacttccgatgtgggactttctttcattaacatattttcgatttcttattccgatcgggttggatccatcattaacaatctcaacttaatctgcaacgtttgtttcgagataaaatacaaaagaagatataaaagaagaaataggtctcatttgatccctcgtcttaaaacaaattaatgcttaattgtaaaatactaaaacatcatgatgtatataatagacaaaacggaacttaattatatgaacgaaacgaaataaaaaaggacaacaacaaaggaaaagtaagtgatataccaatgaatcaaaagcttatatgcatcatgatgattatataaagaacaaaaaagaatatatagatcatacgtataacataggatacgttaagaaagaatgaaaaaaaaaaaagatggaagtaaggagaggcaattaatattaacgatcaagaaagaagaatgaagatacgaacgtacgttgttgaatcaaatctcttcctctctatcatttagcgagcgtacctatagcaatgcgtgatggcactgcatccacgcctgtaaggattattccttcttctcttcttgcaatcgtagtaggatcggccacgtctactgcaaggcacattgttctttttgagagcatcgtagccaatgtaacgacgtcctcttgcgagttgacgacggtttgtctctgaatccattagagattcgagctcatcgtcttccccgatgcaaccttgcccgttgatgcaagatttggttaaagggtaggttgcattgacggatttagctaccatagctaagatcaagagaccaaagattaataacattttgacacccattttgtttttttttggttttggttttttaatgagttattattgctcttttgtttaggttttggttcttctacgccctttccttgtgacaaggagagggagaaatagaagtgtgtgagagattatgcagaagaacaaatgagagattggttttgttggattaaaaaaaggcttaagacagttgcgattttttgcttgttattattttgtggtcgttaattctgttactttgaaattggggttttaacctcttttttaggtctattttctccatttcttccgcttggtggttagatctaaatttgttacaagttatttctggctctgctttttgatcggctaacttattatttttttcttctgaaaaatattaaaatgctcaattttagcatgtaaaagtctattatcagttttgtaaccaatttcaaaagaacttaggagtgagtagtataacagcatgatccaaccttacacatttcatgctgaaaatgttttattacatcctaaaaaattagactgaattttgtaatactattatagttactgtattttttgtttgttagtactattttattaggggaaaatgagagatttcattaaatcacaaaacaatattagaaaaaaagaaagttaatacaacatttaatttaaaacaaagaaaatagttaaagatggcgccggtgaagtagtattacaacacagtgacataaactacattagcacatcccacgttaaccacagtataaagattaggtgtggtgtttcaagatatatttacaaatatattcatgataggcctcgaggacgatagactatgttctcatcaccagttacctctcgttttactcttttagatttttatctgttttacgtatggaggtgactagagagttttcagaagaaatatgcagaagatgatggcttcttttaaaatctcattatttttggatgctattgatattatatccaaactcatcaaatgtttaatttgagtggacaaaataaacaacatccggataagaaaacgaacattcaccaaagaaataaaaacaacaatttcacacgtttatgtggaaatctttgcatgagctccaatgtctgactcttagcttaaaaaactcaacaaaacactcaatatgtgtactaacctaatttaggagctacttctaaggcataacgaatgaaaatttctggcccaacgtaatttagtgttgaccctttgcaataactttttttttcttttggcgtggccttttacaaatctttttttttttgtttacaaatctttggttattgatatgtaaatggtttttgtaagttgtaaaaaagtctttgtatattgatatgttaatttacacccattacgaggatatgatagagtattacttggcagttattaatcaatattcaatcatatagttgaaaacattctgcaagatattaataaacatatgtttctttcaatgtaaattaaacagtgtactttcaatttttaataaaagtcatactaactggtgtaatttaaacattgtttttttttgttttttcttcaaaatatacttatatgtgattcatattcgataacactatatttatatataaacttaggaccacatttttaaattttgacaaaaaagggaccacatttttaatctcatttagttatgtgtcaagcgaggtaacatatatactgattgtcaattggttcacatagtataaaatcagattattgatccaaaatagagaatgatgcggatttaagattaaattcaattcgaaatagactagacaatataattcaccgaaaaaaccatggaaaatgttaataatttcactattttgaattcaaatgggatatgaaccaatatataaatgatacatacatatcaatatatttactaccagttaattttaaaattataagtacatcatctttataaaaaaaacagtcaaaccatttataatctcatttaagaactccattattgaatgtacaataatgcgatgtagtactccataaaatgccatgaagagcaaagacgagagctgcagttagtaaaacagtgtaagatgtcggactaaaagtttcgtaaaatattttcataatgataacaatgagagaaatgggtcaaatcacgtagcgaacaactactacaacgttcgttgcccgcgtgtaattggttcgaatgtctattgtcattaagaagttaatcatacaattattctataattcgatatagaaaaagtcaataccaaagccactattctagtctcgtacttatcgtcgcaaatcgatatctatggagtagtataaacactagcgagatttaagatacatattataacgcgaatacagtttccagctgccgttttgaaatgtctatacatagacaccatcatcatggcatcatgggatgcttttgaatataattcccaacaataacgtttttttttataaaggaaagtcagtaaaaaataatatgcatgtgtatctatcatcaaatgttgacaccaatcatcaaagatatttcctctctttagtcatttatttttaaatgataaatatgaagaaagttgtgttggtaaatttccattcaattacgtgtattgtttgtctttgtttttaatacgcattgggtccatccataaccaaaaagacaagtcatcttttgaggtgatgtcaagtgacaaacaattgtagctaatctgtgatttgtgggaatatcaattccttaattaaactagttaaattatgactaaggtgcagatatcttggaacttttaaacttttatcatctttttacacctaatagtttagattatcatatgtgagtatatcaataaacacacccacacagtcacacacacacacaaaaaataataatttcttgtggaaatatttctagcaaatcatggagttacgcaattcatcaatatattaaaaaaaatgttatgtcccacaatatatacacaaagtgtatgtgtttgaaccagagtctattctcaataaatgttttgtttcagtttatttcatattaataagattatctattttgaaagttggaaggcgatggtgcatgatcatattaataagattaacagtttttttgataaaatataataaaattagcacttgaatttcatacaatttttagaaaacactcggataatcaaggtattttttatttattttttggacaaaaaatcaaggtattcttatttactattttccacatcaatttacaaatcctcttaaatatttattttgttatgtttttataacttttttgggtctttgaacaaactattttcttcgattaggttcagccgttgataaatttatttaattttcagtcgtgatgatatatattcaaattctggtcagacgaaattttcttttactattgagtctgaaaaattcaacggatgttttattttgaaagatcactataaagctcatattgatgcttttataattataggtatcattacataaattaattcgcataggattactatatccctaaagtcatgacatagttaggactttaggataaaggaaggtttagcttaaacgtcaaggaatattaagtagtgggtaacttttgtttcctctaaacttctttttacataggattaatatgcattacattgttaaattaaatttaaggagaaaatgtaaaaaaattagtttagaggagaaacaaagcaataggtgggcgcacttagaagaagaagaagtgagataatggattagatatgtatccacctatgcacctccatttctccatgatcatgatcatcatcatcattaattcatcaacatcatcatcagctacctttctaatttgtccgtttcacaactgagcaatctctctcttccatgtgacacacttcccttggcttcttccttcccctttgttgttccaatctccgtacgtcaaggtttcttctggtaaagtctctcttcctcttcgtcttttcgttttccataaagactcaactctctccttcgattttcttcttcccctctctactctgcttctctgattgtgatatctcttgtgtgttcttctttctctgttttttcttccattgttgcttttgtctctgtacttcttgaatttcatcatctgggtttcatggttttcactcaaagcttgtggctttgagcttattcagatttcttgtagaccaagcactctgctttataattgccacagtgttctggtcctgaatctttgcttatgccatcaatgaaatgctcatcttcttcctgtttatgagaaaattctgaatctctgttagtttctcaggctgcttttgtgctctgtcttcaaatttcgaacacttgtctgagatatatttgtctgattccaaagatcatggaagctaattcagctgatcagaaacaaaaacctaactttcttgttgaggtaaagcttgtttcttttgcttaaagaatcttactgtttctgtagatgaacacacaattgaatgatgttttttattctcaggttaataacattgagaaacagctatggacattaatccattcaaagactatattgcataccgatgtttcagaattatacgcgaaagctggttcgacctacgagcaaatctttaaaagcaatctccaacacgaagagcttcaagaagtagagttctgtctctggaaactccactataaacacatcgatgagtttcgtaaaggccttaaaacaaatgatcatgccaagcatatgaaagcattcaagttgtttctgtcaaaagcagctgagttttaccagaatctgatttccaaagtcagaggatattaccacagactctccgaggaatcaggagagcaaaaaagcagattcttatgccatcgtttctacatttgtcttggagatcttcaaaggtatcaagaacaatatctgaaagcacatgaacatcctaattggtcaactgcagctacttactatcttgaagctgcaaaatcttggcctgatagtggaaatcctcataaccaggtaactaattcttcttccattactttcttttgtcatttgccgtttctgagtggttttcttacatttgtgtagctagctgtattggccacatatgttagtgatgagttattggctctgtatcactgcgtaagaagcttagctgtgaaagagccttttcctggtgcttcgaacaatcttcttttgttgtttgagaaggtgattgatccactgatacttctctgttatctgcaatgagattgtctttgccttacattgctcaaaatgcttgtttcaactactacagaacaggtcatctccattgcagtctctgtctactgatgcagagtttaactacttaaacccatcagagaaaaaagtttctgtgaaggaacgagatttgtcaaaagcaaaaggagaactagttgccggaattgatttatggcccctggttgttcgaacaactagcttctttttccttaaatccaggtcagtttggactatgagtaacatttgactgaagtacaacattatctcctcttttagctcaagctcttgatgagcctttctccaaaactgttcttctcttcacttctctctggtttgtttcagttttgatgagtttggtcgggcatttgcatcaactataagagaactggatgcagcgtttgcagcagatgatagaaatctagaagccatgttggagtcttatcaatttatggacacggcgagaaagggaccttataaaatcctccaaattgttgcggtttttatctacatcttccacaatttagcagaggctaatggatccgacatcgtgaaagaggaagttaagctaacaaatttagcattaactatggtgtttatcgtcatggggcgagttgttgagagatgtttgaagacaactcccttggattcttgccctctcttacctgctctacttgtatttctagactacttaccgtttctgcttgacaaggtagaagaagaagaagaagaatgcaggtttgatgagaagagcaagagtgcaatatcttacttctttggcaaactcgttgatatcttgaaccagttaaaggtgaaagacaaaaactgccctgctaaaacgttgttagctctctgggaagatcatgaactgaagtccttggctcctctggctcccatacatgcacttttggatttctcaagtaatatggatcttagagagagttttgatagagggaaggagcttcgtcttcaacggattattagttcagcaattgatatcacaactaggcagaagaagggttctcaaaagtggctattctttgacaatcaacggactcatttctacacaacttcgggtgaattgcaaagcaacggagagctctttcatggaaatggagagggtagaaacagaaaatgcgttactattggaccagttgaaatcattcctttggagaatgaaagatctgttcctgtagaagaggaagaagtcattcttctcaagccgctcgtaaggtgtcaatctgctccaatatattcttctggcattgcagcaaagccacttagctctgattgcacaacttcaggaaatcaaacaactacatccaatgacagcctaagacgtaccttatcactcattgggtctgaaagtttcagctttacgcaaggtcttaaggacacggatccacaacatttgcatctcgaagaaggcactgtctcaggaagacctccatcgctgagcgcgtgggtggttgacaagaacaaagagaaaggacgactcggtttaagtaaaccaaacggattgggccctattgatgaaacaggtcctgtctcagcctttgatagtctctccatcaatagcagcaccgagcatcctgcgtcttcctattcgcctcctactccgtctgctccactactgcctgaagacgcttcttggtttcataatgacgctagtactaacaaagcagagagcttctatgatcagacacgatatatggaactccccggtatcatgaagccatacacaaacccaccctttgttgggatttcttcttctgaatggttacgtcggtacagagaaagtaggaatcttggaccagcctattcctatcaagctcagggaacaaacaatttgagaaactttatggctcatggctcttccaagttcagtctcttagctaggtacgggacaccaaacgattcttctcaaaactcaacgtttcaccctcagctctacatggaagaccatgaatctagaggagagaagctcggcaacgttcaacaaagcacaacaaatccttatggcttcagtgacgatcccggaccgtttcttagatttctgagagaaaaagagtggctgaatgagaacggtcagaggctaagaggacctcctcctgcatatatgaacaactaaagatgcgagtgagtgagttttcaagaaactgtcctaagttgacaagttgtgacaactatagttatttcttctctctttgtgtactgtttctcaaattttcacgagaatggaaaatcatattaagagatggtttggttgtacataaacaaacaaagagaagaaacttgaaagtttttgaaaccatcaacttctttggtttcttgaggaatgtatatgagattagccttgagaccattataaacaagtgtaagtatgagaacaatctttatacaataataatcctctttttacatgggaggtataaacttagtctggaatagcttcctaaaagcaggtacaaaccaaaacagagaaactaatgttggagaattgagcaaatcaaatcctgatcacgatgaaggctgtcttctcaaatcaaagaaagaaaacaacaaaagacaggagaactaaggaagagtaatgagaaagtaaatgctatgtaccaacaatagaaactggatcttcttgttgtaccaatccagtcctcatatttgcttgatatatctgttgttaactgttgttctgttacacaagcgtctgcttctaccggtgtgaccatgatcatttggttttatcattcggtaacaaattcagctcctgcatttgtgtttccacttgtactaagcctgtctgagcaagaaacctacagaagaataggcattgtaagcaactaagcatctagtgaaggttaatacttaatatactcttcaagatgcataagtaaaaccctattagaatcttagaaaccttagagaacagacaggtaacagtaagataacacaaagatgtgatattttctaaggaaatacaaaactatgagaactgagaacccttatctgatatctaactcaatagcacaaagatcatgatgaagaataactcattaaaacaatgcaacaggaacaccttcagcttcaagataacagcaatgtagagaaatatgttcgaatccttaaattgaacaactcaaggattgatcaacaacacaataagacactggagaaagttttgtatcagatctaattacttattcgtctaaaaccctagaaagtaacgaaaagtttcaacaggaatcaacacagaaaaagctcaaacaaaattgagataagagaagcaaaaattgacataccaattgaggaggataaagagagtagatgcgataacaatgagaaagccaacatgaacaagcaacattgattggccactggtgaaagctacagagagcatgaaagctagacatagacccagtagcagaaacgcgaatctcaatgtgttccatgttggaccctggacaaaatcacgatccaaattagggttttaaccaaacatccacaaagaggtaacaagaattcgaagagaaattagtacagacattaacgcctggagctagagctccaaggaaaacagcttccgttgacgaaatctgagatttcttctccatctttcttcttcttcttcttcacagagagttcttctgggacgaatctgttcccgaagaaaatatcaattaaaaccgataagtaaaccggtatattccggtttcggtaattgcaagtgattactattatcagaattttggtttgatgtcaaattgtcaatcccatgtttatattgttgaccattgactttttacgacagactcaccgaatacagatcagaattagctacacatagacgtcacattaaacttgttctgatgaatctatcatcataacgtgctaaacctacatagaacgattttgaaacgagacgaaattaaaaccgacaagtagaagtaatagagtgtcacgtttgattccggtttaagctcttttattactgttggatcaatcaaatatactgtcacgttttaggttcatctaaaaatacaaacaaaaaaatgtcttaaaggcttagcactaaagactctcatttcccaaccgcaaccacctataaatgaagtcatctttaaacgaaactggacaatgagagtatgtattatgactatgagactacaaccacaagcaatggccatataaatgcgagcaatcaggaaaattgtcttaatcaaccgatgtaactttttttccttctaattcttttgcttaatgatatcatttttctatatgccaacagagatgggatgaatgatgaatccatcaacttttcttatgataaggcactatctttggctctgtattggatttgtagctcactttgcttagttatatccgtttacctaatcgtaatttcatagtatttctaaaccattttctctctatttgttagttttttttcgttgattatttgtatttattagtatatatgttttaatgttttatataaggtgaaattcagtttaccattttattataaaatgtaaagctttaattaatttacgatgcagtatgtaatgatatatacaacacgagaaataataataggcaaaatgtacgaaaaattgtgacaaaaatatgtataaggaaaaagaagagatatataatgggttgataaaaaaacaaaaatactcacgtatgttttaaattttagtgttgtaactgaacatttttttttagttttcatttttttttaaagaacacgtttacctttttttaccaaacatctacaaatccattcatttataattttccataatgaataaaaatttatattttaaatttatatatcctactgacatactcaatactattttagtatgcttgtgtggtcaagactatataatgagttaagacagatcagagttactagaaaaaaataaacatcaatattagtaagacaatatcattttatgtcaatattattaagactatatcatgtgcaaaaaaaatcaagaacacattaaaagagaaaatgaaaactatatattataatgaaacgaatgtagtaaacaaaaaaaaaactaaacaatagtactataatttagagcgacagatacgaccaataatgacatgattcataagtggctgctaggtagagattaaattaaacaaatgtttccggttcatttaattttaagaaatcttagttgtcacaaactctataatgatacatgagtgtttggacaacaataatagcctcttaattttctaagcttcttaattatatgttaaaattttccccgcccatccagtaacaaatcgccaagtgtaatacaagataatttatttttaattacatagaaagacagagattttcattttataatcaaatttataacgtgcttaaattttcgttaatttgtaaattagtaatactcactagtcatatcaaaagatttgactaaccaattttttttttacagacaatgtttttaattttggatttatattagggcttattacatacattaattaacaattttttgaatcaagttataaagaaataagacacagacaaaaattttaaaaatgtagaaatagacaaaaattggatagaagaattatcaaaattgcctttttgtttttgttaacgcggaattatgtattttttatttatttgtttatttcatcgtccaaatttttgacagtatttttttgtttgttagagaagggcgagagagagtgactttttttgtttgcctttgttaatggcttgtgtgtgagattcattgaattttttgaaaattctgacgaataaaaaccatatctaccaatcacaaaccctagatttttgttatcttcttcatccgaagattctctttgatctgtgtctccttccttctgattctcccatttcatttcattgattcttttgattcgattctattcgagctcaattttgtagatcagaacccagaatcgaatttgggataacttgaacaatatccttggtaacttgttgatctgaatttgagtgaagaagacatcgaattcaagtttggtgtgggagattttttttaatggagtgatgatgatttaaaggggaaggtaaagggaacgatgactggattgggtgttcgatccagtagctatggttccttggagaagacgggacttaacggcgtcgttttacctatccagatcactaccacgacgcgtaccaaaccatctaagatgcagaaagatagagaaggtattgtacattggatctgcaaattcgctggtcgtaagaaggttggcatgttgcttctcttcttaatctccgccgtcgtcttccttcgcgtcctttacgtcggaaaaggtaaatcgattctcgacgattttgggtactcatggtagtttagcttgtggatttagtttctaagttgggataactattggttcagctgaataattttagtatgcttttgtgtaccaatgtgtttgttttggattagaattgtggaaccaaatgttgtgtagagtggtgatcataatgctacttagagctagaatgtatttgatttgaagtttatgaacaatcaggcttgagatggttgtgaatgttcttttggttttttgtaactaggtgaagatagtcaggaaggtcaaggtcctccgagtcttcatttcaatggcagttcaggcgtaaattattcaaatatgttacaaacaaatgaagagctaaacatgaatattggaaatatatcgttcaaggcaaaagaagttattgtgttccctcctcctcctatacattttcttggttattcgcttcctcaaggtcatccttgtaacagtttcactttacctcccccaccagcagacaggaaaagaacaggaccacgccgtaagatatttagtcttgatttctgatttcttcccatttttctgtttcttttctgagatcactacaagattgttgttgtgaattgttgttgtgatggttgaaaagatctgagatttactgctgtatagatgttttgtaagagtattggtttgtttgcctggtttttgatttcagcatgcccggtatgttaccttccagtagaagaagcagttgccttgatgccaaatgccccatcattttcccctgttcttaagaacttaacgtatatatatgaagaaccgttaaacagagagacagagtttggagggtcagattttggtggttatcctactttgaaacataggaatgattcttttgacattaaagaaacaatgagtgtacattgtgggtgagtatctttgtggccttggtttacttcccctgtcttctttttttcgaatttgtgttgatgattgttccatcaggtttgtcaaaggacctcaacctggtcgaaatacaggatttgacattgatgaggcagatcttcttgaaatgaagcagtgtcgtgggatagttgttgcttcagcagtatttggtagtgttttgcatgatccttttctgttttgtagtcaatcaatccactcccatttctgcgtgtttctaatattagaatctctctatcatttttcagatgcttttgatgatgtaaaagccccacaaaatatcagtaaatatgcggaggaaacagtttgcttctacatgtttgttgatgaagagactgaatcaattttgaagagagaacgaggccttgatggcaataagaaagtagggatatggagagttgttgttgttcataatctcccctattcagatggaaggcgcaatggaaaggtaaatacacctatctttcagataagaaagtttatggaagatattatgcacgaagttagtccaaactgaaacatgaacttaatgacgtgctagatagttccccttattattacagtctttctccaaaagtactgtacccacactgctgtaacaacatccttttgctttagatcaggcttgaagttgttactactaattggagagcaaaaagttcttcttcatagaaacccaagaaaatcagatttgaatatacaacatagatctcacgggtcacggcacatggctgattccaaaatggacagagtaaagagagagaatataaatgccattgatatgctgatgctttgttctcttgtaggtgcccaagcttcttgtccataggatgtttccaaatgctcgctattctttatggattgacggaaaactagaacttgtcgtcgatccatatcaaattcttgaaaggtgaggcctatcatattttttctcagtgtaagatgaatcccaagaaaactctagtgatatgctgtatgtagtgttcccaatattccactgcaaccattttcaattgtggtggctatgcagcttccagcatttaccaaacaccaaccattcctctaatcatattagtgaattcttgtggtaggaatctgctagttccaccccttttttcttcttaggtgaatttccttaagcagctagctatacgtacttaacattcaagtacgttaaaaatattcagttgtttcagataagttaacggtttgagtttagaaggccttaagcttggtggttatgtttctggactgcagcaatttaactgacatctcttctcatcagattcttgtggaggaaaaatgctacttttgctatttctagacattacaaacgatttgatgtcttagtggaagccgaagcaaataaagctgctggtaaatatgataatgcttctatcgactttcaagtggatttttacaagaacgaagggttaaccccttattctgtcgcaaagctcccaatcacaagcggtatgtctctttagcttattctgtctaaaatccccttttcgggatcaaacactaataatatagacaactatatggttgggctatgcagacgtacccgagggttgtgtcattttaagagagcatgttcccataagcaacctcttcacttgtctttggttcaacgaagttgaccgattcacttctagagatcaaatcagtttctcaacagtaagagataagatcgcagcaaaaacaaactggacagtaagcatgttccttgattgtgaaagacgcaattttgtagttcaggtgattttttcgtctcatgctgacttagcctaaaagtagagttagtaaaaagatcctgactctatcattacccgtttgtatcgaactctcaaatgcagagatatcaccgagcagaacaagaaagatttgcaaggcaacgacctccggtgcctaattttcctcctccaccaccttcgccgcctccaccagttttaatcagcagcgatttgcctagaaaaatgtcaagtggaagagcaacgccgcctagaagacgaggaagagacagacggtctggtcaaaggggtcacaggaaagctaacttgccagtaagattaccagattcagcttaagagttggcgtccgtcttcttcttcttcttcatggtcactctcatcaccaacatcacattccaattttaccacacagtatgtttattttttttgtttctctatttgattctaaggattcaaaatcaattttttaatgtatatatatacacgaacattttgtacttggataataaattatagtttcgaatttttgaagttcaaaatctaccaaagagaccatcggagtttggttctgattgtaatccatcaacttcttacaaattatcgaagtctcttgttatactttcttttttttggtcatacaaatgtaaaagaatttatattggatatttatactttaatagctcagtgtttaatttatttctttgaagaacttaatttttagaatttatggtcatgtgactcatgtgcgtatgctgcaccaattatgtctcgtagtagacgatcttgaatttatgatattggcttgaatgcattatgcatatatctaccactatgtcaattcattagaattcattgaacttttctttctgggccatgattataggttccatcataaagagaaatcgacttgttggtaatcaataacgaccatttttcttttctgttgttgataaataataggagtataattatgtttgggttatttacgtacacatgtgtctcacataacacatcgggtcaaaatcaatatcgccagtcatgttttcaacactggaataaagtcagcatggaactcacatcaatttggagaggaaagatattttctctgactcaacgttgataagtatatctaaagtcactctttacttggcttattatgaactaacaccaccattcttgacttggtcttaaagctataataataatgtaacatactaacatatacttcaatattctaaaatgcactcacatcttatgatatttcatgcgagtattacaatatatcaacccactatgagattccctaagactattactactgaatatacctaagacccacatcttatggtatgcactcagaaccgactatatctaaaccaaaacaagagaagctttgagtaatttgcggccgaaataggtctatatattgtataggccgctacatcctactatattatttgggaagtacattttaaatgtaaccttaatttttgtaagtaattacataggtatgccattagaaataaaatttaaagagtaaattaatttatctctttaagtcaaatactaatttaattaattaaatttaattaaaaaacgaaatacattattaatttccaaaaataataaccaatcaaaattaacatataagatttgatatataaatttcaattaatttaatttaattagaaaaaacaaaatacattattaatttccgaaaaagtaaccaattaaaatcaacaaagtagatttgatatctaaattatcatattaattttttattaattattatagttcacttctcatctttatatgattctatttttttgaaaaaataaaatcatcattataaaaaaagaattagatttttcgcatatgccataatttgaatttttaaaaacgaatataaattgttcaatacatgaaaaaatattataacgggtgaaaaatagatttaaaaaaactttctactgagtaacatgtcataatttgaaatatttatattcaatttcatacatattatattgaaaatttataatcttatatactacaataattaataacatattagatttttttatgtgtatgatgtgattcaatttttaatacaaggtggaaaatcctataatttacgggtttagatcgatattaatacaagatggtatactacaggtaaaactcttaaattaacaatcaaactataaatgtataatcttaaacactaaacaatatagataatatcaacaaaacatatacaactcacagtttactatacatttataatcaaataaaataatatcaaatatttttaaatcatctttacagtaaaagtttttagtttaactaaaatataagcgtacatgcggtatactgcaggttaatatctagattatagggcttattggatctaaaaacgggtcatcaaagatttcctaaactgaagcaaaatattctgaatattcgaatatctatctgttaccaaattataaacaaataagttcgtaaaacaatttaataattttatatacgaaatcaattaaatcttaatcacataaaaattagcacaaaaaaaatattcaacaattaaaaaattatcaaatctctgtgttatataagttttgatactatatttgaataaagtgtaatatacctttttaatttgtattctttaactaataaaaactaactaatatatttgctaatcttatacctatcaaaaccgactatcgtttattatctctataatatttttacaagacttttttttggtggatttaagtaaaagtgcattcgggttataaggtacattcccgtaataaataaatatagtgcactcctatgttattagctaaaatgtttagattataattcatagtcatatcattaataaaataaatggcttttttgtaagacggatttggagggacgggtttttgaataaacattaataaaaaagtaaaatataattaatccaccgtttcaatacgggttaaatctttaatttattattttttaagaccactgatattaaacatatcaaatcatccaaatttagaaaagattatataaaaccaaaaatgttatgtggtatgtataatgttactatatataaaattaaattataaaatataaatgtattagagaatgatacaatttgcaaaacttttatatataaaaaataattcttaaaattttaaaattactactttaaaattatcacgggacgggtaaagaaattacagaacagattttattttggaattgggttatatggtggatgtatttgaatcaatatttaaaaaattttaaaatattattaatatgctgttttaataggggttaaaacttcagttttttaacaattgtctcattgattcgtgatatagcgttacttaacaacaattataaactgtaaaatgtaaatattttataaaaataaaatttgcaacttttaatatatattacttttacaaaataaatcgttccgcggtataccgcgggttaaaatctaatttgttgatgtatttagtatcctagcgggtagaaaccttgttaaatatagtggtgtagaaaccataaattgaatcacttctttcaagccaacgactgactacgcgagttcaacaatggagctataaaaacaaaacaactagttgcaacaaataataatcaagtctacaaacaaaatagcttaagtcagcattccatgtattaaagcatatgacaaaatgattgattacaatagtccgtaaacgaagacaaatggatactaaagataaatttctaatcaagataacttttctataacaatatcctcatctaaagataaaaccaagtataaagatatttctcttaaatcacgtctgttttttcttctcgaaattttgttttcttgctttttatacacacaacgaaaatttagcgtaacacagagagacgatttgtttttttctatctccacaattcaactctttcttttgtcatactcaatgtatgtagagcagaaaataacacgtctctttttttatcacgataaaacaaaggaccatccttagttggaaattcaaaccctagtagtaagtataacgttttaaaatcgcaaacgcgcccgctatgttatgtcccaccgttttaatttcccaacttccttgacaatgtatcacacgatccaaaaccacaaacaaacaaaacacacacaaaatgaaaaacatataattgctcattgacccctcaagctgatgagaaatatcatcaaaaaggccaaaacagaggacaacaaaaacagcaagcagcaagaagaagatgaagaatggtttgataatcataaactgtattatcctcactataggaacatgtggaggtcctttgttaactcgtctctacttcaccaatggcggaaaacgaatctggttcatgagcttcctatcaaccgctggttttccaatcatcctcatccctctcttggtctccttcctcagccgtcgccgcagcaaccgcaaccctaacaacgcggaaaacaagcggaaaacaaagctcttcctcatggaaactcctctgtttatcgcctccattgtcatagggttgctcacaggacttgacaactacttatattcttacggattagcatatctgccagtttcaacttcatcgctcataatcggaactcaactagctttcaacgctctcttcgctttcttgttagtcaagcaaaagttcactccgttctccataaacgccgtcgttttgttgacggttggtatcgggatccttgcgttacacagtgatggagacaaaccggctaaggagagcaagaaagagtatgtggttgggttcttgatgactgtggttgcagctcttctctatgcttttatattaccgctcgttgagctaacttacaagaaagctcgtcaagaaatcactttcccacttgtgcttgagattcagatggtcatgtgccttgctgctacttttttctgtgtcattggcatgttcatcgttggagattttaaggtaagaaatttacagtttttttcacgttgtgtttttagtataagagagagtatcatgggatgatcttgataaaaaaaatattatgcagattttgatgaagactttagctgagtttttggattctctatttttaatgtttttctaaattatatagtttttttgttcattttatgatagaggccaaaatttagtctggattcccaagaaatgaggaatactaagatttgttcttttgtattattaatggagaaaatccatggaaacaattatatatatagaaattatttcagaatcattggtactagactatactagtcaaccaagatatattggtatctgtatttaaacattttctaaatacatatggatattatagaatatttaacaattttaatatagatttcctggttataataaaatatgtgattttatgtaatatttgtcttcctgatcttttattaaaaacaaatattatataaaatacaagataaaggtttgagcaatttataaaatatttaacaatttcaataaggttttatgtaatactaggtaatcacccgcgctacgctgcggtattttcagattttttgtatcgtataatttaaatataatttttaattatctaatcatttacttatgtaataagtaattattcttagtattaaaatatattttttctaacaacattctcaacaatgcattatacacacaattcctaaacaatgttcatcttaaactaattaaatagagggtaatactggaattctcgaaacctaagaatttgatgattaaatttcttacatactcttcaccctcggcgatttattatatagatatataacaatatgcaaactattcaaactattaactaatccatgactactatacactcataatttgagttaagattacagaaaaaaatcttctgagtatgagaaaaccaataaaattattttattgaacaacatgtaataacaaaataaatttagtattagtacaattaaatatgtaaaattaaataataaatacatcattaatctataaattaaaagttgaaagcttacattaattattatgtggacacatggcacatgttaaagtgatgatgtgtcaatcatatggagagagttggccaactttcatatatatgatttgtcttccttatcttttattagaaacattatttaaaaattgttcaaacctttatcctgtatttccatatctatttaaaattatgattaaacttgagaatcaactaaaatcatcatcatacatgttttgtaggtgatagcaagagaagcaagagagttcaagattggaggatcagtgttttactatgcattgatagtgatcacaggaataatatggcaaggtttcttcttaggagccatagggattgtgttttgtgcatcatcactagcttctggtgttctgataagtgttctgcttccggtgactgaagttttcgccgtcgtttgtttccgggagaagtttcaggcagagaaaggtgtctctctacttctttctctttggggatttgtctcttacttctacggcgagtttaaatccggcaagaaagttgttgataaacctcaaccgccggagacagaactgcctattcttcctgttagtgattatgttgcttaatttctataactctataggattataacagagcattactgttatgttttgttcctaatattatgtgtgattgtgtgttttgttattgttcttgtgtataagtatgaataaatttgaaagatattgagctatttgataaatgcaaattttaatacacttgtagtagaaatagaatgataatgataagtaaaagataggatatttcgtatttgataaaatcacatcctatttatcgattttataaaataaacatttcacacttttaatttaagattaatataatttatctatttaatataaaaatttgtatataaatcaaagaactaatatagaaagaagaagagaaaacaaaagagatagagtcaaagaaccaattaaccatccttaaaatcttctaattatagagagaattatgaactgaaaatcttaatgtcattgcactaaatttagaaagaaataaatccaataatcaaaactgtagaatttgatggaaacgtaaattaatatgagagatatgatattatctggtctataagataattactacgttttttatacgaaattaaacagttagcaaaatttatgggtataaaataggaaaagtcatgttttagccattgaagcctcgttaggtaaaaagaaacacaaagatctatcacgacagaatctaaaaccggaccaaatttgttccaaaacacagcaacaccaaaccttataactaactccttcgaccaccaaccttcattatccacaagaaatcagacaagaatggtgaaggctcttgtgatcataaactgcataattctagccataggaaactgtggaggtcctttgattatgcgtctctacttcaacaatggcggtaaaaggatttggttctctacgtttcttgaaactgcaggctttcctgttatcttcattcctctgctcttctcttacattacccggcgcagaagcaacaatgtgggtgatagtacaagtttctttcttatcaaaccgcgtcttcttatcgccgctgttattgtaggcattctctcagggtttgataactacttgtatgcatatggtatagcttatcttccagtttctacagctgctcttatcattgcttcacagttagcttttatagctatcttctcattcttcatggttaaacataagttcactccttttaccatcaatgctgttgtgttgttgactgttggtgctgcggttttgggaatgcataccgaaactgataagccagttcatgagactcacaagcagtacataactggtttcttgattactgtagcagcagctgttatgtatgctttcatcttgccattagtggaacttgcttaccagaaagctaagcaaaccatgagctatacccttgtgctcgagttccagttgattttgtgtctccttgcttctattgtcagcgtcatcggtatgttcatcgctggtgatttcaaggttagtcactcttttgaatctgaaaacatacaaaagagtttttaacagagacttgagccctttactgtttttgcaggccttaccaaaagaagcaagagagttcaagcttggagaggcattgttctatgtggtggctgtgttttcagccatcatatggcaaggcttcttcttgggagccattggattaatcttctccacatcgtctctcgtctcgggtattatgatatcagtgcttttgccaattacagaggttttagctgttatattctaccatgaaaagtttcaagctgagaagggactttctcttgctctctccctttggggctttgtctcttacttttatggtgagataaagtctggcgaggataaaaggagaattcagcaggaggagagtcaggagacagaacaatcttctttgtcaagacccataagtgagtgttaaaactcaacgaagcatggcttttcgtttaaagacatcatagcactcatttctccgccaagtagattagaagatatgtttgagaaacttgtgggattatgccgaaaacacaatcttaaaggacttttttttttcttttctttatttcagcttaacttgtttgatgtctcttattattcacatcaaatgagtttgtaatagaattatgaggtcaaacaatgacactctctgttatgctggtgagctttttgttctaccagcaatagatgaaattagtcttcatttgtcttctgttgaatgcttttatctttcatctctcgtggtggcttcatcccattaacctgctcaacaatagcgccagcagcaccattaacgagaagtcgcggatgatctgaggacccgttagattccacctgtaagttcaaccagtagagagcttctggtaaagcctgtttggttcatattcatgattcttcattactataaggaacaatcgctagtgaggaaataacattcagttgaatcaaaatgtaaagaaaaagccccaacagacattttggctttcttacactgtttcccttagagcttctagttatttcttataagagaacctaggtatctcatttttcaattatgtcttgttgttatctacatatccgccttttctaactcttatttctaagcaggcctagaaaatgtaccagtaatgtataagcatcactaattcttctattgtaaccaactacattcctttgaggtgaattataccagatgtccatttacgtctaaccatctaatattacacacaatatgctgttataaacacaataataaaatttacttaccaacttccttcagcagagtcgctcaactcattgttgatttcttcctttgcaaactcttccagtatagcacgctgacgttcattcacttcactagtagatacaaggaaaaaagtaaaccgcataagcatataccagaaatctatcaatattagctcttgacggaaatgaaaagaagagaatccaacacatccacatgccaccagaacatcaagaagcttatgtaatcagatttaataatcagacggcagggaaattaacacaatgttgtcctaggaaaattatttcaaaaaccgtaactttagagcaacaaagtgtcttttccattctaaacactagtagagtttttagcatagcataatgtggatgtctccaacaagtgtattacttgaacttcaagtaaaagaaatcttacgtaggaaagttaacgcggaagcgaacatactgatctccatgatctacaaaaaagccttgcttcggtagtcctgcaggaactaacctattaagaagagtacacgcaaatacacaaaaaaaattgaacatataggctgataattatatgtacctttgcctcttaaaacaagaagttgatcaggctgagtcccctttggtatctgcaacaattacaataaggtacctctattatctccaaagccttgagatctaaccttcctcttggtcagaggatgaaaaccaacttgactcaaattataaacaaacaaaatattatatgaatctcactgggagacgaatcttacatctagctgtatcttgcctgaaagtgttggcaccacaactttgccccccaaaatagcctgtcaaataagttttctaagacatgtccagtatggctcaagggagaaatagtaggaacaacgtgaaccataagagatgaaaggatgcactataatagaaaaatactgcagccgaggtactatggcttggtggcaaaatagtgcagtagcatgcacttgagttttatgactggggccatcaaattgagtttgaaccgatatgccacattatctagtttagagaataagcgcatcatatacataatgataaagatgctactagctaatattattaaacctagtagtttagtaaacttttggcacataaaccagttgaataggacaaaactcattaattttcagctagactccagataacttttctctagtttatgtcctctaagaggttttattttatcataggacatgcctaaattatgttactgcagagctttatcagctagcagttaaggcttttgagttttgaccacaaagtgtcaccatgcagaaaaaacatgagtttcgaaggtactgctctgcttataacccaaaattcaggattcaccagtgtgcttacttgtgtaaagctaatattagcatccacatatatatctgagccatccctagtgaaagttgaatcattagcaacctgtgaccaaaagaagattagatacgtgtcaataaaggaaaattcagcatgcagtaagaccctaaatgaggcaagaatgatgatagaattgaagaatactttacaagagagcatgaacaattgattcactggatgtaataagtcttgattatatagtgacgcaacaaacaaagtagagtagcaatcacatataaatctgtgaacattggtttagatcatttttgaaatgaattcgttcaaagtcaatatatgacttataacatgactttgccacttatattaactgttttatctcttaggttaaattgatcaatggacttaaatggtagaccaatcatcaacgtcaagggtgagtttgattcaaacttctctaggcacgtcttacaaaatatacaagtacaaatttgaagaaaatacagatgctttaacaaacctttagtttgatatacaagttcccaggttgacttgttcttgaacttacattaccagcacctacgattgtgattgtagcttcagactccacccctgtggtcaagtacagagagaagaaagcaaattaaagtttgacagaattttgtcatcaaaaacctatttcactatctaatccaccaaagtcatgtaagatgataatcggaaatcacaatcccaaattcattgtttcatctttgccccaaaataccaagcacagaattaaccagaaaatgtaaattgccaagcataatcttagaaaagaaaaagaaaagccagtcaaacaataagtgtgaccgatatctaaattggattacatctaaaccacacaaatcctcaaagaaaggaacgtaacagagtgaatgaaatcttgctactcgttccatagcagacagacatgtttggaatcaaaaccaagttaaagataaacaaaagcatgaagatttagactaacctccagggatcacaagttcagctgtctttgtgccttccacaatacctgatcctctacaagacatgcagtattcctgaagaaataaacacatatatactcgtaaccagtgccagagagataactactgaagcgtcaataaagtagctctttttctcaaaccttaataatgtgtcccgtccccttgcacgtctggcatgatgctgtaaaaggaggaatagttacctgttaaagagacagacagcatagtactgtaaatagaaattgtatgatttattaaccctccaaagaaaataaaacttatatcctctaaatggtacttactcgtccaacccccctgcatgttggacaaatgctcatggcagcatcgctagggtggccaagcccatctgtaaaatgataaacaatgcgagattgggattcatggttttgcaacaatattactttcacccaactgagtttactcgtcctctcaaagttggctgaatcagtaactttttaaagacagaaggctgtaaatgttacaagaataaaattaaaaaaagaaaaaaaaaaaagagacaacaaactgtagatacatgtacattaacatcgatggatcacagagccatttccagaagtctattcttcgttaagaaaaatattttaccattttgggcaactgaataataatgtaccatgacgagttaggactcctaatttaaagtgtctatactctcaagtatctttacaggaaatcttgcgagccatgactggcttgtcaatattagtaaatgcaaaagagacaatataagaaaacttctgtggccactcaccacaggaatcacaaaagacatatgcatcaaaagacaaacgttttgtgcacccttctgcagcttcggaaagagaaagcgacagttccacctattcaatttttaacaatataaacatgtgtattactgaagagccctacacaacaagatttatataagtcaaccagattccagttgtataaataaaagagagaatcagagaaactgacccgaatatcaggttttatctgattgttctcaaatatctgaataaagtttactaatgttagagatttaactaatcacataaaaagatgagcaaaagggaaacataataatgtacctcagaaaaaatcttgtggaaagtatccgagaaattggactggtatgcacgtctgaacctctctgaatcaccaccgtcattatttacataatccgaattccgatactgcagctggatcgagtgataacatcaagaaatatatttagtgatctcgccaccagataaataagaataaaaacaacaaaaaagcgtaccttatcatattcttctcttctttccgaatttcccagggtctacagttttttaatccaacacaaaagtatatcagaagatacattcaaaatacacagatgatggcagatggaaaagaaaaaactacctcatatgcctctcttatttcctggaacttcctttttgctgacggattatttctatttgtatcagggtggaattttttcgcaagctgcaacaattgtgcattcactcatcaattttgagcagacaacttttactaatagtttttgcttgatgtaaaaaaatgtttaaagctgaagaacagtccactaacaatgagccgaaagactcacctcatgaaatgattttttaatctcctcccgtgtagctttaggagaaacaccgagaacatcatagtaattacgagcactggagttgtttatacctgagaaccattatccaaaaccaaaagcatttaatgaataaaatgatacaaaacatcattttattcattagcgtgaatgcaaaaaaacaagacctgtagcgtgaatgtatcgctcgaacaacggcttctgagaccctgcaaagagtcaaaacttccaagtaatgaatgcatatttcctatagtctgtagataaacacaaacatcaactggaaattccctcatgcccctaatgttagctaccacggagacctcgagattacatttcgattctttaaaatcaactcttgagttacctttaatagtgcccaatactttgataccccttcctgataaaccctaaaaccccatttcagctaaaattatcactacattagaaattctaataaaccccaaaaaacttgacattgtcgttggtctgttgcatatacacctaaatcagctcagagaaggcgataaacctcgaagagcatatgaatgtcagtttttgattcctttttgaaacaagcaaaaattgacgaaatcaataaccctagtttaacaacttttatacattaccttgacgcaatccgatcgcggaatcaaaagttcttcgagcttgtacatgccgcagaacctacgatataaacataaattacaaaatgatttcagctctctcgaggactcaatttcaaaattgaaaggaagaagaagaaaacgatgaagctaaatctagagagggatgaagaaaacaaacccagttgaatcttcgcatgactcttgtgaattcaaagctaaacagagaggaaaaaacggagaggtttttgattttgagagttaaacccttagaccatttccatgataaattccaaacaaacataaatcaaaaatattaaaataataattttttaatcagttttttttagaatattttctgaaatgagaaacttggagaaattttatctctcttccaaatgtcatcttgtcattaatttcttttctttgttataaataaaatcatttatattttataacatcaattaaatactttatatgtttatttttttttttttttttacttttaaaattcataaaattaaattatctatataacaagctctattatatatatgtttaaattatatacgaatattatttaattggtgttagttaagcattaaacataataataacttataaatacaatagtttttttttaattagaaaacaaacatttaaaattttctatttttattttacaacatttttggcaatcgaattcgacttcgtgatagagatatgcaccaacaactaaaagatgacctagttgagcatatatgacaaaagtttggtgcattatcaaatgaagagtaaaaccataatagataatatagttagttttgatttatgttatcatggttttatatgtaatttctgtgtaatttatatattttttctatttaatttatgttatcatggttttatatggaattttatgtttaattgatatattttttattatgattttatatgtaaagtaatgtttaattatgtttaattatgtttaattatggttttaaaaataataaaactatttaataatataattgtaaaaataataattgatatgtttgaaaatattgtagagattttaaatttaatataaaaaacatataataatatgttaatgttaatgagatactcataagagtatttcaccaatggaagcacaattttagtataagtttctctacttaaattaaaatattaataatatattatgaggtactcatggagtatctcaccaatggagatgctcttacgcatatgctgacgagagacgagagaagagacgttcgctaaatcttttgctttctcgccactacgtccagagtctctctctggttcagaagactcgaaatgggttaaacacgtattctctcattctccgtagttaattaatttagtgaaacggtaaaaacaaaatggtaaaaaattggcggtcgttattttgtagcggtaaagaaaatagtgagttagactatttacaagttaactgtttgaattaaaagttgaaagtgatttggaaaaagatgttgtagaatttcttcaacaccgttaattttgtgaataaaatccttgtacacatatagtcttagaaaatttggaaaaaggtttgataaatgtaacttagatgctgcttggattataaaaagtaagctttatggatacggacttgagttcccaagatcatttaggttcaatctgattttgaggtttatataagaagcttcatttaaaccgttgagtgtttgagctatatgaaacttcaaaaaaatgtcattcgtttaaataccatcaagaagaatgtgaatcaacttttctttttggatgaaaactagttttttgatatggtaactatgttttcaacacaacaaaattttatcgtcgaatgtccgaaatgataaagacactcttaaccttcatcggaaaaaatagcaattttttgtggtatatcaatagcggttacaatctaacttgttttgttgttgttattatgattagaactgtcaattgggtggaccgcatgtgggtttttacagtccaaatacacacggacggattatggtctggactccaaactaaaaaacataaaccaagcaatcaaaaagttagaataagatattttttagttaaaacaaaaatcgtaagtgaagaaggtctgaatttcttgaggaagataaacgggcacaaaaccggtgtacatacatggattatggatatgttctagaggaaaggtataattgaatactagtatccgttacagaaactaattgcattaagtttcgtctactgtttaagaccgcacgagatatatatgttagaccgactttgggaaagaggctacttaaattatttacgattaataatgccaacgtaacgcggacagacattttaattcaattattatttgttgcctgcgagattcgaaccatctcttatttcattacttaacccaaaccaaaaaaataaaaagttcatttcgaaagaagaagaagaaaacatcaaatcatgagtgggcaagagaatcatgatcatggccggatctcttctacgcccgccgccgcgtcggagccttccaaggctgctgctcactcctctgactacgctccttaccctaagctcgatcctaccgacgtcactcctcctcctcctcagcctattcccaccggtgccgccgcaaccaccatgccagcggaatccaatccttacgtttctccttcccctgccccaaggagtgagttcttcttctctctatccgatttcgcatcctaatccaatttctgcctttgattgattgattgatcttggtttggggacagatacgatggattcggtgaaggatacgttagggaaatgggggaaaatggctgccgacgccaccaagaaggcggaggatctcgccggaaatttttggcagcactgtaagcgcttcttcttcttcttcttcttccccctcgattagatgaattaccaattaatctgattaccgtctcttggagaatacgatggtattggttatgccccttctggttaagttagtgttcatcaattggcgcttcttcggaattttacttcgcgttcaaccaccgacactaaatctagccaacaattttgatattcatgctcttccgtttgagtttaagccaattagttctttgtatctggttattgcctttgactcttgaagcttctctagtataggttgttttggctttatttctccgcttgtgtgatgaattagtattatatacatatggttggagggagggatgatattttatatgaattgagacttgagagtatacgttttgatatctatcctttctttttcagtgaaaacaggcccaagtgtagcagatgctgctgtttcacgaattgctcaggggacaaaaatacttgcagagggtggatacgagaaggtcttcaagcaaacatttgattgccttcctgatgaaaaacttctcaagacctatgcttgctacttgtctacatctgctggtcctgtcctgggagttatgtatctttcgactcacaagcttgcgttctctagtgacaatcctctctcttacaaagagggtgagcagaccctgtggagctattacaaggtatactcgctctctatcctatggttactttttctttctaactcttttattttatatctatttacatctaagaaaactatttgagaacaaagattcagcgaatgtaatatttgatggtgacatgataaagcgttaagtgagttaagtcattttcaatgcatctatttacatagattcatagactataacaaattttcttgtcatttctagttattgacgtatagaacgtagtgtgtgtacgcttatagtaaatggaaactacataatcattctaacgatattgttgagtagttgcatgttagttcctatgtagacaattaggactttagtggtttgcctaagagagtaagctaaatcttgtagcattcttgataaaactaggggagccattgaataattgttagtttgagagtttggactggttctaatgtaaacatctaacatgagctgaaatcctattaaaccaagcagaaagcttcttgacaacatgatctttggaaaactgattttaagatttgggtggttcttgagaaccttttttcgttccttgagaaccttgcacttgcagtctattttctgtcattcttccttgtaaagtctgtggctgatgattttgatgtgatgatcaggtggtacttccggcgaatcagctgaaggcagtgaacccatcaacaagtagagtgaacacatctgataaatacatacaagtgatttccatcgacaaccacgagttctggtttatggggtttgtgacttatgaaagcgctgtgaagagccttcaagaagcggtgcagtcacatggtccgtgaaggtccactggtataaatggcagctcttagtgatattgtgcattaatatatggaacagtgtgttttagtatttgataccatttcaatgtgttctacattttgtcctcttggcgtttactcataaacattgcttttgttcatttccttttgtataaaattatttcttattttttttgagggaaccttgtcctttagatctaacattcatgatttgtattcgtgttctaagttggattcggtctttggtttttgatgagtttaggattttaaaggtgatcaagttgggcgctatagacaaaaccagcatttagaaagcccaatatatcaccgatgggcctttgaaaagagcccaaatcgataataagcatgcatgggagaattggtgacacgggctcattacaacactttcatcatagaagatcctatgtttaatgtgtttaaaacaaatctggtatgagttttggaagatagtaacattgagtatatatgtggaaacaaatctaaatggtggggtttgtgcaatcgcctaaattgttttttacttgcattcgttatatgcaaatatctaaatgattaaaaccaaaaccaaaaatatctaatatgatatattaaaatattaagcttcattgtatcattcttacgaagtgaccaactttagaagttagcgaattgtctgtcattaagcctattgctccttgtcgtcttattctttgctcaccaacgagctacgtcctttgaatttcttattaaagttgttagcatataaactatgactagtgcccatcaaatttgaagatttagcatttggactcttcttgtgttaactgaacatggtcagtcttacaatatctatatattcaatggttatcgagtgattgtgtcatgaaatgttaatatagttggatcttttaaaaaaaaatgtaaatatagttgaaccatatacatccgttgaaaacaacaacagcaaaaactgatagctctgaaccatctttgtaagagtgtgtttgcgactacgggagtcttgatatcaaaccgaaaccaccctatatatgaaaaagcttcataaaaccgatttctcgattactttaataagatggcatatcgggtgttaaatgtgtttgtgctacacaaaacaaagataatgcgaagtttcacacacaaaaccaaagccgtaaacgcacagaagaagctacttctcgtgagcatgagttctcttcagacgttttacctccccacaatccataagctacataaaaccgatctccggtttccagattaatttaccattagtattttacaaaagtttgtaagtaaaagaaaaataaggcaatcatgcaaaatcgaaaaaaaaaaaagatggcgaaaaggaaaagaaagtaaggcgggagtggcaattcaaaaccaaaataaagtaatgaagaagcgagtcaaagtaaggcaacataattacgtacactatttgatgagtcaaacctacatctttctatgaccaaatttgagaggtggctacttctcttaggctttgcaacttgaaaaatatgttccgcatctaatctaataataggatgttgtcatgttcatatgtttcgttgaaaaatattaattctaattaaaactcgtgttaacatcaggattggatttttatgttcatagtgataattaaatatctccaagattagtgtaacaacaacaaaaaaaagaataatacttatatcataatctcaggatgatcatgattgctcaactaagtagggattgggtcaatcactggttaaaagagaagaaaaaggtgaaatgattattctagagttttcattaaagttgaaataccttaaaaccaagattgaaatgtctaaaaagaacactcgatacttccttttaattccaccggtctaagtcttctttcattttatatatttgtataacctaatgccgtcacgcacgttaaacatagtcaaattctttattcatatattattattttaatcgcttcttaatcacagttaacatacttggaccaaacctagtccatatatccaacttttaaagcatggatgtccgataacatagttgaaacatatacatataaggtgtgcataaaaatataaataatatgtatgcatgaaaaaaaagaaaaatacaaaacattactaaacgaatggaataaaaaaaatctgtatattaatagatgagtatacttattagtaaaaatttattttaaagtaaattgaaattagccaaaaagataaagtgaaaaagatgtaaaaaattgaatttttcttgaaagccaaaaattatttgtttgggcccctatttgtttaccaaataaaatgaaatgaaggagaactcatatatttgaatatgaaaattgaaaacaaacacatttttaaagggagataaattcttttgtatgtaaaatactctcagtgtatatatatacaaaccaaaacttcatttcatttgttcacactgaaactccaaaactctatctctctctctcctccacacaccaatttcttcatgaccttcttcttctagcagagaagattaaagaaacccccaaatccagcttatactaaatgggtcatgataacatcacaaagctcgggagtctactcgtaaagctacacaaaggtccttcaagttggctttgtcttcatcctcgaccagaccgaaccagcaacggcggacgaatcaagctcgtcagatccgacggttctttacaagtctacgatcgtcccgtagtagtctcagagctaacaaaagacttcccaaaacacaaaatctgtagatcagacttactctacatcggacagaaaacccctgttctgtctgaaaccgaaacacttaagctaggtctcaactacttcctcctcccatcagatttcttcaagaacgatctctctttcctcaccatcgccacccttaaaaccccacaaaacggtggcgttttggtgaagaagactcaacagcaacctcagccgtttcttatacaaaagggagagaaaggagagcgtttaaggatccgtgtgtctgaagagttcgtgtcggaactgatgatggaagggaagaaaaacagagtaaacgaagaggaagaggaagaagaaggaggaggagaaggagaaggtagggtttgtactacggtgaagttgaagaaagactatgttcaattggttggtttacgtagatggaagccaaagcttgagacgataacagagactaaggcaatgaaagcagcaacgatggagaagacgaagaagaagaggaaaaggtttactgtgatgaagaagaagtctcagagtgattcaagttcgaagcgtaaacttcaatccaaatccaagtccaaaactaagaaaagtattatgaggaaaatagattagtttttgtttttgattagttagcagattcgtgtgttggtgatacatagaaattgttgaaatttgatgtaaagaaactgagattaattaaccaaaagggatagtaattgtttccgaaattgttggattccgcagatttttgtgttataattgaattaacgaatcaaaacacaaaactattttgtttgttactactaattttcgttgaacattaacaagttacttttgttctgctaggaaaaaaacagttgctttcgtacataaacgttggaatctttcgaataatgttaaattgtcattcaaataaactgtagtttgaacgacctatcgataaactttctgaattcatttttgtcaaaataaggagttttctttatttatttttccttctattttggcaacttggttttattgggtttttaattatttgtttataaaaatatgaatcaaaagattatatacattttgtctttagttgccagtttgaacgaccaacggataaatgatttttttgtatgaaaataaatttctgtcatttttctggaaatgaaatttgattttgtcagtttctgtcgaattttggcggtttctagcacaaaattgaataggataaagttattaatatataggagctaaatatattttcgatttcatataggaaaacatttatattcgaatgcaaaagaatataacaatgggaaaaaaattgaataaagaaaatgctctctttacaatggaattaacgaaagtgattatagtttcatcattttagtcattttcatttttgaaaaatctttgaattaaaaaagaaagaagcaaaactggtaaaagctggtcgtaatttgtgataaatgtttgaatggaaattattgggaggagggagatagagaaggcacgtgtttgtaggagtgttttttggtgtcagtctcgttatttgatttgttaactaaagtgtgaaaaagagacaaaagaggagtcaaagaaagtcacctaaagacatctctcttttctttctttagcagctattacgaaatagtagtagtaattgtaatagtagtattagagagtagccttcaatttacgacgatgacgaccccaataatttagttttatataatgttaaaaaattaggtttactgttaaaaaacatatctctagattggaatattggatataccaattatcttctggaatgtgattggattaagacgcattgactccatgatcctgcctatcttcttggagacttttttttgtttgttggagttctaaaatttatgatatctagcttcattatttttgctcgtttttataagatccaaacaaaacgtactcgttgtttcccttctatgatatctatcgaaatgcgataggttgcaaaatgcaaatcactagaagaaaactaaaatatattaatatgttgaggagtctgaagactagagttcatcacatctatttatctatagttctcaacctaactatagtgttccttgttttgtatgtttatctttatagtatttagttatgctaaaaaaaaactctaaatttagttaattctatggatttatttctaaattagcttacattatttttacaaatataatgttaaattaattatgctaaatcatatttacaacagccttgtttagttgtttttacttgtttttttatttatattttcacacaaatataacttaaatctcttacaaaatctaagaaacatgaactcatttaatatcatctaacaaaacaaaaaaccacttttccaaacactttgaattacgtttacaataacttttgatttatataacttaaaatcacactattgaaacatttaatataattatatattttctgttatgccttcgtatgggcctatataacggggctagtgagttcaggcttttttccttcagttgaagtaagtttccatatttggaagaaatacggttctgttctttccatcttattcaccgtaaatccctaattcaatgaagcaatcgttcgaaggattcatgaaaactgcgatggagaagaagacgctcgatttcgacaatcttacgaagcccgtattcctcaccaaagctcacagaaaagaattagccctaaaacgctgtcaggatgaaatcgccgatcgtgatcgccgcagcatcgttcagatctctcgctccaactccgataatgacgatggaaaccgtccccgagatgtgaaacgagaacgacatcgaagccacgaccatgaccgaaacagagagagcgatcgagagtttcgtgaacgtgaagttaaagctagggttgagaaattagagatggtaaagcgtgagaaagagattaacgcaatgaaagagcaatacttaggaacaacaaagcctaagaagagagtcatcatgaagccgagcaagaatttccgtttcgattgggagaacactgaagatactttgagtggagagatgaatgttctttaccaaaaccctcatgaagctcagcctctgtttgggagagggtgtcgcgcgggaatagatcgccgtgagcaaaaaaaacttatgacgggtaagcacgagagagagaagcgtgaggaagaagataagcactggagcgagaagaagttagaggagatgaatgaaagagattggcgtattttcaaggaagattttaatatttcttacagaggatcaaagattcctcatccgatgaggaattgggaagagagtaagcttagttatgagctaatgaaagcagtaaaaagagcaggatacgacaaacctaaacctattcaatggcagctatacctttaggacttgaacagcgtgatgttatcggtatttcagctacgggttccggcaaaaccgcggcttttgttttgccaatgttggcttacatatctaggttgccaccaatgagggaagagaatcagacagaaggtccttacgctcttgttatggttcctacacgggagcttgcacatcagatagaagaagagacggttaagttttcgcgttacttggggttcaaggcggtttctatcactggttgggagtcaatagagaaacaagccttgaaattatcacaaggatgtgagattgtgattgctacccctggtcgattgctagattgccttgagagaaggtacgtggtgttgaaccaatgtaactatttagttcttgatgaagctgaccggatgattgacatggattttgagccacaggtctcagaagtgttagatgtaatgccttgtagtaatttgaaacccgagaaggaagatgaagaactcgaagaaaaaaagatttacagaactacgtatatgttcagtgccactatgcttcttagtgtagagcgtctcgctagaaaattcttgaggaatcctgttgtggtcaccattggagaaaccacaaagtttatcactcaacaagtgattatgaccaaagaatcagataagttctctaggttaaagaaactgattgacgatctaggtgatgataagacagcgatagtgtttgtgaataccaggaacaaggttgattacattgttaagaatcttgaaaaggtaggaaggtgtcgtgtgactacattgcacgcaggaaagtcgcaagaacagagagattatagcttagaagaattcaagaaaaagagatttaacgttcttgttacaacagatgttttaggccgtgggttagatattcttgacttggcacaagtcatcaactacgatatgcctaacacaatggatctttatacgcataggattggacgaacagggcgagcagggaagacaggtgttgcgacaacgttcttgactcttgaggataaagatgtgttttatggtttgaagcagaagcttaatgagtgtaatagtttggtgccacctgaacttgcgagacatgaagcctctaagtttaaaccaggaacctttcctgatagattctcccatttttagggatttggtgtcactgctatctaacgaagactttattcagtataattaaagtatacaattttatttatttattgcaactgatgcttgatgcttgatgcttgattacaagataatagttgagtattttccaatgatcatggaatcaagtaaacataacaacacaatgtactttggtcaaataaagcacaattaaaccacacagaaaggtatatatatctcaacattaaaataaaaggtaatgtctttaccatttcatattttacaaccaattaatgctttatcataaatttaattatgaaaaatattttaaaaaataagttaataatgtgctaacgcctacaccccaagtaaatccgaattaatcgatctaggcgctaatcccctatcaaacgtttagctactgacttgcgattttttaaacattggttaatacttagtagtcatccactaccttgtttcataaattttaatggaaatgctaaataactcgtcgtagctatatggtcttcacgaatataacggccaatattgtctaatgtaatgtgttccaccatcccaacggctgtaaattcgatatactcgtgtacactaatatttgccatcagttctaaatcccaagctctattcgttttggttgcaaatcattgctcttaggtaaatgaaaccgaattttacaccagagtagaagcgaatgcatgatagatagacatcatgaatcacaaatgaagaaaagaacaatgaacatcaaagaaaacatagaatacacatatctcagaatttcaaatccgaaccttcaaatttctcctcagtgatcatgtcaattatcttctccatttcaggagtcagatgattcttcgagtcaccgacttcccctttacgaaaaaaaatcttgtgatcggcccccctaagcgtttttccggtcttgttgatctccaaattcttcaagttacgcaatgagcaaaggtccaagatctcttccactgatcccctctcttcttcttccaccgtaaaaggacaatccaagaactcggcaagtctcttcagctgcacgcgaggttctgtttttaactcctcgtacttcaagaaaagcacattcttggagtcttccaagcttgctctccaatagttcaagacatgttcccaggatggtccgtaattgataactcctctgcaaaaggactcgaacattgaatccaaaatgcttctctcctcttctatctttagttttgcgctgttgaaataccaaaacgacaccagtacgtctttcacgttcctccacacgtaaacgatcttacaaggagagtttttgagagcctctcgcagcgtttggaacgccacatgagtcgaaaataacctcggcgacgatgagatactggtcagatctggtttcgaggtctcagtgaacagcctgagctcgaggaatggtaccagtccatgaggattatcaagtagaagaggatgatcatcagaagagtgtttctgtttggatctctcgaggagagctaccgtgagagctttgagccaagtagtgccagatttggggaacgaagcaataattatatcggtgtcttgtggctcgaaacctctttgaaaattgaggactccttgcagagttttgtcgtcgtaccaacatccttggtatttgaagagcttcgtgctgtcgaaatctacgtcaaagggaagtgaagaaatcaaacttatgttttcttcgtcatcgctttgcagtttctttgggatcttggtctcatccattttttttctttttttctatgtgttttggattttcagattgcaaagcataataattgattgttgtgttgcttaataacgctatgttaacgatatgattatttaaagagtagtagtagttaagagatttcattaaattgtggcctgaaaaggaaattttgcaacgtgactagtagtagtatttttagtagaaaagaatactatatttggcaacatggtagatagataaagacaatttggtttaattaatttgaattctggattcttctaagttctaacatgcaacaactaatgatgtcatgaatcaagagatagtacagtgagttgctgagcgatacaagctatacaacaattaactttttttgtagctttagactaaaacatagtctcttctctatacgctgcagatctatgttacaataattacaataaaatgtttctaatcaaaacaaatataattaattcagttgttattagtcatatatcttcacctcagtggcatgcgaaagaaatcgtcgtagtcatatggtgttaataataattaattaaaaacgcccaagaatgtgacatgtaatatattatacccatcaaatgttcaactgcaaatgctattcgttttggtttcacatcactgttcttaattatatgtatcaaaccgaattcgacacaaaagtagtaacaaatgatagacatcatgagtcacaaatcaagattgtgtatattgtttatattgtgtttagggtaaaccaatattttctttcacacaataatttatggtgctattgagataacaattagtgatggtatgtttaaagcaaaacttaagattgtggtactttttaatttatggtattttttattttcctccgatactaattatctaattgaaaaaccttaatcgtgctagttagccagttacaccttaaaatcaatatcatcaaaaggtatatggaccgaaaaataaatagattttgaagcaatcacaatcgtatgcgttacacaaagtttacaagtactaatcaagagagtcttgcatttggtaagcgacaataacaaaacatttgataaattttcaaagaaacataaactctacaagcgagagagagacacttgatatctctcattccactccattataaaggcgaaaaggacagtgataacaaaagaaataccaaagaacaaagacacaaacttggacaactcatgactgttattggtagaagaatgtggagggtaaagaattaaacccttctgttccactctgaccaagactgttttgatccacaaagccatcaagctcgaaggcaaacgtgtctatgcttgcatgcgcaacattccaatagctatccgtctccggaatcctcagttcagctccaaaacaagtactgggaggaagaggtggaagctcatgatcacaatgctcagcattactggttatagattgataaccacattcagcctcctgaggccacccattgtatgagaactcaatagagttctggttttggttgttggtcgatgagtagagattgttattgttgttattgttgctgttagtagcttctagttggcttggagggttgaataactcggaaatgaaacgttgggattcatcaggagacacaaaggaagttactgaggagccacgaggcatatcggagtagacaaagttggttcgagcagtcaagcctcttatggaccgtgcggctctatcataagccaatgcagcctcctcggccgtgtcaaaagtacctagccaatacctctctttcgtcgtcgggtttcttatctcagctgcatatcttccccatggcctcctcctcactcctacatactttatttcttcaatatgttgttgtggctgtggctgcggttgttgctgcttttgcctatgactcttttttgatctagagcaagaaccggcattcaaattaccattgaactccatagctaattactatagtttatcaaatagtcaaaatgtaaaatgatagaaagataactagaaatgatggatttggttatgtttgaacaatgaatatgggtgtgcttaaatagatcaccttcactatgtgtttgtgtagggaccctctcttttattctaaaggtcccttttggaattttttaagatacaaaaagtgggtcacatggaaatgtgcaaaatcagatgatcatcaccatctaatcataagtgaaagtgaaatgagttagttgcttttaggattggccctagtgaatcatgcaggactatgaaccaatctgcaatggattttttctttttctttttccaaactttttttcttttattttaattttaggcctgctattatttgtaggagcgtgagattccttgcgcctacttatgatcacttgtaacttgtaagacgttttggctttcaattatgaacgttgattatcagtttcttttgtttaaaaccaaacaaaaaaaaaattactggatgtatgcaagtttgttagcaactaatcgtccatatgaatcgttatctttttttctacgtcttccaaaatcggtttatctttcgccattttggttttaaaataattttggcaatcaatttgaatcatagaggcatgtaacttaaggtaaagactatttccttatcatacatgtatacatgtggtatttacctactcattggttgagttcgaacatgacaaaattacttcaacgtgcttaccttcaatacacacatgcaatagttaccttcaaatacacatgcaatagttacttcaactatgtatagtttctatttatcaaacagaactatatttttgtttttgataaataatacacagtatatatacttctataggtctacaattcaacaacgatttagtcatgatataaaaattttaatcaaaaatcaggaagagtaaacttctcaattcagttcttttattaacggtactaattaatatgttatatcatatagtatgtgaacttcctagactcttttcggattcatttgttttccttgaatatatatgtgccacttgatcaaatgatgggctaatcacatgctttacaatactcatgattgcaaagtctcgcaatctttcggatccaaatgattaatttcatttcgtttaatcatgatttattagatatcaaattatatacatgatttcacactgaaggactgaaaaggaagcgatatttatatttctaatatagaaactttgctatataaaactactccttatcgtcttcttaattatttttttgtggcgtttcatatgactaatctcaatgcttttataatgattagtagcatgagcatgaacatgttcgttatccaagaaagaaaataaacaagagatatatcgtgtgaatatgaattacttttgtgtataattattactgaataatgtcataatatatatatatatatatatatatatatatatatttttaacatcttcattctttattaatttgaaaacgataatacaaaatgtatcaatgaacatacacattaaagctccacaaaccatacaaccaatacttaagtagcacgaaataaacgagaaagtgaaaaacactagaaaatagtatcatatgattgaaaaatactactgatattcaatgaattttcaatttagtcgagtttttccgggttttttaatttttgctttaatgaatgatagtacacaaagtaaaaattaactaatctataatatatagatgatttacatatgatattggttttggtcttagagttttaatctaatactagattttaacccgcggtacaccgcagaactatttattttattaaaagtaactaagaatatattattttataaattatctatatgtaacatattgttttgtatttataaatatataatctaatttctatatattgtacaatcccttgattttatcatggaatacaccgtaagtcgatttttaaaatttaaaatttaaaattatatatgatttttgttaagattgttttttttgtcatatattttaaattatatcattgtattttaattgttagttataggatttcacccgttgtataacgtgtcgtattactataaactcaaacccgtctgaccatctaattccgttcaatgaaattaaacatatttaatggatttcatcctaggtatactgtctcatattactatcaactcaaactcgtcctaccatctaaccccgttcaataaaattaaatattattttattatttttgttttaataatactttaattttaaatatatataattcaaatcaatttcaaactttttattttaaatggttatttaattgttataatttataaagttcatatattttaatattctaaacctgtcataccatctaatcccgttcggtgaaattaaacattattttttttgttttgtttaaataatatttttattaaaagatttataattcaaataaatttaaaatgtgtctttcaaatagttatttgatttttataaatttcacatttaaaatatttctctatatgtaacatatagttttatattttataaatattataaacgttttataaactttaaataattacaatatttaccttttaataaagtataatattaataatcatttaaataatcatgtgtagctaattttaaggaatttgatttaaagttagttgtttggattaaatttgaatgaataatgtgattgatatattaaatcaaaaattaaaaatcaaatcaaataattaaggaaaaaaaaaataatgccaatggcatgccattgtaaataagtgtcaagtagaggatttatttgctaaaatggttgcaaaaatgtatatgtagatattctgaaatttaaatttagttagttttttttctttcaactgaaatatattatataaaaatttacacatttcaatagaaaaaaatatctatgaaaactaaacaaacaaacatattaaaatccccgaaaacaataacccttagaaagaaataatgttgaaaaagacataaaaatacaaaccaatgaaaccattagtttacttaatcccgttagatgagcttctctcttggagttttggaactattatatagaaaagcaaaattcagttacgaatgcggtttatgtataaaagaagtcacaaaatatcatcactgtaatattatagattgtaaacagagaaatacaaatatataattgtccgaccttatgatatacactactaagtactaacctacgcaaataataccaattaatcttcagcttattcggaaaatttcggctaattcatgttagatacggacaacgtcggatttaacccaaatcctcaatgcaaatgcacaattttctggtttgtttcgtttttattttctggttaaaaaaattcagattaggtttgattaaattaaaaataataaaataaagattgagaaatcactgtggtcttggttcagtcttttgagatagagataatttctgagccgagccgaggaagaagaagaagaagagatgggttttgtcttaatctgtacttgtcctccgtcctcgggtgtcgtcgtctctcagcttcaccatcaccaggtccgtcttccttcttcgtcttctgattttgattttctaattacacaatctgtttaacaattctcttttgtgggtcacaattttcagttctccgccggagtcaaaagcaatgaactttggtttcgtccgactcgtagaaccctaatttcgaaatcatcttgtttcaatctccctcaagaacccattctctccgaagctctcaaggtacaattatatagatgatgacaaaattgattctttttccgtaatctgtacttgggatgagttgttccagatagcaattaagcaattgatatcccaattttgtgatgtgattgtgtgttgtttgttgatcaatcttggagggtttttgtctgtttgtttcacatatgtatccttagataagtgttacattgtttgttttcatattggatggtagtattgatgcatcaaatgctctctgtttcaatgtggtttgtttgtataggagccaattgcattcttgggtgggatgtttgctggacttctaagacttgatctaaacgaagagccgctcaaggattgggtgacgcgaacagttgaagcctcgggtattacagaagaagaagttgatgcagatggggttgtttccaatgatgaagactctcctcaacagatagagattgaatgaggtgtcttggttctgcagtatttaccatctgcaaggaccttttgtatgtaacccctgtgttctttatgtagaaagaaacagactctcttatgtataacttttacattacagaggtatgtcatgtccttgagtatgacattctttgctggtagttgaatcaagatagtgatgatctaaacagtgctagagtgttggagatcagtcgaatcaaatcaagctaacaagatggcttttgcattgaggcgtaaaatctgacaaattatacaacacaaagattttacattcactctgtatcatccatagtctagtctctaaatttgagataggtatttgtgtggctatagtgtaggtcttactacttatttttgttggttgaatcttcaatgagattacaatcatttttgtggataatcagagatacttgtactgattactgaatccaggtaagtctctgcattacgcaaatttggaagagaccaaatgtacaactaaagacaatatcaaaagatctttttcataagagatatttcttagcttactgttgaattttgtccatgacgatgaaatgataataaccacagattatttcaaccaattcaacccaaccacgtcataagacattaagactcataaccaaacgaccgcgttttgatacctctgatcaatctggctcactagcaagctatgccagaccaaaccggtacgacttctgtgaattcgattcgtgacttatggcctcgcgtttgctatcgacgacgacactcgtcacaccgccggcttatttcaacaaatcgccggcgtttttaacggccagagttggggtgagaagaggaagggctaacgttaaggctgtgagcaatagttcgcaaggagccgtcgatggaaccgtttacaaaggtgtttacggtccttggaccattgaccaagccgatgtcaaagaggtctcttctcttctctccttacgattcctgcccaattcacacttgggttcctcaaagttgaatccttttgatagttttaggccaatttgttcatattctcatagtcatgtagtttagaggtagctcaagttgttgatgagtacctttttctcttcaggttattttgtacagatcaggactagtaactgctgctgcatcttttgtagctgcttcttctgctgcctttttaccaggagactcttggttaagtgaaacaatcaagcaaaaccatgatctgttttactttgttggtgctagtggtttggggctatctctgtttctaatacatatatatgttacggagattaagaggactcttcaagctttatgggcacttggttttgttggttctttcgctacttacgcagcccttgctagaccagctggtgataacttggttcattatgtcgttgatcatccatccgctgtttggtttgttggtcccctattcgcatctctcacaggactcgttttcaaagaaggtaaatatcttgcttctgcataaggcttcatatctttaaccgtgccaatgttcttgatatgtaatttctgtctgcaggtctttgttatggaaagctagaagctggccttcttacattcatcataccttcagttcttcttgggcatttggtaaagtaccttgtttgattaagatatcctgctttagctgcctagactcctgagatcaaatctgctgcgtcgtttctctaaagagaaagcttcaaatttccttaacttgggggatcttggtatttgttaaattggcctgacttaaattggtaaattgaatttgcagagtggtctgatgaatgatgaggtaaaactggtgttgctaggaacatggatggctctctttctagtatttgctggaagaaagtttactcagcctattaaggtacattgttcctctctgaagataagccatgtacaagctttcatagaggtctttgctatttatgaaagtaccaaaatgtcataatactaatcatctataatcttgtttggtttttgaaggatgatatcggagataaatctgttttcacgttcatgtccctttctgatgatgaaaagaaggctatagttgaaaagctcgagcaagaaaagttggggtaagaatctgaatgatagtggaatgttttaagcatcttcaagaacaggtaaatattttgtatccatagattctatttaccactgaggagaaatgctaccataaacacagtttgtagattgtgattagtagcttagaagtgacaatacaaatgccatcaaaatgtccattccctgattgagagttggttgcatctcatattttcttttttgacattcaaaaaaaaaaaaaaaaaaaaaaaatggggcaacctggttcagtcggacccggatttggacccggtttaaagtcatccccttgtagttttatttatttttgatattttgcccctcagtgtgttttgatgggccaacctggcccggctcaatttgatgcactgattaggccggtccttatttaggcttgagttttaggatttagtatggtcttgtttgtctatggcccccatcttacctggaaagtgcaatgaaaaaagcgggattagacttaatcggggtccaattgtgacaaaatgaaaatggtccagctcgggccgtcctatccagaaccgagcctggctgtccgcaaaatttcaacccaaaatccctagttgtgagttgtatttcaccgaggaaacatgtccgaccgtgttactgtggtattaagatgtctaaagttatgatccataagaactacaagggtagaaaattagaaatcttgttactcctacaattatgaactcaaccagtcacttccgagtataacgtacagattttccggtcctctggcctgttattagccatattgaaggaaagtgaccatggttaaaacgaatatcagttaagacgcatgatcctacaattaaatggatataggtctcttttccatggtagtccatgctattcatgtgtgtcaaaatagatttagcgtgtttttaggccaacaatgattgtgatgtatgcgggtttccggaatggagataggaaaatgctaagtaagagttgttaagtttgcaaacaacgagcgtgaaattaggaataaggttctgtcattgaacgtgaatcgggacaagcaattgaaagacaggacacacgagtggggtgttaaatgcggtgttcagagtacgactaatatggtcgactcttaatactaatattatggtctcacacacactctctctctctctctctctctctctctctcttcagtcttgttgctttctgtctcaatcttctaggagttttgtcatttattaacatggctacaaattattcaaaaatacctagattaatatgcataagttggacggtccaatgtagatactagatacatggctaagtttgaccaaaatgtgacaactatgaacaatcaataattgctaaggtttttgagtctctacttcacaagttattgtatataagataaatctttcatataatctctaccaaatcttgcttgtttctttagaattggaaatagagacaagaagttggataagagagaaaatgggggagagagagagatttatgaaatgaatccgaccaaaactgagaagggaaagagcaagtgttaaaggagagtccctacctccaatatgaggacgagctccaaattgcgtgcgtaggaaaaaggaggagtcgtgtctaatgctgcatctctactcgtgtgtgttttgttttgtgggtctctcttctctctctatcttttgtctcttcttttcatttcttgagtctctccctaaccttctaattattagcttctctttgttccctcttgcactcgtggccttattctagcctctccctttacataacacggctcacacacgctcacatttccttttcttttttctacttttaaaacgatagatcaatttattaatcttgagtttaaccatttctttgtttagcttgcatgtcgactttgttgcctttttagttaatcattccacttttagttgcatctttcacgtctgctttgtttatgatttgatattataattagacttaagaaaaactttaaaactctctttagttttcttcttcttagcttagtgtgtattctcggccgcatgtctatttagtttgtacaaatttagtagttttggatttgactcttgtagtaatgcaactacaaacacattttactgcgcatttgccgtttatcaattcaggatttaaatccagagtcatgatactctatttctttttttttggtttaaatgatactctctttctaatatcaacaaaccaaactttcaaccattagtctattaaggatgctttaactcgaaaaattaacatgcagtaaagttttaatgactcccagctacattcataaatttattctcaatccatgattcgttgattattaaaacttttacagttacaaatgtactttattttgcatgtgagtataacaacgtcatatttaacatcttctttgactagttttatatgatttatagtagctaaaaaaagcttgattgagttattatattacacatgagtattggactagtggtgagtattagacccctccaaaagaacgcgtagtcgagcctatccgaaaatttgatcgaattcaattatttagttataacgagaacttaccccaaaatttgatcaaattcgattatttagttataacgagaacagttatgagtttcgatctagaattcctttgattaaccaccttgattaactatgatagtgaaatagttgtgttcatcatctaaaccttgggtttgttgtgcgacttatacctaatttgtctataaaaactagccttctatgatgtttgtttaacgtagttttttttctacagaaaaggacgggttacgacttacgaatgcggaaataaaatgtttataaactatttttggaatagaccactgtagattcacaacgtctaagtgtggttaggactacaaggctacaagctgataaagtctcagacactaactttcatggggtctcgctctctaatcaaaactattgtggatagattcttatcgaagaaaaatgcattattcgaatctgtcattaagttgacaatacgtgtatatatttccagacttacatgcaatgaacagttttatttatttattttatatacactgaaacagcaggattagatggggttgcaatggttttgtgttggtagcgagacgaaaacgacagcgtttttgttctggagagcgatacggaaagtaacatgacaggacagttgagaggaaactcatcgttttctcttaagtgaacagttaagtttgttcccttttttcttttgctttaatatttggggtcatagatctgtctcttttaccccatttactctttatagcaacacatccatcatatccaactcttgtcggttacttacttccacattaaccatgctttgcttttattttaccatgctttcaattcatttcttacgatgaatctagctacgaggggtgggtgggcatattagccacattaccgttttgattcgatcaaacttttgaatatccgaaactatgagtgtggattacaagttgttatacaaacaaaaacgctatcgctattcgctagatctaactttggacgagtgagctctttcacgcttccctggttttcttgcctgagccctgggtttagattgtcgtgagacatttcggttcctatctaccgttggtgttaaagggagaactgcgaggagcaacgtaatcaactccattggttattttccccgggagaacacctatagccccaatagaaaaattgaattcggtagccaatctggttcaaaatatatttaacagtattgttatttagatcaaaacctatgtcatctgttttttttgttcatgatagtttcaagaaaaatttctacaaatttaatgtttttataaaaatcaaatcatggtaatatatcgatttgttttaaaatatattcatccaatatcttaacataggttgtatattgaaattttacggctatatatgtatgtcgacagccacattcaaacagacattaaatgtagtaatagatatacgttggtagtcctaccaaatactcatatagttagtatatttaattttaattatgtcattaaaaccacaatttgaaaaggtagattatgatgtgaaaatgaatagctgatataaagaattttggtttttattttatataataatgatttcataagaccacacatcgtttattgttgttcgaatattcttaaaattttatattctgcagtttacattacaatactattcaggcacatggttttctactaataatgagttaaacctactttgagctgaaaacaaatccaagacttgttaaatgtcaacacttggaagaaatttgctccgaaaatctttatagtttccatattaaacaatggttttgcatatattagtgaacttatattaaattcataacaaaactttttgtgtggttttaatcaacttcaacacttattacatgtacaactagtacaagtaacgatcatttatataaattattttcaggattttagaagagaaaaaagaaagaaaagtgaaaactgttgacgagagatagagttgagatttatgcaagaaaaaaaatagaaatgatgtaagaaagaaatgtggatctcaatgatgttgctgtgtgttggctggcatattaaaccatcaccatcttcatgtgcatctatacgtcactcttcacctctctatccaattatttcaatctcctcattttattttcatctttatcttatactaacgtagatatattgcaaaagagaacttcgaaagtttctcttttataatattttttcggtcttaaaatctctgtttttatttttcagttatgttcgatttatgtatacaatatgaatatattaccattcctatgaagaaaaaaagagatgagctagattttatgtaaagggtttggtacgattttttttaatcttttcgaaaaagagagggagacaaagaataataaagaaagagacacaaaagtatacattcacaaaatgagaggactttgctgaaagtttgttacaaaagagacaaaagcttaacaattaaaaaaagaaacaccaattagcaacttaacaaatgaagatcttatacttataaaatcaagactttaatcatacattaaagaaaaagaagtaaagtctaagaatctaaaccaagtggttcccattgaggaactctcttactgaagaacctcccaataactctggaatcaagaatctcaagagctcctccagatttaacacatcttggagtcttatactgattcaaagatgatccttgtgagacacaaaaatccattaacgaatcaaacgtgcccaaactcaccactcttatctccaatggcccaatcgacttgtccctgttcctgcatctcctgtagacgtaatccaaacaatcctcaacctcagagcaacaatcctccattgtcttgtcgtcaagctttggtgggtcattgctgtgacgtggctttagctcccagaagagcacgtaatgccctgggattgatgacgtgtctgcgtagcttgtgtactccgtgagcaagaggcttgaaggatgttgaagatggtttagtttagcttgtgtcactgcgtttagtagatcttcttcgctcgttttgtcagtgtcgatgcttagtacaacgtttcttcgctgcacgaaacggaattgaggcgctttgttgtggaaacccgtcacttttagaatatcgcctactctgtatctgtacaaacctattgacaaaaacatatgtaacaggtcacttgtgctacaagttactatccgttttaggaatccacatcagacctagattgtgttcgtatagagagtcactgacctgtgaatgtagtgatgacgatttcgtagtattgaccgacttcgacattaacaagattgacgatgagatcttccttgagagcatcatcatcatcatcggtgttggagtgagttgcaaagtgaatctcttcgtgggatttgtcgtcgacgggcaagaactcgaagtaagccatgttaggaagaagcgtgtaggaaacatcggcaggatcacacaacggattaaggttgataccaaagtaacactcagaggaagcatacatcgttgaaaccaacggtaaacctccgctataaaactctagtgtcggaatgtattgagccatcgaaccagtcacaatcacctcaacatatttagccttaggccatatcctcctcaagattccttcccacgacttttcagcgcactcactctcaatttcatcagccaattcttgatttgggccattaaggatcgacaagaccgagtctctgcaggatgagtcagtgatccagctagtgacagtaccggttctaatgtcagcgcaaagctctttgtaatgatcctccaagaacttgactgctcgaagaaaggcagaggcaaagacagctccgactcttaggacatgagatcgctgtactagaccgcagagaagctgacagtacatgctctgcttgctgtcttgacaaagaatggtctggtcagggctagtgtagacgttgtacttgttgaatggtctgtttctgaaatgttgacttttgtagtagctggtcaaaacaggacgggccattagacctgacggagtcttgatctctggttttatgaatagaagatacatcccttttccctcatctagcccatccacatatctgcaatttcaaatatgtaaacacaatccaatctatcaaaaaaaaattccttcactgttttaatcttttgactaaagaaaacagatataattgatttatttttgccctctcatgagtgtaactaggatcctacatattcaatctgcaaggtgttttgtagcaaagagaagccaaatatatttcctaaatgttttaagcccaataagagagctggttacgtatattgtttctgttggatgctacaaaaattattatatactattgtgttttttattttcttaagaaatatttctgtatttctctttttttttttattttggaatgagaatgaatttaagagatattaatgcacaaaacaaaaaaattaattacgtaaattaagattgaagtaataaaaactcatttattacttgttcatgataggcacaagcatgctgtagaaaaatgtcttcctttccaattcttcagctgtagaaggcatcaacttcggctttcctgcagaagtccccgaactgcatccaatattaactcaaagaaattactaataagtataacgaaaattcttaagagaacagtatataacgatagtttttgtagaatttggtgaaaaaatatgtttacctagtgaggagttctgtgatgggctgagcagagacgatatcagatgattctccatcagcgattcgttgaatgaaaggctttacgtcgtcataattcaccacagggactttgtttttgaagctttgttgattcttgtcggcttctccgtccagaaatgctcggagatattgagttccagagttttgagagagtatttggtgaagaacttgttgttggatagcctctgcatttgttgtcagatcctcgagaagcttgagaccagcctctgtatcatttgggtcgtaacttggtatcattgtctgaaagcagacacaaacaaagctttaagtttgtgttgcaatgatgaggtaccttcaacagaaatagagaaagaagagttttattttatttttgttgtttagagaatcacttcttctctgttcttgaaggttggtttttggtggtatgaggagaaggatgagaaatggttatataataaattggcaaatgatgaaataattattagaaaatatatatttgggaggtcctacaacacacatggccttgtctagttagaaagaagctattgttggtcaatattacctgtgcaggctttccctataattttatatgttattttttgtttaatatcatatttgtttatatgctgtttaatcctccaatcaagctctttctttatgatccgttgaataatatcaatccaatcatattcacaagatttgcatatgtctgccaaaagatatactcacttggtcttcactatactcatctaatattgcctcttagctagattttatttaggaactcgttgaaacctttatgaactcacatgcaaatttttcaaataaagtttatactaaaaagaagtatatgatagcttaagttaacaaattctttatatatgtggctatggaattttctttaagaactttttatatatcccttaaattcatttgcatattgttcttaaaacctgtatatttgcattgctgtgaaatactaaacaactcttagttattcaaattccattgacatatatgttagtttaaatctgcctatttatattaacctcatttacatgcgataattgggctccatatagtaattaaataatctcaagtttgacttatggcaatcaagattaagagagagaaggattgttaagattgttaaatctcttggatattataaagtcatcatcttggtgatgcagatccaaatgcatatgatagggtcgttacgttgatatacatataatataaatagaccaattgactaactaaccataaatgatgataattacaacataaaataacatgcatcagcttaattccatcaagaaaactttaaaagacatggaacagttgaattaggttaatgtatatgtcttgtgtgacgaggaaacagatgtgaacagagagaaaagaggcctgagagggtttggagaagatgatctttttctcgtgaacaaatttcattcaaatacgctatgtcatacactttaggcatgtttcgtcaattcctttgctttaggctttttatattgcttagtttattttggtttagtcatttaatgataaaactaaaataaatcttttccttgacaattaagttgatttaattaaacatctcgatttagttattttattccacgtatttgtttataattcatgattataccattctactaaataattaataatcaatttaaaataacatatatatgaaaataatagtgataatttatcccaaaaaaatgatggtgagaatctcgtttcagatttattaaacaaggggctgaaacatctaccagattttaaactagagttttaattttctttttgaaacgtaacaacccaaatcatgtaaatctttttttttctgaagggatgttatatattccttttggtccctgaaaaagcatacatagattctcaaccttacgataaatcatatatgtcttatgtttcacacgttaatggtcttaatcccattgattgtcttcattaaataatataaaaacataaaatttatagtttatatatatttcatattttcaagaaaagtattctgaactatagagtgataatactagttgagtataattggattttttaagctgcgcagttgataatccttgtaagaattgttttggaaataaatttgaaatattaaaactatttcactcacacacatgcgagagagagactagtaaaagttggcatatttcctttcacaaatacatagaccggtccacaatgtttgggagagatacaggacatgcgcaatctataagaccgacccatcaactttaaaagacatgcactctttttgaatattttctaaccttactatttctgttttaaaagtaatgaattc

SEQ ID NO: 1149 - DNA, 130653 bp, Arabidopsis thaliana
aattgttcaacaatttcatctgtttttcttttaattgaattgtctagggctggaccgatatttacgtgtttatgacgttaagacacgccagctcatttctgcggtatgctcttcaacctttggactagtatttttttggtgaagttgagtcttacttatatatcattgttttattgcaggttttcttgaagcagcatcttacaggtcttgtattcgactcgggcttttctggagaaggtttgtttgttttctaatgccgttcacaaatcgcatctatgtttgtattcctctgttagtatgtttgtaaaatgattggattcatggttgaagcagagacagctgtagcaaacacagtggctgaggctgccacagaggagaagatgacgatcatggaccaggaagatgatgaaacagagaaggctcctgtgaaaagaaagaagtcaaagaaagagaaacgcagtagagaaatagtctttgagggtgaagacgatgaggagaatgaagacgagattgagaaggctccggtcaaaacaaaaaagtcaaagaaagagaaacgcagtagagaaaaagtctctgaaggtgaagagaaagacgagctaagaagcaagaagacacgagagcacaagaagaagaccaagatagtgaaacacaatcaagaagactaggtttaagttttgaagacacattgttaacttggctctgatctgagctacagttttgaactaaacactcgcacaaaagaaacagagtttgtgtgttatctataaagactagttttgataaaacgatgcctcttctcaatgtctaaaatcgtcgggaaagttacaatgtgcattaaagactaaaaaaaaaacacattttaaacaacaatcctgcatcattcaattttcaactcattgttagaaagagggaggacccaaatgttaaccatgtctttcttttctaatgtcaccattgctgtaacttcctggattttgatactattgcaaaaaaattcgggttcttttcaagccggaagcttaagtttggtgttggttttccagctacaacaaaatcaaaaaggatccaaagtcagtaacatgatcagtaactataaagagaatattattcagactggtgaggttactttaccttatgtagtagtagtagaagaaatccgcatagagagctgtttggacaagaccagacacacaagctggaaaatggatttacgtaaaacattagcattgaggaaaaacaaatggttaaaatgcatttagtgcttctttgttgaaacattaccaatccatctagtgaaatgatcttctgtgaaatagcgatagatccagttgataatatagagtccccgatacgccctgcatgttaatcattgcccatgtgagtgcatacagaatacttactcaattttgcacattgaaatattgtgcactggacacaaaggtatgcatcagaaccaaatgcatagcaagatgtaaagcagtctgatttcctttatagaaaaaaatatagttcagctcagcttccagacgcattaacattaaacggaaaacaatgtctggactttagaaatatgcactgatttttaaacaccacaatgacactggagagcgattctcattgatcaagttaacaagtgcatgagcagtgaaagacacagtatatatataagataaaccaattctaaaaacaaacccaacagagaagccagtggagatcaagtgagcaaacgcatatgtctggttagaattacgtacccgagaaagacaacatattgcccagtcaaattgtcgacattcccacttctttgtagcagaaccaactggggaaggatagcaactgcctctaagtagatagaaaacgcccagaacacctgaaatggtttggaatgcacagaattaacatattgcacaatgattctggctatcaacacagagaggccacaatgctgcaaaaatacttaaagagtgaaggcagtttgcaaagatcagatctttaccaagagcatatactggaaaaatacatatgaaggtagtaagggaaaacgatcttagtgaagtgcatataaggagtcactacagtttcttatgacaagataatcaaagaacacaatggccagaaaagtaacagcgagatacagatgacactaatccatggggcaccttatggaacataggtaggtaggacacagaagattccatgaatggaagcaaacaaacctttcacgatgcaacagtttgatattcaaagagtttctcaaaacaatcagcgagtgagaggctacataggtagtacaacgtttaaacaagcaaaaataaaactataaacgccggactcctaattggttctggaaggagttatgttcagtttcatttacatagacgatattctattctacactagccaagatagttaccaaatccaaatgatataagaagaaggaaccgaatgaatcaaatgaataaataaaccaaaaacaagattacacaacatatgcatgtcttctaacaacaagtattcgctttcctagtctctacaacctaaaaacacaaaagcaatgtgaaattcatatgaaaatacctcttgaactgtgaatttttcattcaggataagtcccagtacaaaacacgctaacacaacatactgatgacgaaatgtgtccaggtccttatcgtatgacctcctcacaagtggatgcctacgcatacaccaaacgatagccaaagagctggcaatgaagacaatcttcatgatgctgttgtacagagatacataatccgtaaacagatccaagtaccgagtcaagaacacaagcgcatagagctcttgagtcttgagagagattcctagccaacaaaatccaaaagtcaacagcaacaatgttaggagctgcacaatctatgagaaaatcatgagcatctacaagcattttccattccgtgtagcaattttccgttaaacctaatgcaatttaggggtgagagatctcactcgtttagaaattccatagtggtttcgaagattgagatttcacaactattttgacttgcaatttcaatctaccaactcggattcgcctcgaaatcgataaatagacctcaacaggattcaaataagattgcatttgaaagctatggaaaggaaaacaaaaggtcaaagcaaaatgcgattgtttcgtctacgagctcgtcttcaaaatatacacaacacatttcatgaaagagagagagagagagagaactcaccagcgcaagatttcgtcgcgtagattttgagaagaaggattaagacactgatcaagtgactcatatcgccagcaaatctaaagatattcatggttgaccagtaatcgatagagactcaccgattccaaaattttccgggaaaatccaaaagaagaagagaaaacgaaatcgaacgaattttctctcttcaaatcgagagagaaacgaaggaagagagagaaagagaggcaaggtgcagcacgtttcaggttttgcagaaactcgttgagaggagacgatgacgtggcaatctggaacggtctttcttctctaacgtgtgtgcttacttatttccttaaaactgcaaattagtccttcattattcgattaattatcgaagtttccctaaataattaccaaaagagagcgttttaattttcaaaagtggagaggtggtgttatctggtacgtcgcaccttggtaaactagaaagcgccagctatcggtgggtctatattgcatcatattaagccacgtgttaatagaacagtgatgtggcagcttcgtacgcgacatggtgtggtgtttaacttcaattttaattcctcgtgttatccacgtgttttgtatttgagaaaaacagttagaatggaccggttaagagttggttattaatagatatgggccttctgttattatttatatgggctttagctctctgtgatagattaatacccaatgtcataccatgaacatatgcaaacatgttttaaaataaaaaattgaatgttgatttttttttttttttttttttggttatggaacgaaatagaagtgtttacaaactaatgtgattgcaaatatgtttttttttttgggtgtataataatatttgttctacggttgttttgggttaaacagtataggattttgagatttttgtgctagctgttgtcctgactccttatgatctaactcatttttttttttcttttttgcaaagatgattgaaatgtatagtttagtccataaaattataaaatgatattcaatgcttcgcttcaacgttcaagacttcgtttttctagtgaactaatagacaaccatgaaaatgatgtatgaacgtcatttaaaacaagaataaattgtatgaacgtcatgactcatgaatatagaggacacgagaaattaaacatgtttgttttttctttatcgttagtcaaagaaaacctacagtatcactaataatactcttacgttagactccgtggtcggtccgcttgttgcctggagtgttcgactttatcgattatagagaagttctatatataattttatttaatggcgtattttaaaaaatcaactataccattttcaattgtgtatagactattgactatagattatagaatttttcaatggccactaatcaaacagttctgaaatcaaacaaatagcttttctgactacattgaaacagttaaaaatagataacatcacgtgacgggattatctatgctacaatgaaactacggcaatcgacaaagtcgctgcttttgtaatttcatgttgtgatgatgattaaggtggttcagacgtgtggttttataggaaaccgactttgtttacatttacaataatttcttacaatttttagaaattttgaacgttttacgatgaacacaataatttcacatgtaaatgtaaatagtatcaaacaaaatcattttgtaaattgtaagcgcaaataccaaacaaaaatgaaatgaacatgtaatgtaatatggtatttttgcttataaaagaagcatataatgtaacaaagaaagtttttactacacattgcaaaaatatgaaatagtttgatggtaaactgatcacatagaaaaatgtttgaatttagttgggttagctttagtggattctttagttgtaatttgcaaaacgcaaaacttggttaaagaaagtgaacttccctttagcttaacatttttctacacgcgccttcaatgtttcagcgacacgttgcacttgcatctttccagagtcaacgcttcactagcataggtttcttcttagagcaaagagatgtttattgtctgataataaaatttactcattgtaacatgtgttttaattattggaatctttaatagtgtaatgtaacatttaatttcatacaaaaaaacgtataattttaaaacatatactattattacttcatgttaacttataaaaacttcgttgtaaaactttggaaaaatcgatagctaaaacttgtttttgttatattatagtaattggaacaatcggcaagtttaacatacaaaacactaataatcgaaaaaatggcaataagaaaaacaaaatagaaccaacaccgtaaaaatcttataaaaacatcatgtatgcattttttaatcattccaaaatctagaaatgtggtggtggataagaaaagtttaaaataattgatttgatcatgtcactaaaatacactttttttttaggtcaaactttttaaacaattttataattaaatgtgtttgatttgaagcaatttataaatgagtgatctattggaaagtgaattcttgtattttgtaaatctttaaagcctcccataataacgaacatagagactgagagaagatttaaaatccacaaccagtggtgatcgagacgttagtagcaaaaatatttcgtgaatacttgtcaaactacataaatcgttggtgatcttgagatttttgaacttgttttgttagtatttatgtttgtctatgtggccggcctaattttattatatgtgggtaagatatagttcaaattcagagatagccaagctctaaaccaatcaaatggctgaggccattgacctttaaatccttgactcgttttctacactttctactattaatcaactcacgaattttcttttgtcgcaatattaattaacgactctaataagagaattatacccaaaaaaaaacagaattaaatgctgtttttatttcatgtaacgttttgccgacctaaatagtaagtgaatcaccggttggtcaaacaaacctaaataaggggcaatgaattatacatacaaataatacatatcgtaacatcgaatctaacgatacgtatgaaaatacacgagatactcataaatattttgcagaagagcattaaattacaagtgcgactaatttaaataaatacgatagcatatttttccgacacaactaaaccaaaaaaaagacaaatctagtaataaaaagattagattctaatccgttacatattgccagtagtattgacttttactgggaaaaacaaaaaaactttcgagagagagaaaaaaataaaaaaaatctgacaacgaagacaaatctgaaaaattctcagcctttcgattcattcatatacgattacgcgttcttcttcttcttccttctctctttcccagaaagtatcatcgaaagataacccttttttcacttttcttctcctctgacttttttcttctcgaatctttagttttcgtttatagattctgttttcttcgtatatataataaaggtttgattttttcgatctgagagcaagagaaaaccctttccatggcctcagcggcgatattctcatcgttacgacggaggagatcgccgtctttggaagcattcttagcccccgttgacctttccggcgtcgcacttgttcaaaccctagcttcaatctcttcggaggttgtttcttgtttcacctctgttcgattctcgtttcaacgcaagaacgctcgttctttgattcgtaagatcgagatctttgtcgtattattcgaatttctcgtagattcaaattggggctcaacaacaacaagaacaagagcaagaagaagaagcaaaagctctgtttctgaatcaacagctttgctttgtctcaaagagctttatcttcttctctatcgttccaagatccttgttgattactgcgctcaatctagtaagttatggctcttgttacaaaacccttcgatttctgggtatttccatgatttgaatcaagaaatttcgactcttttggatgttttacctgtcaatgatcttggtctaagcgatgacattagagagcaaatcgagttgttgcagagacagtcaaggaaagcgagattgtatatcgataagaacgatgagtcattacgtgaatcattctattcgtttcttgatgggtttgagaacggtaagattccgagttctgttgatctgagaatgttctttgttgagaaattggggattagagattcgaagagttgtcgtagcgagatcgagtttttggaagaacagattgtgaatcatgatggtgatttggagccaacgggatcggttattaatggttttgtggcgattacaagatactgtaggttcttgttgtttggatttgaagaagatggaatggagtggtggattgagaataatccgaagaagcctcgaaaagggttcgttgcacaggagattggagacacgtttataactgtgccaaaggattttgtttgtccaatctctcttgatttgatgacagatcctgtgattatttccactgggcagacttatgatcggaactctatagctaggtggattgaagaagggcattgtacttgtccgaaaacaggacaaatgctaatggattcgaggattgttcctaatagggcgttgaagaatttgattgtgcaatggtgtactgcgagtggtatatcttatgagtcagagtttacggattctccgaatgagtcttttgcttctgctcttcccacgaaagctgcggttgaagcgaacaaagcgacggtgtcgatacttattaagtatctagctgatggttctcaagcagctcagactgttgcagcacgggagattcgtcttttagctaagactggaaaagaaaacagagcatatattgctgaagcaggcgcgataccgcacttgtgccgccttcttacatccgaaaatgctattgcgcaagagaattcagtgaccgcgatgctgaatctctcgatatatgagaagaacaagagtcggatcatggaagaaggtgattgtttggagtctatagtaagtgttcttgtttctggtctcacagtggaagcgcaagaaaatgcagcggctacattgttcagtctctctgcagtacacgagtataagaaacggatagcgattgtggatcagtgcgttgaggcattagcgttgctgcttcaaaacgggacgccgagagggaagaaagatgcggttactgcgttgtataacttatcgacacatccagataactgcagtaggatgattgaaggaggaggtgtgtctagtcttgttggagctttaaagaacgaaggtgtagcagaggaagcagcaggagctttggctttgttagttagacaatctcttggcgctgaggctatagggaaagaagactccgctgtggcggggcttatgggaatgatgagatgtggaacaccgagagggaaagagaatgctgttgctgcgttgctcgagctttgtaggagtggtggagctgctgtggcggagaaagtgttgagagcacctgcgattgcggggttgctacagacgcttttgtttacggggacaaagcgggctagacggaaagcggcttcgcttgctcgggtttttcagaggcgggaaaatgcagcgatgcggtctggcgtttacgggtttgtagggaatacaaatgggaatagagacggtggttttacaacggatgtctcagttccgatatcaatctcaatctccgtaccagtgttgtgatctatgtttagtctaaaagaactctaaaagtggtacttttttgttgttggtggtgtttgtttcattgtttgtctatattatatacatttattggttgggaggtataatacaagtaatattttagagaagatatgtgtgtatatgtatcttccagggagaacaaaaaagagttttggtgtatgatgatctttatgtgtattgtatttgatgtataagctatgaaacgtcttgcattgtgatcgttcgttactaaggagcttgcgtttttgtagtaaactttttgaaatatatatctagagaatcaaattgaagagaagatttgcttggaaggttatcaaaagaaatagtaagaatggagaaccattttttttttaatgtggtttgactaaaaaaaatagataatttatctaattaatgaaaaaaaaaaatttagttagagcatatatcccaagaaataatgtatctagttttggatcaggaatctaataatggtgacttatacttagattcaaagatataataaaatctacataagaaaaaagctaagtaagaagacttcaaagtgttgactaatggagaagcctttaagaagaaaacattcaacaaaaagaattattacacaccaaagaaaaaaagtgagagttgtagtatgatttggatggtctctccacttgtgaaattgatagaagaatattacaaataaaaaagagagttaaagatattcattgcaaaaggtagagaggaagagagaatctctagtgaagtggtgagttggggcaacttcttattctatttaggatttggtttttgcttcttctattttgttattgtaaaagcttactaagtggatctcgtcattatgtgttacaattttatgatttaaaatgtaaatttaaagtagtttgtacattataacaacatctaatcaacaaatttcaatttcaaagttgattaaaacaaaatatttacatttcaaactcctatagatttcaagcatctattaagatatgataattcgtgaaaatgttattgtatagacactatattattattccgtaaaaatggaaaatgtcatcatcaatgataaatcatatttagaggatttcatgatatataaaaaaaattatgattacaaattaattgatataagataaagccgtccactatgttttgttctttattgaagtggatgtgatcttattgtgtttttggctttttggagttatgtatcatgtgcgtatacgcattaccacccgacaatcaacaatacaattatatcatatttcatacaatttttatatgtcttttcattatgtcaatattaaggttaaactacataaaaattatccaacgcacagattgttatttaaatccgactgaaagtttgtgtgtattgacattttccacataacgaacttggaattttggaaaatatttgagtttttttttttatgtgtatagtttattgacattgaaacttttaaaaaaatgtgtaatcatttcattgcaaaatccttctagctttgtcgataagaggtacgtaaaatccatagagagtgtttgagttaataatttttttccctttctctttgtttttttttgttcacatctctattgtgacaacgttaagtgtgatgtaatctgatgtctaatcaataagaagattattcaaacactaaacaaattctgataacactaatagtaaacgaactacattcaaaacattgacttgactcgaagctcacacatgtttgctacctagaaaacttagactgaaaatagattagatcaatcaatccagacgttgtgtccacaattcctccattgacttatacagctggagagaagtttgtaacctaagaaaattataaataattttttctttccacagatgtataaacaagagaagaacatgcttcaaaaatcacgttgagcccttagacaagagaagtaagaagaggcaagagttaaaaaaaaaagtttcatttctgaagttgcattgatgaaatcagagttgcatgttccctaagttaacagaggagacaaaagatgatgataagttacattttagaacacgaccatatttcctcttcagactcgccacacaaacctctataagcgagagaaagaagctgaaaaaacccactctctttctttatttagtaagagttttgccagagctgctgctgagattgattcgacggttgaccagcctgagacccagcaccatccctagggttttgctgctggcgctcgagtgacatttcggtctgagactgataataatttgggtatccatgagatccataatgctgttgttgctgagcttggcgataccctcccgctgcttgctgagcctgctgttgttgttgctggtgttgtagttgcagttgttgttgtgcttggaggttgtaatacgtgttagtcgggacacctgacatggttctggaaccatgaccctgatgccacatcgccgagttttcgttctgtatatttaagtcaaaaagaggaagaacgtcaccaaaatggttcatgcctgaaaccaaacgaaagtggcaaggaagtgaccaaaaagagaaagtacctgttgttgatgttgctgttgttgctgctgctgctgaagtgccaacagatgattctctttgtattgagaactaagaacatcttcataaccaagcgttgtaccggtagtagcagactgttggttaagagggaagtttccggcagatccgacattggtcgagtttccaaatccataagcagaggcaggcgctgttgcagactgaggcaaattaccgggagagacattggttttgtactgcggaagcaatgcagctagttgctggtggtatgcactattaccagcaaatgtttgctggaaagcagatggcatgtatggataattctgaggcattagaggataaccgatcatgtttgcatagtgtgttagaggtaatgtgggttgagagtaatgcattggaagctgctgaggaagagcaggtccagtagcgatattagcaccaggtagtgtttgctgggttggctgtgttgccggaattccactgcctcggagcgcctgcaatgtaaaagaatataaaatcaaaatcacacacgtttcacttgtaaaagaagattcagatttcgaatctgaagaaactactgcctttggctaagtaagcaaaacagtacccatgtgacaactaaccagtaactactacttctgaaaacaagctaagagaaagaactatttcagtcccgtgtttctcaaggagaaagaattatttacctctggcattgaaatgctttggccaccaagtgatgaggcattgttgctagttcttgattgcatagactgttgagctgagaaaggtgaatactggaagtcaagttccctcgcattttgtgctgtttgtgccaataaagtgttgggaactgagtgtgaatacccctgctgagataaaaacatacaagaactaatgttaacattcaagaatttcatgggaatcacttcagagattactaagctactcttccagcaaaaatataaaaagcctgattgcattttaaaaagaaaattgagtatcttagaagctatcacaaacaactatgattttcaaaacccattgaaacatggttctgttataaaaaataaacatgtagcttaccatcacatttgataatgaatcaagattatgcatctgattctgtgaatttgtgtgtgaggcatcatatgcagaattcatctgctgctgcttagcattttcatacgcatacccttgctcagactgggtaaatgtgtactggtgctcctgagcgccctcagagttttcttgcttcaacacctctcgcctcgtttctaaagaatcatcataatttccagtagcaggtgtgtggaccatatttccattggttgtacttcccagatgttcatctccatagaactcagtatttctgcaaacaagtatgatcagttggtaagtatgatataaatgaagtccataaaaagtttggaaaaagtaatcagtaaacacgaaatataccttgcatctgaatgttcgatttgtggagctacatcagaagtcgcttctacgctgttgctcaaaggccttgatccaaaacctccaaagcttccaaaacttaattgcgcgcattcttctgtgtgaattagcaaatggtttggaattacaacagcaggtctatcctcttcatgtgagacttcttgatcatgactatctagttgttgaaaactggctgaaccagatgaaacatcatcttcatctgaaaagtaataatgagacagtgaataaaaaaaaaacatcagaaacaccaaaagatcctcataaggtattgattttcgaatactatattttgtaacaaaacatcacataatgagaatcactctaccgccaaaagatagttgagaaagaaaacagagcaggcaaagtatagtatagttttatgacaaacaaaacagcaaagaagctttcattaccccccagcagaactataatcccatctgtattcacatgatcaataaacacaagcccactccaaaatgaaacaggaaaaagaatttgaacataatggcacacactagcaataaatgggaaacattttataaagattcaaaatattacctttgtggtgctctactggatggctctgtgtctgatatggattatcatcaatttctgacgaaactacagattcatcttcttgaacagagtcggcttgcacatgatcgaccccacgactttcagacgggccactttctgctatatgaatattttctaaccggtccttcagatattgatctcctctatcggattggaaatcagctagaccattgcgtacttctgattctgctggtgctactgataaagaagatgtactaggagccagcggcttctcaatcgacggccattcatctttaacaggggcctgctgatttgcattaacttcgtgttcatgatttatctcagaacccacattgacattttgctttgttgtcttgttctgtggtctacccatcttcacaacttcagccatagacctctggcctggagctccaaaccatgcagtttgatgtccagaagctgactttgatgatgatattccatctcccaaggtaacaggaggcaatttgttttccatagcaatgggttcactgcaaaagataagtaggatacatgagaaacttgtacaacccaaatagaaacatgtacaaaaacataatccaagggaaaaaaatgtcaaattgaaaaggctaaaaaagagaaatgaaccactacctaccagtacttctctagttattggctcaaatctttcacaaactagagacttgtaaaactaattgtgatattctactacctacctaagccataggtcatataattactttaaccaatccaacttaagctttgtattctaatgtaggaaagggcctaagatcaaacaaataatcacagagttttcctatttggtgatatcccttaagcacatcataaactgggaattttgaaaatcactactagatggatcctactaatacaatgagtaaccatatgagtaaaatatgaaatcaattaattgattcaatacgcagcacagaacttccactaaatatttcaacagcatcccaattcccatctcaaaagtaaagaatcgctcaaggggaaacctgtgtggtgtttgataggtgttcgccactccagaagcagaagaccaagaacttgtataaccctgcgttccactttctttcttatttgtagattttccctggaagtttccagaatctgaacaacagaagcacataagcatgaatcttacggttaaaactaaatatatatttgtgtatacaagagatcatgcttataccagtagagctgaaatgggtagatccacttcgtccggcgtaacgagcagaaccacctctagcaccacggttgtaggtgttattagcaccacgcggccgagaatctgatatatccctagtctgaatagacaaaaaaaaacttttaaaatcaccaaaattctagtaaattaaaacgataactagctaaaactagaattcatttcactccaacaaaacatctaaagtcaggtactacataataactagctagacctagacttcatttgattccagcaaaacatctagagtcaggtacagcatgatgattgatgacagctagtaataaaaaaaatcattgccagatgtgtcaacatagaaattgtgtacaagaaacagaagttgattgtatcacacatggttgaagcatgtaatgatacagagattgtgccataagtttgcacttaaaacgccaacactggacaccaaaagcacaaaacaaaacacccctgggtctattatccataagaatacgatttgtaacatggactcacctctttcttcttttctttcttgctctttacctcgtgaaatggatctgaataaggaaaaaacaagtatcaatatcattaataatagaacaaagacaagccttgaatcaagaactaagaaagcaaaccattaacaacatctttcttctctataaaaccgaaccagctagaaagttggacaattacaaggggaaccatattaaaggcgacagctttagaattgcacaatgactaaattctagaaactaacaaaaacgaaagtattggtctgttcagaataaaaaccccaatcaaaccctaatagaaacccttagtaattaagtcgatttcgagaaatcctcctcgggatacatgaaaaccccaggcccaaattaacaatccaaagacacagcagctcaaacaaatagaggaggaggaaaaaggaggaaccttgagagaggaggcgactaacggtttcgttaggatccatattgcactctttaagcatagcatagatctcagcctcaggagagtttacaatttccgtcaagctttgtactatttttctagaccctgacggaatatcctgaattcctttccttgctccgccgccgaccttgctgctgctcatatttatccgccgtaagctgcctctctctctctctctctcactatatcggatctgaaggaaataaacgaagcttttgtggccttctctcagtcgcgacgacaatacgaagaacaccaaggaagctcaagggaagatatatctctctctgtagaaaacgaaaccctctccagattttttcttcaccttatagaaaaaaaaacaacttttcttttcctttttttttcctctttgcctttttaaatttgaaaaattactgaaccggttctctcgtttaaaccagcagtgctaaattaaaccgaaccaaaaccacattgcccaaggataataaagaacgattgatttgggtttatatcgcttccgatgaaagattactactagtttggattgcaactttggacagagttaagcacatgaactttctaagtaaaagaagaatgtattacaaaaaaggttagagacaaatgaaccaaaaagatacacttgtttacaagagaagagaagaaacaaataaagagagaatcgcaactgggcttaataagcagattcctcatgtttccgttgttttcagttacctacaagtctttcaactttgtcttgttcgatttagtacgacaacagtttacaaaagttgtacatctccaatctttaaaataacacagtcactagtaaggcagatgaacccttgagattccgcaaaaagacttaaatcccttcgggtgagcttgtttgggtatctctcggctccaagagactctttaggtggtgtaagctttgtcataggatctacaacgaacaagaatcttgtcctttaaaccttgtggctcagaaggagacgttaccgtttgaaaaagataatgacaaaagcttgggaaagctgacttcagggaagaagttaactctttctactcctactgcaactctccagctcagcacaaatggaaggattcacccttcgtggtggagacctgacttggtcaagccaacacaagctaaagaagacccaacaacctctgactaccgcaggagaaaaacagaaggcaaacaagttgtaaatgctaattctaaacatgcttggcgtcgtattgacaattctcgatctcagaactggaacccacctgcaaatgctcgctactcaaatcatcatacgactagggatgactctcagggctatgatcgacgaattgaatggagcacagcttcaattccccgaacacgggagaaacttatgagaccttcagagattaagaacccttcttcagtccgcgagatccctccctttaaggattcaggtcgcaaaagacgttatgatgacactctggagaaccataatcacaagccatcctcatcaaaagaaagagctgtgacccgcaggatgaaccagaacaaatctccagctgcagcatcaaaatctgctggtttatcccatgtctcggactcgcaattgacggtctctgatcctttgatctcttcactacgagtaaaacaaggagtttcttctcaagctcttaacagagaaagaccttttcgcttgaatctgaaaaagagaggcgactacattcaattgaagcacgtgatcgcctctgagaaacttactattggggaagctctgcaaagaaaagcctaaactttgatactatgacacaagatgatgaagcgtttggtcctcgtaataaatctgacctcttggttatatcgaagcagctggacaaggagaagagttggtatgatcaaactgtggaagaagaggaaaatcatgctcaagaagctcctttagaagcaagattctccaatgcaattcatattggagaattaccgagtgctaatcctgaaaatacagaaattaacgcatcagaaatggagattaagagtgaagaaacctgggaggaggaagaggagtttatgcaggaagatgtcaacgacacatagcaaggagtgacggatgatggcgacatggattgggaggagaataatcctgaggaggatcatcttgatcttgactgagcgatagaagatgaagagattatcgtgaaatcgaaaattcccttctagacgcaggagagaacttggagaatgatgatctcttaggtgaagaacttgaagaccttaagcagaataacgtgaaagagagcgacgagaggaagaagaatcgtgtttctccttttccagatttgggcttgggccactctaggcaaaaaggaaaaaaagtaaaaggccttaactcctaaagcccaatctggacagacttgtattcaaggtgcggcgtctaaaaaattgtttaaccttcatgggggtttctcacctaacatgaggcagtcaagacgttcagcaaacggtccaagtggtgaagttttccacttgtggtcaaaattgtggtcaaatcatctcttgttggaaaaaatctacaataacaaactctgagaagctgattttgagcctacaatcaaaaattgacgaagctcaaaataatgagaatgtatcaattgatgaacttttgaatcttaaattgcaactatgtggggcttatagagaagaagatatattctggaaacagaaaagcagagtattgtggtacaaagaaggagatttgaacaccaagtttttccatgctacgacaatgcaacgtcgtgcgcggtatagaataaattggtctgctagatcaaaatgggacttggatagacaaagaatcaggcattgaagcattagtagtggattattttcaaaatcttttctctacaacaaacccgattgatttttcatcggcgctccgagaaattcctgagataattacagaagggatgaaggagatgattgttaaggatgtttctttcgaagaaatccgaagagctcttttctctctaaatcctgataaaacacctggaccagatggtttaacagccgctttttatcagagattctgggatattgtcggagatgatcttttcgcctagtcaaagatttttttgtctctggtacttttgaccatcgtctcaatgagacaaatatatgtttgattccaaagacggagcgaccgagatcaatgacagaatttagaccgataagtctctgcaacattgtttacaaagttatttcaaaagtgtttagctagcgccttaagaatatcctttcgaatatgatatccgagacccaatcagcttttgtagctggtaggcttatagcagataacattcttatcgctcaagagaacttccatgctctccgctcaaatgttgcatgtaaaaaaaaaatcatgccaataaaaacagatatgagtaaagcgttcgaccgagttaaaggacactttctttgagttctaatggagaaaatggaattctccaaaacttggattgatcgggttatgttatgcattttctctgtatcatataaaatgattctcaatggaacttctcgtggattgatcaaatcaacgagaggtctaagatagggggacccaatatctccttttcttttcatcttatgcacggaggcattaattgcccaattcaaatcagctgaatggaatggccacattcaaggacttcaagtctcaaaggcaagcccatcgacttctcatctcctctttgcagatgatagtttatttttctgtaaagcgaatgaaagtcagggaaaggctattatagacattattcgttcgtacggcgaggcatctggacaacaactaaatttcgaaaattctcggtgatgcttggcaagtacgttgatacacaaactcgaagtaccatcaaaagaacacttgggatatccaacgaaggaggaatgggcacttacttgggacttcctgaaaaaattcacggttcaaaaacccaagtcttcgcttttgtccaagatcacctccatagtcgattcaacacttggtgagccaaattcctttccaagggtgggaaagagattcttataaaatcagtagctcaaacccttctgacatacgtcatgtcgtgtttcctcctacctaaagctatacgctcaaaattatccagtgctatcgcggattttttgtggaagacaagagcagatagttaagggattcattggattgcctgggataaattatgcaactatcagaaggaggtttaggctttcgaacattggaggcattcctccatttacttatacagctggagagaagtttgtaacctaagcaaattataaattaattgaacatatgtttttcattccacagaaatataaacaagagaagaacatgcttcaaaaatcacgttgagcccttagacaagagaagtaagaagaggcaagagttaaaaaaaaaagtttcatttctgaagttgcattgatgaaatcagagttgcatgttccctaagttaacagaggagacaaaagatgatgataagttacattttagaacacaaccatatttcctcttcagactcgccacacaaacctctataagcgagagaaagaagctgaaaaaaaccactctctttctttatttagtaagagttttgccagagctgctgctgagattgattcgacggttgaccagcctgagacccagcaccatccctagggttttgctgctggcgctcgagtgacatttcggtctgagactgataataatttgggtatccatgagatccataatgctgttgttgctgagcttggcgataccctcccgctgcttgctgagcctgctgttgttgttgctggtgttgtagttgcagttgttgttgtgcttggaggttgtaatacgtgttagtcgggacacctgacatggttctggaaccatgaccctgatgccacatcgccgagttttcgttctgtatatttaagtcaaaaagaggaagaacgtcaccaaaatggttcatgcctgaaaccaaacgaaagtggcaaggaagtgaccaaaacgagaaagtacctgttgttgatgttgctgttgttgctgctgctgctgaagtgccaacagatgattctctttgtattgagaactaagaacatcgtcataaccaagcgttgtaccggtagtagcagactgttggttaagagggaagtttccggcagatccgacattggtcgagtttccaaatccataagcagaggcaggcgctgttgcagactgaggcaaattaccgggagagacattggttttgtactgcggaagcaatgcagctagttgctggtggtatgcactattaccagcaaatgtttgctggaaagcagatggcatgtatggataattctgaggcattagaggataaccgatcatgtttgcatagtgtgttagaggtaatgtgggttgagagtaatgcattggaagctgctgaggaagagcaggtccagtagcgatattagcaccaggtagtgtttgctgggttggctgtgttgccggaattccactgcctcggagcgcctgcaatgtaaaagaatataaaatcaaaatcacacacgtttcacttgtaaaagaagattcagatttcgaatctgaagaaactactgcctttggctaagtaagcaaaacagtacccatgtgacaactaaccagtaactactacttctgaaaacaagctaagagaaagaactatttcagtcccgtgtttctcaaggagaaagaattatttacctctggcattgaaatgctttggccaccaagtgatgaggcattgttgctagttcttgattgcatagactgttgagctgagaaaggtgaatactggaagtcaagttccctcgcattttgtgctgtttgtgccaataaagtgttgggaactgagtgtgaatacccctgctgagataaaaacatacaagaactaatgttaacattcaagaatttcatgggaatcacttcagagattactaagctactcttccagcaaaaatataaaaagcctgattgcattttaaaaagaaaattgagtatcttagaagctatcacaaacaactatgattttcaaaaccctttgaaacatggttctgttataaaaaataaacatgtagcttaccatcacatttgataatgaatcaagattatgcatctgattctgtgaatttgtgtgtgaggcatcatatgcagaattcatctgctgctgcttagcattttcatacgcatacccttgctcagactgggtaaatgtgtactggtgctcctgagcgccctcagagttttcttgcttcaacacctctcgcctcgtttctaaagaatcatcataatttccagtagcaggtgtgtggaccatatttccattggttgtacttcccagatgttcatctccatagaactcagtatttctgcaaacaagtatgatcagttggtaagtatgatataaatgaagtccataaaaagtttggaaaaagtaatcagtaaacacaaaatataccttgcatctgaatgttcgatttgtggagctacatcagaagtcgcttctacgctgttgctcaaaggccttgatccaaaacctccaaagcttccaaaacttaattgcgcgcattcttctgtgtgaattagcaaatggtttggaattacaacagcaggtctatccttttcatgtgagacttcttgatcatgactatctagttgttgaaaactggctgaaccagatgaaacatcatcttcatctgaaaagtaataatgagacagtgaataaaaaaaaacatcagaaacaccaaaagatcctcataaggtattgatttttgaatactatattttgtaacaaaacatcacataatgagtatcaccctaccgccaaaaaatagttgagaaagaaaacagagcaggcaaagtatagtatagttttatgacaaactaaacagcaaagaagcttttatcacccccagcagaactataatcctatctgtattcacatgatcaataaacacaagcccactccaaaatgaaacaggaaaaagaatttgaacataatggcacacactagcaataaatgggaaacattttataaagattcaaaatattacctttgtggtgctctactggatggctctgtgtctgatatggattatcatcaatttctgacgaaactacagattcatcttcttgaacagagtcggcttgcacatgatcaaccttacgactttcagaagggccactttctgctatatgaatattttctaaccggtccttcagatattgatctcctctatcggattggaaatcagctggaccattgcgtacttctgattctgctggtgctactgataaagaagatgtactaggagccagcggcttctcaatcgacggccattcatctttaacaggggcctgatgatttgcactaactttgtgttcatgatttatctcagaacccatattgacattttgctttgttgtcttgttctgtggtctacccatcttcacaacttcagccatagacctctggcctggagctccaaaccatgcagtttgatgtccagaagctgactgtgatgatgatattccatctcccaaggtaacaggaggcaatttgttttccgtagcaacgggttcactgcaaaggataagtaggatacatgagaaacttgtacaacccaaatagaaacatgtacaaaaacataatccaagggaaaaaaatgtcaaattaaaaaggctaaaaaaaagagaaatgcggaatgaaaaagttaaggtcaacatggagcacacattcaactgtaatgcatgatcttgacaaaatgaccatacctaacctcatcatacaactccaaaccagtatgtaagttttcattgcttctagttagtaaaacagaaactgtacatgaaaagattctctagttattggctcaaatctttcacaaactagagacttgcaatgaaccagtaaaactaattgtgatattctactacctacctaaggtataggtcatataattactttaaacaatccgtcacagttttcgtatctagtgatatcccttaagcacgtcataaactgggaattctgaaacactactaaatggatcctactaatacaatgagtaaccatatgagtaaaatatgaaatcaattaattgattcaatacgcagacagaacttccactaaatatttcaactgcatcccaattcccatctaaaaaaaataaagaatcgctcaaggggaaacctgtgtggtgtttgataggtgttcgccactccagaagcagaagaccaagaacttgtataaccctgcgttccactttctttcttatttgtagattttccctggaagtttccagaatctgaacaacggaagcacataagcatgaatcttacggttaaaactaaatatatttgtgtatacaagagatcatgcttataccagtagagctgaaatgggtagatccacttcgtccggcgtagcgagcagaaccacctctagcaccacggttgtaggtgttattagcaccacgcggccgagaatctgatatatccctagtctgaatagacaaaaaaaaacttttaaaatcaccaaaattctagtaaattaaaacgataactagctaaaactagaattcatttcactccaacaaaacatcgaaagtcaggtactacataataactagctagacctagacttcatttgattccagcaaaacatctagagtcaggtacagcatgatgattgatgacagctagtaataaaaaatatcattgccagatgtgtcaacatagaaattgtgtactagaaagagaagttgattgtatcacacatggttgaagcatgtaatgatacagagattgtgccataagtttgcacataaaacgccaacactggacaccaaaagcacaaaacaaaacacccctgggtctattatccataagaatacgatttgtaacatggactcacctctttcttcttttctttcttgctctttacctcgtgaaatggatctgaataaggaaaaaacaagtatcaatatcattaataatagaacaaagacaagccttgaatcaagaactaagaaagcaaaccattaacaacatctttcttctctataaaaccgaaccagctagaaagttggacaattacaaggggaaccatattaaaggcgacagctttagaattgcacaatgactaaattctagaaactaacaaaaacgaaagtattggtctgttcagaataaaaaccccaatcaaaccctaatagaaacccttagtaattaagtcgatttcgagaaatcctcctcgggatacatgaaaaccccaggcccaaattaacaatccaaagacacagcagctcaaacaaatagaggaggaggaaaaaggaggaaccttgagagaggaggcgactaacggtttcgttaggatccatattgcactctttaagcatagcatagatctcagcctcaggagagtttacaatttccgtcaagctttgtactatttttctagaccctgacggaatatcctgaattcctttccttgctccgccgccgaccttgctgctgctcatatttatccgccgtaagctgcctctctctctctctctctctcactatatcggatctgaaggaaataaacgaagcttttgtggccttctctcagtcgcgacgacaatacgaagaacaccaaggaagctcaagggaagatatatctctctctgtagaaaacgaaaccctctccagattttttcttcaccttatagaaaaaaaacaacttttcttttcctttttttttcctctttgcctttttaaatttgtaaaattactgaaccggttctctcgtttaaaccagcagtgctaaattaaaccgaaccaaaaccacattgcccaaggttaaaaaaagaagacatacacacatgataataaaggacgattgatttgggtttatatcgcttccgatgaaagattactactagtttggattacaactttggacagagttaagcacatgaactttctaggtaaaagaagaatgtattacaaaaaaggttagagacgaatgaaccaataagatacacttatttacaagagaagagaagaaacaaataaagagagaatcgcaactgggcttaatacgcagattcctcatgtttccgttgttttcagttacctacaagtctttcaactttgtcttgttcgatttagtacgacaacagtttacaaaagttgtacatctccaatctttaaaacaaaaacaatcttcgaatgctccaaatattagccttgattaaataagtatcttgtgatatataatatgatctccatatgtcattataaagtagaaacataactagttcaataaatctcttaatactacataggagaagagatttgaactttcccaccaagaaacaaggaacgagcttcttatatattcttcatgtactataaagtttatctgtaaataccttttcctctttatggcgttttctctttgcttgccgattcttctagcttcttagctagtttctcctttctcaagttttcttatattctctcctacatgtcttcgcatcccttctctctcccatcccaagaaatctttgattctatgattcttctcttttctcttcatctttataacaacatatatctatacctgatagggaacttcttcgcaaacattctttatttcctctaccaaaccccaacaactacctgaagactattctctctcaaaagcttacggaacgaaatgactcaccgtatagctcctcgatgtttctccaccatcatgcttctatgtcttctatatacttcacgtaatctctctgcgtctgatacatatgaataagctttgttttttttcttcgcattctgaaaatttaaggatgcaacaaactaacttgatttttgtgatgattgatttcagctctagatgttatagctcagggtcagggaggacaaggtgatataccagttgttaatcctacagctccaggtggtagtaccacaacaccaaccataacacaaccgtcaccgccttccttgacattcccaggtccaactacaccaactggtggttatccacctcttgacggtaccacgccaaccggtggttacccaccactttatggtactacaccgccaggtggaggtgatgtaggtggtggaggaggcggatatggtggtggtacacctggtggaggtggaggtggaggtggtgacactggtgcaggtgctggaggtgggggttatggtggtggtggtgacactggtgcaggtggaggtgttggtagtggccagtggtgtatagcgaaagcaaatgcttcgccaacatcattacaggtggctttagattacgcttgtgggtatggaggagctgattgtggccagatacaacaaggtgcagcatgttacgagcctaacacaattcgtgaccatgcttcctttgctttcaatagttattaccagaagcatcctggttcagacagctgcaattttggaggggcagcacaacttactagcacagatccaagtaagacatcttaactttttatgtactagtccacacagatttgaccataagaaccgggaaagtagaattaagttacccgcatactagcttccatatttccagcttttatctttgctgtctccatgagcggcataagctacttgagacctccacaactgatagatgttgagtgtctagaaatagttcctgaacctagtaatactagcccaccatatgattccagtgggtcaaagaatctgataataactagagtttatacctttcaacgctaaagataaatctgagactggtattcaaatctgctcttatactgctccaggtaaaggaagctgtcacttctcatcatcatcaggaacagtcaggtatgtgtttctttttccacaaatcaacttcttaacctgtcaaaaaagtgagaaaaataattgtgattaatatctgccaattgcagcacaagccccccaagtcaaatgagtccaccagattttagttccccaccatcatctacatacccaccgccaataacaactccaactacaggcataactggctctggaccacccttcggcgtagcagagccaacagggcttccgaattcagcaacctctgtatcacatagccttctctcaatatttacagcagttgggatactaatgccactgctcagggaaaattatctttaaacagacaatagtttcagggtttcaatcattctctgcaaattatgaagcgcgttttccataactatgatgcgatctatggagctcaagaaagcagctgtgatttgcaagaagattttaatccatgacctaattctcaccatctgttctattgctatagtttatcactgaaagtatatttatttagtaggagatactacaaaatcaaagggcttaggatatatacattcttgtagacacattaagcataatgtatctctttacagttttagaaaataaaatacttagggaacggttaagaaatacaaaagcaatgtcagacattattaactattagaaagatataacagaaaataaaatgaaagctacttgaagcagatacatacctgcagcactctaaaacaagtaggcacaccgaaaatgacagacaagctccatgatacctgcagcatttccaaacagtttctaaaaggatgacaatatctttaatatgctcttttcagctcataatcttataagctgaaatttttgatctggttccttgtggaatcatatgcggctaaagatcaatctgttagcaacgaatagtagcaaatacaagcatctcataaagagcggataaatgcaagcacgttgaattgagtattgaaatcgagtaaataatacagcacattatttctagtctctgtatacactttgttacagtgatttacagatgagtccttttgtcaggagcatatttatatcaagaaaaggaacgatacaactgtgacaccaattatggctacagtggcaagaactgaattctgatcaaatgctttctgcaaggtgcctgctcttgagaaatgctggaaagccagaaaacaagagattgctaaagaaaggatagcaccttcctgtttccctctgcaagcgtataaattcaatgagtcttgactaaagaaaataaaaccttgatctgaaacattacactctttttgagaatctaaccttatgctcataacttgatatggcgccacaatcaccaaaagcaaagcaatgaagggcagctcaagttcaactataaacaaggcattgtataagaattaaaaacatacaaaggcaggcacactcttatttaacatgaagatctgataaaacatgcgtgattcctttcagcatgtcttagtaatggaaattttagcccctgacgtcgaaaattagcatgagtttcattccaatttcttttctagtaaatggcaactgaactaaaaaaaatccaacactagaattcaacaacctataacccaacctacttgaagacgaatacgaacctggaaaagagaagaacagtcgagtaagaagcgccaagaatgctgcccagatgccatattcacccctgcaagttagatgcaaaagtgtgatgaattcaagacgcagagtatgaaaatttctgtcatccagaatagcaaaaaaaggaataaaatccacaagcataggtaaatgagcattaaaaaaagcttacttcatccaggagacaatgcccattggtgcttgtagtgcgaatagtggaacaacaaaggacttatggataccagtaccccttgcaaacatcaatgcactagaaaagaaacaacattcagtatagaaatgaacttatatgctgctgacattatgaatcagtggaaattatacaattatctatcacaaatcactttcacacatgaattgaagctaaactatttccctgtacaatcatttgctattatccgattaagctaaacttgtaagaaacttcatacattagcatatcttcagcagcattctgcgttaaaattcacagctaatgagagtgagagatcatacacgcaagaaattgtcgagatccattgtagattatgaacagacaacattggagtagcataacagaccacactcgatcctctctttcgccgcttctcagccctcgccgacaccgtagcggttcgctgacgatcagccgataacctaccaaccaacattcatttagaaaaagccaaaatccactgattgagaatttatgaatcgggtgtttctgtgtcactataccttaacggattgaagcaaacaacactagtactgtgacctagaccggagatatttgaaggacgaggccggagtttaagagcgagaaagggtttctggtggtgaagagaaacgatccgggacgatgagagacagagactcgccatgaattgttaagattagttacggtggtggaaagatcactccgtcatctttccgttaaaattgaatcatttgcatcaatatcatgatcgctacgtggacggtgtagatttagcgggaatgcttttaaagtggggcccataaatacgtgtttggaaaacgacagtcgtttagttcacaatcaatcaaagaatcttgaatctccaccgttgttggcatcaatacgactgcaaatctaaccacgtaggattccacgtcagcttttaaatatcccaatcccatgtcgaccaaagattttaaatgtgtattgtttttacgtttgtacatgaaagatcatttttattgccagcgaatagttgccaaaaatgtaccagcatttcttaaagagcggataaatgcaagcacatctttcttttttttccttcacacacattcttacactgattaacatttttggtcaggagcatatagttatagcaacaaaaggagcgatacaactgtgacaccaataatggctacagtggcaagaactgaacccttctcatatgctttctccaagctccctgctcgtgagaaatgttggaaagccagaaaaccagatattgctattgctatgattgccccttcttgcttccctctgcaagtttataatgaagtcaatgagtctcggcgactaaagaaaagaaaaccttgatatatattaaaacattacattctttaagattctaaccttatgttcatgacttgatatggcgccacaatcaccaagagtaatgcgatgaatggaagctcaagttcacctattaatgtataactttaattaattaataacttgtaatcaacctacatattgaagatgattacgaacctggaaaagtgaagaaaagtcgagcaataagcgccaagaatgctgcccatacaccatactctcccctacaaaaataaagatacacaagtttaagtttaatgacttcaataggctgctcaagcatgcaaaaagaagaagagagacccatatatatcaccatgttaatgaatatatctccatgttaaaagcttacttaatccaggcgacgatgctcgatggtgcgtggagagcgaatagtggaacaacaactgacttatgtataccagtaccccttgcaagcatcaatgcactagaaatgaaacaccattcagtatagcaattaacttatgttattgacgttatgatgaaaacagaggaaattacacaatcatcattagcataatttcaccagcattatgtgttaagaaaatcacagtaaatgagagagatcatacaggcaagaaatggtggagatccattgtagactattggcagaaatcggagcagcataacagaccacactcgatcctctctttcgccgcttctccaccctcgttgataccgtagcggttcgctgacgatcacccgataacctagaaacattacaaacaaaaagagttacacaaaatgcatgactcgaaagaatcccaaatccattgttttcactatacggtacctaagcggattgaagcaaacaggactcgtgtggcgacctagaccggagagatctgaaggacgagaccggagtttaagagagaggaatggtttctggtggtgaagagaaacgatccgggacgatgagagacagagactcgccatgaaattgtttagatttagtcacagtggtggaaagattgacggagtgatctttctgttaaacgactatatcactgcatgaatatatgatcgttacgtggacgtgttgatttcgtgctttagagtggagccgagttacacgtgattggaaaacgagagtcgctcactatcaatcaaagaatctttgaatctccaccgttggaatcaactccaattcaaatccaccccacttaggataccacgtcagctttaccatatctaattcattggaacatgacaaaatttcatgtcgatcatagataatttcactagtttttttatttatatatattgcaagtcttatcataaaataattgtaaagcttaacgcaaaatttcattggtaccgacataactaatttcagtttcagatgtatatcttcatcttttcaaatgttgtgcctctgttttttttttttttttgcaagacagacttctgtccaaaaaataagacaaaaaagacttgagagacaattctttttttcttactgtacaaattgccaaaagctttaacaagagttgtgagagttacaacataatacccacataaaaccgagtattcatggtttttttttttacatatactccatggaaccaaaaaacatgaagaaagaaaaaaaaaaaaaaaaaacagagtaaatactcgcacagcttctgcatgcagcatttaaaacctgcaattcgaaaacacacttccgcagggtcctgcatgcatcagttaactctgcctttcaccaatatgtacggttaaaaattagtacttagaaagaaaaaaaacagccattatcacaacattgagtcgtctctcaactcctgtgtcagcttctctctctgccatcatcatcactgagctgagagtcgaggaggtccatattcttagattcctcatcaacaacctatgaagaacaagaataccatagctacttaatccgagtaataagtctaaagatcatcgctaactatattatgcagtattaacttccataaggtttagcattaactttcagaccaaagagtaactttacctgttcaacagactctggattgttgggagtgtcgaagataattggacgacaacgcatatcttcattcatcaagcttgagttctgaaaatgggctataagggcagattttccttgtatccgagcatatgccaatgaagctactttctcactgttgaacttctcccacttcttcccattaaaagcctgcaaatattggatgtttgttagttcacctttcgagtgatcttagctaaaagtataagaaagaaagcggagagggaaggaaacctcataaaatggaatgatgagttctggattgagcatgttgatgaatgcatagcccacattgcatttgttctgcaaaaccaaagatttattaaccgctcgttgtatcagttagtgattttggaactttgaatctctaatcaatttttaccttgaaatcaatgggcaaatagagaaagttgtaagttccttggttcttttcatcgattgcagctaacaacatcttcgaggtgtatctgttgatataaaagaaactcattcagtaatctggctgcatcatattccaagtatatttcaagagaagtaaagataaagaaaggaaaagcttacttgtttggaatgtttttaatcatcaaggtagtccgagaatcctctccattaagaattttctccaaatcaagttgaaactgtttcctgctctcaacctggttcgaattgttctcaactctacgaggcctaccattttcatacaaactgtcaaagccagaggcgaaccgccctgggtttagaccgctgcttaagaacatggggctgaatctcggtgaagacatcattctgtaacttgaaaaaccgttttcggccatgcttccagagttaatgatcccattatttgccattttggaagagaaacttccaccgttgagacccattccactcattccttgaagaccaacagtgttcatgaacaaagcgtcctttgaagactctgggacgaatccaaaatgcttttctagaggaacaccagatggtgcagacccaacatggaagtgatgatggctacgactttgattttgatgctgatgtggaaatggaacagatcggtctactcgagttgagaagagtggattcccagtggatgatgttgaccaaaccgaggaacttgaaggttcagagcgtgcgttaggacttccccagagaaactctgaacccgacaacgtctcaattccacctccatttgagatcaaaggacctgaaggagagagatttcctgtgtacttattatccatcttaggctcttggaataaatgtgatgactgttggaagccgttgctaccaatttgacccctgccaatgggtgcaagcttcgagcttggtccttgtgaatttagagcagaagccaaaccagacaagtggccgttccttgtaggacttaagccaaaaacaggtgacctgctaagtacactttgaagcggactaccttccacgggactgttcagcggccagttaccttgcactaaatcaaacagtttcagtctttgaggatattataaacaaatttgtttgaagaagagcatcaagaaatagactcacttgggggagagtttgccatgggtgaaccaatcatcggtaggtagtgcaaatcatcgttctcaagatcttggttaagttgcaacatcaggctagcagatcaaataaatggtcagatgtaagaaatgtaatggcattcattattcatgtagcagatctaagaaagaaagaaaccttcgacgagctcctccagggcgactaggttcaacctttatacgttttcctgcaatctcacacctgtttaatgccttcaatgctgcttcagcaccgcggacatcataaaactcgacgaatttgtgatgcctcttatgtggtgtttctcttatctgtttttcatgaggaaaacagaacttaatatggatgtttttcttccaaaccagttcaaagctatcaaataaacagaatgatatctatcacctctttgatctcgccatgagcaccaaaaattccatgtaagtcatcattagaaattgaaggatccaggttaaacaccactaatgtcccctgattcatatctttctcagatggattatcctacaaattacacaggaaacaggctcaatataaacaaactaggggtgcaactaagaatcgatgacattgttaacaaagagctatcagcaaacctttggaattgagaagtgaatgtccaattttctacgtcttaatggcttattctgtaaagacctcatagccattcgagcagaacgaatgtcataataagatatcatgacaaatcccctatgcttacaagtggtatagagcgttctaatatcaccgtattgctgccacatatcacaaaaaagttaacccatcagtgtctgtagagtaagtttgttataaaaaatccaacagtgtcaggtcaagttttgttgaagttacctcaaagagagctgtgagttcagagtcttctacattgctgttaatattccggacaaacaatgttctcgagggatgttcaccataaggatgctcaccagcaactgttcctgcaccatttggaatattgaattgcggaattgcatttccaccaagacttgaaagtgatagccttggaggaccactcatactcaagttgtctcgaaaatcagcgtcaagttccattcctcctccactaccaaaaagatcataatcatcagcatctggtaactcccccaggtcaagatcatccatcatccctgtcaaaagatcctcttcatcagggagcaggtttccaatggaatgagattcaaagtcatcagcactttcgttaaacttgtttgtgcgagaaacagccgtatcgtctatcagtgagaaaccatctctgttatcactcaattgcactgcaaaagaagtaaaacttgtcagcaaaagagagaagaaagccatatataaacgagtaagggattcggttaatacgttttccacgggggaaaacaggtaaagaactggagaacaaagtagcatcactggagggatgatggtgacgaccaaaaccagggagaatcccccaagctccagcttctgcttcatgtggaatatccattctagcaacttctttcttttgatctgctttgcaaaattaaaagagaataaacgcattagctcacatttataataatcacatgtaaaatcttcacaggtcagataaactttgagaatcgagatacaagagtagacaacacatttgaaatctcaagtcatgtgctgaaaaattaacatgcaagcaagaaaccataacctaaaaccaacaaaaaagcttgatcaatacaaaaccacaagttttgatcaaacaaaagtcgtgaaagtaatctttttttttcgaaagtctaaaagttgagcatttgactaacacaatagtcaaatgatgaagctttaactcaattaacatcaaaattaagaagatcgttgaacaaataacatgattaaactcattaagaagatcaaaccaacacagaactaggttactaggtaaaaagaaactaacccaatttacttcttataatctccgatcatcaaaaagctgaaaactttcagagacactattgatcgaaatcgccgacataacaaaagagaagaaaccctttaagaaggggttttagactttagacaaaaacccagaaaaaaagttgaaaattttcagtagaaaacccaatcaattgaagaagaaaaacatgaaaaacccagaaatcaaaatttgttgcgaaagtgaggaggtaagagtaaatacctgaaatgtgcagttaccaacaccgacgatgatcacgatacaaagcacgaagagcaaaagagagaatctctaccaaccaaaataaaattaaaattgagaagaaaaaaaaaagagaagaaggaagaaaaattgaacttgtctctttattttttaattttgagggtttaatagagagagagaagaaacaataatggtggagaaaaaaaaatatcagagaagacaagaaaggatgagaatgattgatgtggctaaagaggttttttcttaactgtatttaaatacatttttgagtccgacgatttcgacactttttattttatttttttaaacctatgattttgacacttccgtgtttatctctgttatatcatcatctacagttgtaactatcccattaatatgttaagattttatgaaatcaaaagtttatttgagtcaagagtatctttactaattactatgcattttttgacatacacatttattatcagctagtgtcatctaatgcatgggatagtggatataccaactaaaaatattcagattcttttgagaggtacaatgtatccatacggaattgtaatctttgttcgcattttacatattttaaaaagaaaaatgaatttagatgaattttcaaaagagtttatccataagattaggaaataattggaaaaagagagtaaggaaaaccgtgagctttttgttttgagcaaacacatggtaatatcgttaggcacactattggtaatatagagttgatttttagtaatgtcttctgtttgttattgttagcataataatgtcgatagttaaaatactattgtatttatgaatgagatattttaaaaataattgggtaattttctgcgctatgcgagcagaaaatatgttacgtcaaaagcaaatttttatgaaaaaatgatgtaagaaaaaaatttggtttacgaaaaaatatattaaataaaaagaaaatcaaatttatttaataaataatatgaaaagatatttaaaattatatatttgtatttatgaatgagatattttaatatctttcaaattaataatgttgactaacaaagacagcatatagtttatggttttaggtatatattttgatattttccaaacgagaaaaaactataaaatttgacagcaatgtatcttaatattttgtaaagtatacaattgtgatggctttagaaagtttcaactttcagtcatacccataaattcttcgtagcttcttacactatctgaaacattttttttttttacttaatcaaattggataaaaacggagccaatatgttgcttaattgactgagtatcatccaaatgaagtgaatacgttgttgtcgaataatggatggtcaggcacatatagtcaacgactcaaccccatataaaaagtttagtttaattgtaatctcttacagaaatttaaaacaatcttagttaatcaaattacgcggcactgatcttacgccatacggaatcatcaagtagaccaatatttgaccaaagaataatgcaacatctttaagatgttagttggtaatatgaatttatttcaaaaatactctattgtatgtatttagtttattattttccccccatctatctcatatcaatgattgaaataaattcatcttttatttcatagtatcgagcgtacatacatgacaaattatttgccgggaggtcggaaaagtcgaagaaaagatttatcaaaagtgtcctggataatgtttcatattcaaaaatacctatcttcccataacaattaattgagatgtcaagtcatcgtccacacaaggaaaataatgcagccttatatgtatctatacttgaggatctataaattaaaacgaattagttgcttaatactaatatatacggatttgaatgatccatgacttttagaaatgttaaagagaaataaaacattctatattcgtttataaaattaaaaatataacatacaaaattactagtgaatttctgtacgaaacaatgaaataatgactagaccgagtcagcatgagtagtttattatagaagtaaacaatagataattaaaatttgcaaagaagttaagaaataccacacttcatcatataactggaccctctaattattttatttattctttattgctagttttatttcttcacgttagagctataatatagtacacaatacaaaaagaaaaaattaaggtgttaacatcataggctcacttggattaagatcatagacttttttttttttttttttttaaagtaattaatctacagtttctactttctagtcttattgctttacggtttgtgtgatgttttaaaaataggatattgcgaagccacgtcaagataatcttgaagcatatgccataatgctactatgaatattaattagggctgcgatagatgatatatctttagagataaacaattaaactcaaattagtgtttataagaattctgaatagtagaaattatacaagtcctgcttttacaagtggtacggattgttttttattggacaaaagaaaaaaatgattgtaaacggcagtggtgactgattcaatactattacaaaattatatagaactgaactcaattatgtccaaatttgacatggtcgttcagataatatacccttttttatgtggctgaaacaaaaaaaaaatgtgaaaacgatgaaaagataataatacttgtaaaatttggtgtgacgtaaataaagaggcatataaaaccgaattatttgtacttttctttgtatatataattacatatttgaaaatttagatattaatttcttgaaaagctaattagagcattgacttaaaactcatggttggagataatagtccttcccacatgtgacagttgcgtacggtcgttactagtagatgtgttcacaaaggagttggtttctttcttcgattcagtttttactttctagcatgtaagaattgtattattttcgtttttgtgttataagagttatcgatagtaaacttgaggtgtacatgttactagaaaattagctcaattgtaaagaaaattaacaaatgttagtacaatagaaacgtacacaatattggtttgatgaggcaaaacaaaaccgatatggtttggtataaacaaagtcgttgtctgaaggacgtcgagtgtaaagttaaaagacgtgcgtttgctttgcgtcatagaatacccaaatccttattatccaatgtttcctttttcttagggttctaaatgcttacgcaaactatatacatcacacatttgtacttataaaattgagttattaattactttatatcgtacgttggtttcaaaactgttgctggacccagaaaaacaaaaacaaaagaggactaagaagaagcaagaactctaaactccatatcacactctgtccttttgcaaacttattaaactataattatatatagagacgcaattgtacacatgaaaagttcagaatataaaacttcctagtaagaacacatacacacaaacaatgtcacaagcatccaattgacggatgcagagtttaaacagcagacatttcttccaaattgccttacatgtgtttattgtgtaaactacttacagattctacacgagctaaatcaaaattcagtgatacacgcgaccagtaaagatgcgagcaaactcagaatctgcacctttattttgcaagagagaggaagacagcaacggagacagatattaggaaacagagatcacttcttgaggagcaaagcactgcactgagccatgatctttgaggctcttgtgattgagtttgtcatgtaaaaattctcaaccacgggtttgaaaggtgttgtgtctattgtctcattggactctggcttcaaggaagggccaaaagcagctgcctctcgctcgtctgtgtggactaggtttggactgatgaagcaacccaacattttaatttaaacctttattactgatgaaaagagagtgcattattttgatgctcgaaactatagttacaagacaaattaccttggcttatattgcaagccattagtagtgtacagatcgaactgcagttatgaaggaacttatcttagacttatccttctggatgccgtctatgccgcaaataccactgctaacatcaattccatcaggttgaaggatagaaagagcttctgaaacatttgttggattgattcccccagctaagagccacccatttctgcttctgacggaaggtaacttgaattgagcccagttaaatccttttccacagcagaaaattgttatgattgaacctatcacactcttgatatttcagtcacttgtgaaagacaaacggtttcatggactagagtgattgtgtaactcgttcctcgaaggaatacattacaatgagacagtgcgaagaaacttaaaagttgatctaggtacctcccacccgttgcactatccacaagaatccaatcagcgagatgaccatcctcttcaggaactacattcaggagctttccatcctcatttgcattaaggacatatatgactttcctttcccgtactaacctcgagaaagcagcacgtgaactattaccatgaagctgtaagaaaccataaccatcaaccgttaataaagctgagaaaatcactttggtgagagcaaaataaaaatcgataagaatgtagagaacctgcacaagctcaaggtcagaggaatcagctgctctgagtatcgtgttctcatcatcttcaacaaaaacaccaacaggtttggccccaccttccctggccacttgggaaatatcctttgcaacagaaagagaaatggatcgttttgaatgtggccaaataatcatcccaatgaaatcagcaccagcctcaactgccatagctgcatctctggctgatgtgatgccacacatcttaaccaaaggtctatcctttcctctgtcatcatccttaggagctacattctctgtgctggaaacactgcagctcaatttcctgttctgagcatacccgacacttgaaaaagacacctttcgattgcttaaacctgagcatatccagtaagaaacaagagatcagtggcaagattcagcaatataccggaaacaaagagaaccacacacacaaattctagtgaaatctcaataaaaccaaaagccaagaaaagtaaccagatttggaggttttggagaaattcagagctctaggatggaggtggagatcagaggatattcctgaggaaaagaagaaagcttgtttcatcaactgatcttagaataaagcttactattaagaaaacaacacaagctctgaattttacaagacaaccaagtttcctattagtacaagaagatgacattgacaagcaaaacaatataatagaaaagtggatcatcactaaagcaggattgatagcagcggaattcacaactagaaaactctatttaagctctttgagtaaatacatggaacaagttatctgcatttctatccccagaaagaaaataatacctgtagacatctcaatttgacactgttggaaatctcagatgatatcggattttctcccgtcgatgaaatgagacgagagagggtcagctgagtttttgtttttgtacaacaaatggttttgtacaacagaggaagagagacgatcgaattatgggccttttggattttatttggatataaattgggcctataataaactaggcccatatataaagcggtgggaagagagaaaccctaaaaacctaaggagtcttctgcttctatataaagcctaaaccctaacctcctcttcatccaataaattatcgacggccaaataaagttttgatttttatctctcattcggtagatttagtgaattaggtgttgttggtgtctatgcttcttcgtatagcttagattttgttattttcgtaattcgtttaatgtttttgaggaaagtgatgatatgaaattgtcgccccaggcttaatctgcatccattacgatggttgtaacatggtgattgactatttttgtctgattctctcaaatcgtttattatgattctgttataatggttgtgtatggatatgatgaaatggcaataatgttttgtgacacccagtctgatcttcgtgattgatttgccatattttctgatcctaattcttcttcagttttgtgaattttgattcaaagttttgatctttgaaagggaggaatgaggatgtaattccatacgtctgcaaatctgaaatacagtgttgatacaatgacatgcactaccatctgacctctgttttcttgtttttgtttttgttttcaatacccttttgttagttgtctgcaatcagtgatgaaattatgtcaaattcaatgattatacaatgattattataatcactagatcaccatctttcggctgagattgctgtttcttcttttttggaattattgtttgtgttattgttgacgatttgcctatggtatctgatgtccaaagtttgataattgtgtttggacatttcgtttttcttaggcagaaagtgatttcaggctttgcgacactgttagcttatcacataagctacctgttacttttaatacctggttacatctatatatcaatctttggtttggtttgggttttaacatcattgctccttttgtttttcgtatcatcttgtgtttttatgtggtcttgtgcaggatttgttggcttgttctcttggtgtaggattggcttctaatgcggatgatatgcttactacgagcaacttcaatcggtctcaagaatcaaaattgtctgttgtttaatgttgtatttgatggacgaatctagtcttctaagactatgtaatgtaatctcttaacccaataaagaaaattatcaacttagcaatattcattgtctaacttattttcataaaatggcaaagatactgaagttgatttccagatgatgagacactctaaaagagagacaaacatgatatcttgtatttctgtaatgatctgactaatctaataatacagtagaatcattacaaacaaagaagaaatggcttgattttgattctctaaaatacaagccgagtactactatgttcttgaagttgaaaagagcatggtaaagaacatctagtactagagattgacgttataagagccttttctgtgtctccatccattcgtctttggaccaatctgatgagatactccaagaaaaccgaatcgaatggcaatgtgattggtccttccgtggggatgccaaactcttcttcggatatcttcaagagctcttggataacagagttgctcagataacttattggaaaagcaaagcggattctatcggatgtgtaaaccacaaaacagcccttctctgcagcggttgagctgctagtagtatcagttgatctatgaaaagagattcttttccttcttaaggcagctctctgttgccatttcttggccatcttcaagagcttctttgtgttcatcattatatttagggaaaagctgtttaagattggaaagaggaagagatgtgcaaattgtgttgtataacgtaactctttgaatgcaagttgtggttgatgaagaatccaataggcttgttgcatgatatatataaggagaaactattagagtttagattcacttaagagaaaccacaccagacataagacatgcgtctgtctttgtctttgttttatatgtgatgatcataaggggtccctaagttgtaaccaatcttgtctactcacaacatgtggattagaaacctctcctgaaaatacttgaccatgtggatttaggtatgagtcacttatacaatagtattactattaaatttagacacagacatgtgcaagtgaatgaaagatgcagaacttgtagaccctttgacgtttacagagaagttagaaccctaaacttacagaaaattcaatggttgttaatagctctctagatgagtgaaaaagtttcatcaagttaatattttgtagaataattggaaccttctttgaacatacaagcaagtgttctcttttctcttctcactgtgacagattaagtaagttcaaattataagaacatctcttgttcttgtgcaatcttctgtgccttaacagagattcatatggacatacgatgattcatagtgaagtacagtatatttcattaatatggcttgagtattcagagatttatatgaaactgtcagaacaagtgatttttgaagttgggataaagtttccatttatatggaaggtcatttttgaatttttatgagacaacttaaatgagagaccaaataagaatagtttgtattctgaaacaattaagctgtctaatctataaactctacaaaatacagaaatttgcgaaactctaaaacacaagcaactgttgagtagcactacaatgttgttgtggttgaaaagagcttctagcacttgagattgacaataacagagccttttctgtatcttcatccattcgtctttggatcagattgatgagatactctaaaaaggccgaatcgaatggcaatgtgattggtccttccgtcgggagaccgaactcttcttcagatattttcaagagctcttggacaatagtgttgcttaggtaacttaagggaaatgaaaaacggatcttatcagccgtgtaaaccacgaaacaacccttttctacagctgtttggctgctagtagtaatacttgatctctgaaatgaaattctttttctcttgagggctgctctttgttgccatttcttggccaacttcatgagcttctttgcgtttatcatcattttcagggagagttaaagcttgagattggaaagcaaggtggagaaggaaagagataagattggtgagttctgtttgtatagatctctttgaataaaagttctggttgatgaggaataccaataagctttgtttcattatatagaaggagaaactattaggttaagacaagctcctgagcaatccaaccagacacaacacatgattatgtttctaatctatggtcccaagttggtaatcaattatgtctgcattcaactagtggactatagataacttgtggttagaagacatgatcatgtgggtataaatttcctatatggacatttatatgacaagatttaggtactgagacattattgaagaatgcaagaggctgttgatacttggttagtagtcctggacatctaaatcaaatgtgagtcacaaaaataatagatcaaatatatattcaggggacatcaaatcttttttgtgaagtcaaggaccaaaaaaagtggttagaattaatggtcactgatatagatggatacaatttgcatcagacaaggaaagacatgagctggtgaagccaagatgaagagcatgtaggtccttagattttctggccagaagaaaaatcatcgatttaaccatacttctgttttatagggaaaatttatgaaatgcggtgaatgaaattttttggtttcagagaaaaacagttggaagaaaccgtcacattaactgatgttgaagttatctctatagtccactagttaatattttgttgatcaaataattttggtgcgtacgtaacgtaagggttcagtgtcattaaattttgtaacgacttacaacttacatgttacaaagatgctagaagtatcgttgatacatgcattagctgtctgctgcttatacatgtcacaaagtactttcctctgttcatcaatcaggttttggacttttcccatttctttggatttcaagtcaagctgttcactagagatgttgatcagattgttcaattttttcttaagcatgacttttgttaagactccagttattcatccacagccggaagctgcttaccagattcttcaattttggaaagaatcagtaacaaatttttcttctttctatttcttacatgctgaaaccatacatgtagtaaatagtaaatgtataaagttcaagatatatataagagttttcaattactctcaataatggaatatatgaagttagtgaattttgaatttttgtgaaacaacttaaatgagagacaaaataagaatagtttgtatttctgaaatgatctgtctatctaatccactataaactttacagaaatttgctaaactctaaaatacaagcaactgttgcgtagtactacattgttgttcttgtggttgaaaagagcatctagcacttgagattgacaataacaaagccttttctgtatcttcatccattcgtctttggatcagtttgacgagatactctaaaaaggccgaatcgaatggtaatgtgattggtccttccgttgggagaccgaaatcttcttcagatattttcaatagctcctggacaacagagttgctcagataacttattggaaaagcaaagcggattttatccgccgtgtaaaccacgaaacaacccttttctacagtagaagagctgctagtaaagacacttgatctctgaaatgagattcttttcctgtggagggctgctctttgttgccatttcttagccatcttcataagcttctttgcgtttatcatcattttcagggagagttaaagcttgagattggaaagcaaagtgtggagaaagaaagagaaaagatatgtgagttctgtttgaaaagctctttgaatgaaagttatggttgatgaagagtaccaataagcttgtttcattatatagaaggagaaactattaggtttagacaagctcctgagcaatctaacccgacacaacacatgcttatgtttctactctgtaagggtcccaagttggtaatcaattatgtcagctaatcaacttgtggactatacaacttatggtgagaagacatgatcatgtgggtatgaaccctatatggacgtttatatgacaagagttaggtacttagattgatgaagaagaatgcaagaggctgttgttacattatattatgtatatgcaatagaagccaaaaaaatgtcaaactcaaggtctcaggttggttagtggtccatcagctgaatcaaatgtgagtcacaaatataatggatcaagtacttattcaggggacaacaaatctggttgaaattaatgatccgatagagagatacaaagaaaggcatgtgctggtggagcaaagatgaagagcatgtaggtccttagattttctggcaaagaaaaagacagtgagtcaactattcctgctaaactttcacatttccttgagatagattaagcttggatcataaaaacatctcttgtttttattacttttaagagattcataaggaaaaaatgacgaatgaaagttaaggcaccattttttatgactgagagttgcagagcataacagttatagaaccttcacaacatgtcaagaagttgaagttatctcatttttctctgtgtacaatgaaagttgactttgatgaggcagtctaaaagatagacataaagaatagtttgtatttctgaaatattctgtctaatctaataaagtagaatctttacaaacacaaaaactgctacacacgaattctctaaaatacaagcaattgttgagtactacgttcttgtagtttcaaagagcattgggaagaacatctagcactagagattgacattaacaaagccttttctgtgtctgcatccattcgtctttggaccaatttgatgagatactccaagaaaactgaatcgaatggcgatgtgataggtccaccagttgggaggccaaactcttcttcagagatcttcaagagttcttggaaaacagagttactcaggtaacttagcggaaaagcaaagcgtgtgctgtctgtcgtgtaaaccacaaaacaacccttctctgcagcggttgagctagtagcactacttgatctttgaaatgagatccttttcctgtggagggctgctctttgttgccacttcttggccatcttgattagcttttttgtgttcatcattcttttcaggaaaatattttgtagatccgaaagcagaaggagattttaacttgtgttgtagaactctttgaatgcaagttatgattggtgaagattcccacaggcttgtttcattatatataaggagaaactattattgttttagagcaaccaagccagacagaaacacatgccaggtttcttgttagtgatcataagggtcccaagttagcaatcaatcttatttcaaatcaacttgtggattaaaacatacatggtgagaactgagaagacatgaccatgtgagtatgaatcttgtaataagaacgttcatatgtcacgatttagctgatacaaaggcattcaatattcaattaaaaccctttgatgttcccagggaagtaaaatctcttaacctgcagaaacttcaacggttcctaagggtctcaacttattaataaactatgtctgcaaatcaacttgtggactatacaacttcttcatgtgggtatgaatactttatgaacctttatatgacaagatttaggtactattatattgatggagaatgcaagaggctgctgttacagtatatacataatgagaacttatacattacaagagaagccaaaaattaccaaactcttgcatctgtacagatttgtttgttagcataaggggtccatcggctaaatcaaatgtttgtcacaaagataatagatgaagtacttattactcaggggacaacaaatcttttggtgaaatcaaggacaacaaatgtggttagaagtaatgatcaattagatacaaaagaaaggcatgtgctgatgaagcaaggatgaagagcatgtaggtccataaaatacagctacaatttctggtaaaatttcatatgttcttgtgtagtctatgagaaacttgatgtaaggtaattcgtagtgaaaggcgttttactcccgctgcatcatttttcttgaaagatagtatcagagtatatatgtcttcaaagaaggagatatgttttagtgaaatgggtcaaagattgttcttaagaccttaggctgaaactgcgagaacatgtgacattgaagttaaatttagatgagacaatctaaacgagtgagagagagacaaatatatagtagtttgtatttttgaaatgatctgtctatctaatacagtataattttttacagaggaaaaaatgtctacactctaattctctaaaatacaagtaattgttgggtataaccactctgttgttcttgtggttgcatagagcatctagcactagagattgacattaaaagagctttttctgtatctccatccattcttcgttcgataaatttgatgagatactccaagaaaaccgagtcgaacggcaacgtgattggtccacccgccctgaggccgaactcttcttcagatatcttcaagagctcttcgaaaacagagttgttcaagtaacttaacggaaaagcaaagcggattttatcaaccgtgtaaaccacgaaacagcccttctccacagcagttgagctgctagtagtagtagtagtagtagtagtagtagtagttgatctttggaatgagattcttttcctcttgagggcagctctttgttgccatttcttggccatcttgagtagtttcttagtgttgatcatctttactaatagaaagagagcaaacaaaaaagggattgtaagttgtgttgtagtataaatctctgaagtaatgaaagtggtgaatgatgaagaatgctctaagctttgttgcattttatatataaagagaaagtattagagttttagatataattaagagcaaccaaagaagacagaaacacatgctcttgtagttcttgtctaaagaggtcccaaactagtaatcaatcatatctgctaaatcaatttgtggattagaaaccattaacatggtgagaagaaacatgaccatgtgggggtattaaatcaatgttacaaagacatttgaaggtgaaagaaaagatgcgggtcctctcatgttctcagagatgtaaaaaaaccttaaacctagagaaatttttggaataccggtttaattaaatgtaaaccgaactgaaccgaaaacccttattagctacctgtgaactgcctcttatataaagccgtcgctgacaatctcataggagactcgagagagtcctaaactttcaaaactagtgattatcttcgagtcatgtcatgttagcgtttaggggttttgtgtgtctatccacatgttttctgcttctatataaaccctaacgctctcgatactctagttgttgtgtaagtaggtgttgttttgtgtctatgtttcttcgttagctcagattgaggaaagtgatgataaggaattgtcgccccaggcttaatctgcatccattacgatggttgtaacatggtgattgactatctctgtctgattcttcgaatcttttcttagattgttttataatgtttgtgaatggatatgacgaaatggcaataatgttttgtgacacccagtctgatcttcgtgattgatctgccatattttctgatcctaattcttcttcagttttgtggattttgattcaaagttttgatttttgaaagggagggatgaggatataattccatacgtctgcaaatctgaaacacagtgttgatacaattgacatgcactaccatctgacctctgttttattgttgttttcaatacccttttgttagttgtctgcaatcagtgatgaaattatgtcaaattcaatgattatacaatgattattataatcactagatcaccatctttcggctgagattgcagtttttcttttttggaattattgtttgtgttattgttgacgatttgcctatggtatctgatgtccaaagtttgataattgtgtttggacatttcgtttttcttaggcagaaagtgatttcaggctttgcgacactgttagcttatcacataagctacctgttacttttaatacctggttacatcctatttttcaatatcaatgttgttttcgttttgtttatattccatcttgtttggtggttacattccaaatctttttgtaatagcatcctctgtgtttgactttagtttgatcttatgaagactctttgactcaatcccaatctactgatgcttctgtgttttattgtcaagttcatgtaagcgtggttacttcagaaagtgaagagcattgcttggacttcaatgggatttacattggtatttactggattgtcagagtccgcccaagtgcttattggactatctggagttactcctatctgtatcatgaattcttatgtaatttttctgtgacgtgtaatgattattgttccactgatattaaaagatgatgacagagttattacccttttgaaccttgttggtatataagttaacttcactgtccggaatctatactcttttgtttggacccgaaatttacatgtgacaattaagtttgagcaaatgaaatacacaatgcttatggtttgatgtgttggtctttgaggacctttactccctagctggagttttccaaaatctgtcacattagtgtctcttctctatgcttcatatcaaccattgtctcctttccccttgcctttcagtttcagtatctctcatcacttgttgagcttgattcttgataacaaagattgacagaattggaatataaggactgttgttggaccaaaatcaaatgactttgaacacaattgttggatcgtaaaaggctttgacagaggaagattgcagcacttcttacacagaggaaatgcttgcttgaataagaagaataaggattctatgtgtgttgtttaggaccaaagcaaaagctcattatacgataagattacacttttgtcttgtatacaactttcttcaatgcaaaaaagggatacaaatattcgactaatacatgtaagaaacaatcaattggatcgtaaaaggaacaactgtcgactatattaacccacactcttcttcgtttccttgatctcaagctattgccgactgaatggtctcggcctctgtaggacgccaccatgacttctgaacagagagcaatccttctccatctttggaatgtgtcattcttacattccatttcatcgatttcaccatcttctcaatttctcctatcgtttccatgtcatctcttactatgaaagttccttgtggtctaagaatccggtctacttcagccatcacgcccaccaagttgcacctagagagaatttgtgtatacatagacatcaaagtttgcaatcaagaatatagagatagagacaaaggagatgaataaacgtgtatatacctctttttcagtgaagagaaaagatgatcagcgtgaaggaggtcgtaagtccgagggtaagtgctgaatgattcacaccaatcatgatagattccaaacaaaccacgttcgtatataatcggaagggtatcaggtgagtcgataggaactacattcatcacccacagtttcagatccttcaatgcagcagcaaaactgaaaaccaaaaagagatatcattaaaaacgaatcaagagagccaattttgttttgatgtaagatagtataagcttttgcttaccctccatagactgctctcatgtccatcacatttctaacataagaccaatcgattcccataccgttgaggtatgactttgaaacaatagtcttccagcgttcatggtctgctgtgaaatcctcttgtgcaggttttccatatactccttcctgagaatctaaccactgaggaaccgtctccactctttccggccaactttcaggccaaactgctccgcgttttgatgaatcttctgttactttgtgaatacatgcctcaagtggaacattcctgcatcaaaccaaaaatgttagcaacagaactgcattggattactattcaattgtcaattgatgtaagaagggaaatagataaactaccaggcggcattttgatcatcagagtctttgcagagaggtggctcattttgagatctttcattgtagcatttattcgacattggcttctggtaaatggcagcaccaacttcattcagttcatctttcttaatcgtcatcagttcccagcacattgcctttgttagcttcgacatagctataaacagagaacaccatctcacaagttagttaaaaataaattgcccagccttatccatggccaaagaaaagagaataaatttctcaacctttccatatgccaacatcttcctcagtcttcctatagactggagtcgctgaccagacaaagaaaccacccggcctcaatgcacggttcaactccaaaagtagtttaccaccttcaattcagacgaccaaaaagaggttatttcaatgaaacaaaaaataaagacagaattacacaaccaatatgaaaaactttttaccttcgatatgccaaggaactctacaacgagcacaatggataaggtcaaaaacagatcctggaaaaggtaatctcttggttcccataacatttgacattgcaggaataccacgttccagagcaaattgcacctgtgcctcgtgttcgtctttgggtgcaaatgacaaagcgagtacatctctgtcaaaaagatatcccccaaagctagcaaccccacacccaacatccaatataacacgagtcctatttccccaagcaatatcaggatatgactgcaaaagtatataataataacgtcaatagtcaaatgagaaagttgtgtaaacgttgcatgaaagatcaatcaataataagttgtacctcttggaggaaatcaatgtagtgaagagcaccattcttgaattgagtacctccaccagggaatgttaagtattcaccactcatcttcacccagttttgatgtcccttgacttctgcaagcttggtgtgtggaatattggtgtaccagatctgtggcaacagaaaacagaataataaattgatatcattcacaaataatataaaggaggataaggaggtttttgtcttccttatatgcatattgaatttttaccttttctctgctcttaggccacttgatggatcgcttatacccttcgggaagagaaacaaggcagcgtggagactcctcgggacaatgcctctcacgatgttcataatgctttgtcgaatgaagctttctgatagcttgccaattgtcaaggcaagggatgtagtctggtccagctgtcacattgcagactttccatttaattgaggacacttgtgctttcttctcgttctgggattccaccaattgggtagaccaagccccacttccagtgcttgactcctttgtgatttcagcctggtcaccagctgggaaaacatccttactcttctcagtgctctcttcagtttcaccagcgttttcttctgacttcttctcggtgttttcttcagattcaccagcattctcttcggttccattactatcctcagatttgttttcttctgagctctcttccagttgtgttttctctttttgcttggtttcatcactttctgattccgtgtctttctcaccgtctccattttttctatccccatcaccatttttgtcatcaaactcctttctttcctcagccgactccgttttctcaccagagttctcctcaccagatttctcaggatcagtcttctcttcgttggtctctgtcacaacctccgtctcctcattcttttcatccggaaaactcttggaacctcgatcaacctcttcacttttgaaatcactcttagtagtatctacatcttttgtcctctcgtttgcagagaagtcaatagactcagttggagcagaccatgaagacatgaacatccacgccccaaccaaacatagagaaacaattaaaacgatggtaatggttaagccatatcccgatgacttcttcccgtctacacgagaatacttccccattgccatgatcctaaacccacggcacaatccctagtcacatgcacctgcaacaacaaagtacaatggcattagtgaccagtaagagtatcaatcaaaaaggtatggttttgacggattaagtccaatgtctaagtttaagcaaataattgcagatctagaaaaacagaaactaaaccaagtccgcaagatcatataccacaatcacacttgatttacacgtttaacgaacaaatcgaacattaggaaaactaaaatcacagtagtttaaaacaaaattaagagcaaagagagtttaagaagtaaaaggaacaagaaaagctcatgtacatatccgaatcttgcatttgtagagatacccagaagcaagaacatcaaaagaaagagagagagatactcaccagagaaaaagggttgcctcagatctccccaaagaatgaaactttatgagcagagagtagagaaagttccagatccggatctagtagaaagaaccagagagagtaagatacaatgatcctactagattgcaaagtttttatatcgcaggagcaagtggtgagtgagcagcaatcgtactagttactcagcatagttacggtgttaaaataccagaatttggatctgatttcacaccaaaatttaaaaattatcaattttggtttacgaagattgtttgtttattcactaaacttaacccgccgtcggtcaccgacataaagcgacttgaggaagaaatatttctcagttcgcacaggaaacggcgtcgttttttatggagcaaaacagctaagctcatgaagaaaactcgataaggtccattaggcctacttttcctgtcaaatttaacaacacaaataaataaaattgtgagactaagtttatcgcaaagcccatatcagattaattaactatttgggtcaaaacccatatagtctaagtggcttaagtatgttggattaaacttgaagaagataacttaaggaataaattattattgaaaaaagatataaaagcccattaggcccatttttcctatcaaatttaacaacattaaataaataaaattgtgagactactttctagagtgaggagtttatcgcaaaacccatatcagattaattaactatttgggtcaaaacccatgtagtctaagtggctttaacaccaaggcggtagatttttagtagaaactcatacaattaaaaaaataaaaatatttaaaaattaagatagatatgagagaatctctaaaattcctaattttaggatcgtttatacaatttctatacgttagtttttttgttttttggatataaaagtaaaatattaattttttttttttccagaaactatatgaaccctatatagtagaaactctataaattaatactcgataaattaataaacacgataaattaataaattttgtcggtcccaagtcgggccaatgtaaaaattaaccaaaatcgataagataataagataataatttttttgaaatccctatgtaaaattatagtcccaataatattataaattaataatcatagatcttaagtttatattttaagactcatttttatatgaaatttttgttcaagttacaattacaactttttaaaaatacaactagtatgatctttgttgtactcacataactatttgcatatttgatccgtcatagttgattttgtaaaatcttttatttgagaaagcattgctaagatttgtgtaaagagaaattggattaagcttcatgtttacgttcacgttaatgtcgtagatatacagacacaatatcttgccgaaaaataaattaaaaaagtcaaagaaaaataaaaatctaacataagtatatatgcaaacaacaaaacatatagaaaattaaattaataacatttttaaaagaatatagtattgtatttacgtaaatatatctataaattaatatttattaacttatacgataaatttattaatttataggataaattaatatcactataaattaataaaattgcatggtcccaacattattaatttatagagtttctactgtacgttggacgtgctctaagtatgttggattaagtttgaagaaaataacttaaggaataaattattattgaaaaaagagataaaagataggatatttaggagttatctaagaaaatttttgtttaggagttatgagttatctaaacaattaggttttggttttaagtttcttatataaggagttatcgagatgtgatagtccttatgagttttgtgagagagatttgagagaaccaaaagagagctttagttttgagttgattttctaaagctaataaagagaggaattttttaacttgtgtgttctgaagttcaaataagcggagatcaaaccgagatagacaatgatgcgattaatacaaagcaagaaaatcagaatgatgaaggtactcgagaagaagagatggagaatgtgaacaacaatccggttcaagttgaaaacgtgttgagaagatcagagagaccaacttcaagacctaagtatcttgaggactacgtgttacttgcagaagaggaaggagaaaggctgttgttgtgtctgaataatgagccaagagatttttatgaagctagagaatcacgagaatggatgcttgcttgtgaggatgagatttagtctacaaagaaaaatcagacatgggagtttgttgaacttccggttggtgcaaaagccattggcttaaaatgggtcttcaaactaaaaagaaactcagacggaagcattaacaagtacaagacccgacttatcgcaaaaggatatgtccagtgatacagaatcgatttcgatgaagtttttgctccagtggctcgagttgagacaataaggattcttttaaaccttgaagggtcaaacaattgggaaaatcactatctcgatgttaagacagctttcttacatggtgagttaaaagaaaccgtatatgtcaacacaaccagacggattccaagagaatggggatgaaagaaaagtttataagctgaagaaagcattgtatggcttaagacaagctccgagagcctggaataacaagctaaatcaaattcttcaagaactacagtttgaaaaatgctctaaggaaccatcgttctatcgaagagaagtaagtgagaatcttctagttgtggcagtttatgttgacgatctatttattacaggaactaatgttgcgatcatagacgagttcaaaagggagatgagcgcgaagtttgatatgagtgatctagggaaattgacgtattatctcagaatcgaagtgtgtcaacatgaaggaagaataactttgaatcaaaggcgttatgctttgaaaattttagaagaagctgggatgatgatgaagtgtaacttgctgaacacgccaatggagtcaggattacaattgcgagaaagagatcgacgctacatggtacaggaaaaacgtgggctgccttcgctacctaccacacacaagaccagatttgagtttttgtgtgggagttttgagccgttatatgcaagaaccgaaggaatcccacagagcagcaatgaggcattgtctaaggtatctacgaggcaccaccactctcggcctgaagttcaaccgatcgtcaacaaaggtaccaaagccaatagggtatagtgacagcagccataacgttgatcccgacgatgggaaaagcacatctggtcacattttctaccttggaggaagtccggtttcatggtgctctccaaaacaagatattgtagcaatgtcttcatgtgaagctgagtttatggcagcaacaaaagcaacaagacaggcaacatggctccaagatttgcttagtgaggttacggggttaacatatgagaagactctcattcgaatcgacaatcaatccgccattgcacttaccaagaatcccgttttccatggacgaagtaaacatattcatagaagttatcatttcataagggaacaagttgaaagcggtcaagtggaagtgaaacatgttcctggtaatgaacagaaggctgacatcttaacaaaggcctttgggagaatgaagtttaaagagatgagagatctcattggtgttcaagaagtggttgaatgtgacttcaagcttaaaggggataatgttggattaagtttgaagaagataacttaagaataagttattattgagaaaagagataaaagctaggatatttagagttatctaaatatttgtttaggagttatctaaaacaaataggttttggttttaagtttctcatataaggagttatggagatgtgatagtccttatgagctttatggagagatttgagggaaccaaaagagagttttagatttgagttgattttctttaacttgtgtgttcttaacaaatctagtaaaacaaagtaggcggcttaagtttacagtgagagaaactcatatataaaagttgttgtttcaatttcccataaaaataagaggagtgatcagagactagaacgtatttctccttgtgcgtttaaaccctttgtttcttagttcgtcgagagatatgaagattgctacgacatcaagtgctttcgatttgttgcccaaggatcagaaatacaaaaccaaacgtgttagttacaacgatttctcagacctctccttcttacccgtagtaaaccctaagatcaagagacaaaagaagactctggaagaagaagtggactcaacttctaaggtaatatcggtcttcttaaaccctagtttccaaccgtttgttttttaatttagggtgaactatttgcttacgttttttccttttattaaatctttcaggcgaaatctagcaggacgagtcttaccaaatcagttacaacaacaacaaagttgacaaaaccggaggaaacaatcacggcttcttcgaaagagtgtcttcaagaaacaaagacgaataagaagcctgatttgagagacttgatcgccaaggcacaagaaaaaatccaaaacaaaagggagattaatcatcgaagagaatacatcacaagacagaggatagctgcacgcttagctctaaaccagatggtagcaaccgttagctttgacgatcatctcaactatcatagagaaatggaacagcgtggctacacatttattcaagatcaagttgataacttgaacatgttcagtttatggtcaagaagcgattacaatggtatcactaactctgtcttggaaacgagcaatacgacaatgcggtctgatgaagattcatcgagaaagaagcagcagatcatcaaaaaaaagagcaacacattccctacagatgtcaaagaacattgaatctgctgagagcagtaatcagagtcaaagctcagaaagtgtgatcatttagatatagagtaatactgtatgtccgaatacagttttggtataatttgtgtgattgtgctcaatgcaatctacatataagcatattagataaaacatgtttgatatcaatcttttaacacgtaggtttgagaataattctgtctatactatttgcaaattttcttgctttcttgttttcatatcataatcaataggaagagttgcaaggtttttgattcaatcccattccactgatgcttctgtgtcttactgataagttcatgtaagcgtggtttagctacattactggaatatcaaagttccagcaagctaagttgttattattgtctttggagttgctcttatttgtatcagactcttctttagtaattttacagtaacttcaatcaaagacaaaaacctgtatgagaatctttccattgatgttaaattcaatctagatgcgtttactatgttctttgcaaccataagaacaacaaagtaacactactaatatagtacaacacaatgaataacttgatgaatataatggcaagtctctgcaacatcttttgttagattctcatgaaaaaaaggttttagacgttttagttttctttttcattcccaatttattccttaactaatctagacactaggaatctactgaaatttcttcaggtttatggttttaacttctctgagaacatcaaagggcctacaagttctgcatctttcattcacttgcacatgtctttgtatctacgcatttctgtaaaagattcataatcgtatccacatgatcacgccttttccacagaagtttcaatccacaagttgatgagcagcatggttggttagtggttactaactttggaaccctttttaatcacatacaacaaagacaaaagcatgtgttatgtctggtttaggtgctccaattttatctaacttaaaatagtttttccttatatataatgcaacaagcctattggattcttcatcaaccataacttgcattcaaagagttatacaagacaacttacaagcctcttttgctttccaatctaaaaaacacttctccctaaacataatgatgaacacaaagaaactcatgaagatggccaagaaatggcaacagagagcagccttaaggaggaaaagaatctcattccagagatcaaattctactactagtagctcatccgcggtagagaagggctgttttgtggtttacactgcggatcaagtacgctttgcttttccgataagttacctgagtaactctgttattcaagagctcttgaagatatctgaagaagagtttggtattcccacagaaggaccaatcacgttgccattcgattcgattcgattttcttggagtatctcatcaaattgatcaaaagacgaatggatggagatacagaaaacgctcttataacggcaatctctagtgctagatgttcttcacaatgctctatgcaacttcaaaaacatactagtactcagcttgtgttttagagaattagtatcaagcaatttctttgtttgtaaagattctactgtattactagattagacagatcatttcagaaatacaaaacatcatttttgtcgtctcttttagaccgtatcatcatatgaaagtaaacttcagtatcacttcttgtcacagttccatctttgtgtcattttactgacacattattccaacttcttttagcacataatatgttctgaaactgtctatcatgtaaaatggtgcagcggcttcaaatttctttaactcaatcgtttcatacatcaaccaactctggaacaagaaatctgtgaaaaaagcaacatatagattacacaagaacatgtcgtttgcacaatctgaacataatcgattgtagcaggaatgtttgactctgatgtctttttccagattttaagcacacaagtgtttgatttatctatttaatctattgattttaaccagatttgtttttccctgaataacttacttgatctattattgatttagctgatggaactagtaaccaacatcatgggacccttaagcaaacatgattttggtttttggctgctcttgtctccaagacttatctgcttgacaagttatcaactacacatattaaaatgtaacaactgtctcttgcattcttcatcaatgtattagtacctaactcttgtcatataaatgtccatatagaattttgatacccacatgatcatgtcttctcagtcctcaaaagaagttgtatagtccaccaattcatttgcagacatgaatgattacttaccaactaacttaggacccctctgacttatgatcacataagagaagaaacataagcatgtgatgtgtcaggttaggtgcgtagtagcttgtcacaaagtctgtctaaatctattaagctcttcttctatataatacaacaaagcttgtagcattcttcatcaatcacagcttgcactaatacaaagatttctgcaacacaacttttcaagtagtatctttttgctttcccagagaataatgatgaacacaaagaagctaatcaagatgttcaggaaatggcaacagagagcagctctccacaggaaaagaatctcattccaaagaccaagtacccgctcaaccactgtagagaagggatgctttgtcgtttacacggcggacaacacacgctttgcttttccgataagctacctaagcaactctgtatttcaagagattttggagatatctgaagaagagtttggcctcccaaccggtggaccaatcacattaccattcgattcggtttttttggagtatctcatcaaattgatcaaaagacgaatggatggagatacagaaaaggctttgttaatgtcaatctctagtgctagatgttctttgcaaaaacaagaacagagtactcaacaattgcttgtattttagagaattagtgtgtagcagtttttgtgtttgtaaagattctactgtattagattagacagattatttcagaaatacaaagtaaagtattatttgtgtctctcttttagactgcctcatcaaaaccaactttcattgtaaacaaagaaaaatgagataacttttacttcacttgatgaatctttcattcatcacaatttcatcaattgtccttatgaatcttttggaagtgtaatacaagactgagaaagaactaatacgaacacggtatcttttctgatccaagcttaatctcaaggaaatgtgaatagttgattcactagctatttttgtttcctggccagacactctttagaaactactgctacatgtttttcatctttgcttgaccagcacatgcctttctttgtttctttctatcggatcattaattatcaccagatttgttgtccgattgtcccctgaataagtgaaacaaatctattatttgatttacctgatggactactaaccaacctgggaatcttatccttcacaaaaaaaaaaaagttgtacagatgcatgagtttggtatttttggcttctcttgtattatatgatataatgcatcaacagcctcatgttttcttcaataatgtctcagtacctaactcttgtcatataaacgtccgtataggattcatacccacatgatcttgtcttctcaccataagttgtatagtccacaagttgattagctgacataattgattaccaacttgggacccttacagagtagaaacataagcatgtgttgtgtcgggttagattgctcaggagcttgtctaaacctaatagtttctccttctatataatgaaacaagcttattggtactcttcatcaaccacaactttcattcaaagagcttttcaaacagaactcacatatcttttctctttctttctccacactttgctttccaatctcaagctttaactctccctgaaaatgatgataaacgcaaagaagcttatgaagatggctaagaaatggcaacaaagagcagccctccacaggaaaagaatctcatttcagagatcaaatgtctttactagcagctcttctactgtagaaaagggttgtttcgtggtctacacggcggataaaatccgctttgcttttccaataagttatctgagcaactctattgtccaagagctcttgaaaatatctgaagaagagttcggtctcccaacggaaggaccaatcacattgccgttcgattcggttttcttggagtatctcatcaaactgatccaaagacgaatggatggagatacagaaaaggctctgttgatgtcaatctctagtgctaagtgttctttacaatgttctttgctacagcaagaacagagtactcaacaattgcttgtattatagggtttcttaaaagaacatatagttttgtaaatattcagatatttttatactttatacaagataaacattaccactattctctcaggaaaaattaagttcacttttaagctttacgtaaatgttggattttctctgttagtagttagttaattacctaatcttagtctcctaaaatttggatatttcacaaaagtaccaactcgaaattctaaaaattcttcaaaatcgttgagaattgtttaagaataaataccatgtcccaattggataaaaagcaaataataaggagacataaaactgctaaagaatctaacttttgtcttctgtaagaacatcttaaaaaactcttgaaacttgaataatactttctacatgtacaaagagcaaagccaagaatctttggttcaatagattttgccttgaacttgaagctatgaactttacaactctctaataaacctttcttttattatcagcagccttaacaagaaacgaacaatgcaagttagtatataaagtagcttcattatgccccattccaaacataagaacaaacttcatcttcttcattcttctttcttctctttttgtcccgctttcgtagtttttcaaaaggcgaaatggcgggtgagcaaatcaaacctgttgcctctggacttctagttttgaacttctgcatgtatgtgatcgttctaggcattggaggatgggccatgaaccgagccatcgaccatggattcgaagtcggtaagaatttggttgaaattcagatttatcgattctgattccttaccgtttcttgaattagtatgcttttggcacaaactatttgttcttgttgttcttgaacttctaatatttcgggtttttgtaaaaccatggcaggccctaatttagagcttccagcacatttctccccaatttatttcccgatgggaaacgcagccacaggattctttgtgatattcgcgttgctagcgggagtagttggagcagcttccacaatctcaggccttagccacattcgttcgtggaccgtgggaagcttaccagcagcagccacagctgcaaccattgcctggaccctcacagtccttgccatggggtaaactctcttgtttcacaagcaaactcatcatttttaaagacatcgatagtaaaactaatcatggcttttcaacagtttcgcttggaaagaaatcgagctacaagggagaaatgcaaaactggtgagacttttctctatttcgaaccttatagacaaatttggaaatcccaccattgttgccttcatgacacgtccattttctgtcatttttctatgtagagaaccatggaggcgttcttgatcatactctcagtcacccagcttatttacatcgcagcagttcatggcgtgaggagaccttaaggaatcattcatgggcgtcggatttcttttcttcctattgtggcaatcatccgaaactcgggattgtgtgtgtgagcgtttgtatttgtgtgagtgtgctttattttcttcataggaagcttaagataaattcatgcattctttatgtacaaaaggattagatcttgttttgtgtgttgtcactttgtgttcatggaataaaatcgaactttgaggcttggttccggtcatccctctatatataatctaacgaactacagaaagatgataatagatagaaaaactaagaatgtatttcaaagaataatctcatgttctaaaatccatttgatgaacaaaagaagattgtatttcaaagaataaaaagaaagtttaccctgttttgcatatttggtcttgctcgtacgttgctaaaagccgcccacattattatctatcgaagatataatgtacagagaagagtatacagaccatgactcctaattttcggttgtctttgagttttgactgtcaagcgcatccacctttatctagctccagctcatctgcagcacaatgcagagaagacacgttaatacaggtttaccataatagacaatgtagttaaaattcacacaagaaaaacctcattgatatttttagaagattttgtgacaacccaaaataaacagcgtcaaggtggctcttagctatcaagactttcatgttctgatgcataattgtgtcttgcacatcattctgttcttcgataatttgatagtgttttaggtagctacgttgattctaaccaatttcggtaaccaagcctctcggagaaaggtttcaaagtggataaactgataaaaactctgaactaaaccgtctacttaacaattcaagattctaactgcaattcaaaatgtttaaataattaagtgaagttcttaattagttcacaaattgtaggccatgtgagttcttagtaatcaggagactcaaccagataaagtacatctaccaaaaatcataaaccaagactaacctgtgtttatctatcagatccagtcatagcatcaaacaaaccgcagcagcttagccatgaagtccttcggacgactggtggaccaggtagcaaaagaggctgcatacatgcagaagattcagccaactgaaaagagacgaaaaacacatgtatgcaaaaaggagaatagagatgctaccttttcctcaggggatactggaacttcagattttcttacgctctctacttttttgcttgtttcaggagcagatcttggaagcataaccaccttactattattgttttccaataccggagacggatgatactcttcatctttctcagacttctttttgaccaaatttgagtgtgttgaggtctcaacaagcccactcttttcagaagtcactgttttggagatagaaaccacaggtttaacagaatcaacaactggagtgatttctgtaactgaattaccacaagctacatttttggcggggcgagtacggttatcagaagaggagttagttgatttttccacaatagcattgccagttttgggtcctagtccctgagtaacacctgcatctctagatatctctttagaagcacctttcaccacagcagaagatagaagagcagatgaatctttagtcccaaattcttgatttccttgagaaccaggagaactcaaactgctatcacttcccctcccatcttggcttccatgttcatcatttcctgagattaaaaaaggaactactaagaacacaaaaagacttgcaacttccaaaaatgataggagaaaacaatccagcatttgatcagagttataaaaaaaagtcttgctaaagtcatgaatgaagcattgttagctcgaaacagatattgagagaagtaatcaaacagatctctctatacaccaaccacgaaaatagttaatttctaggcgagaagctatactaaaatccttcaacaccattcaagacataatctatcgacctaacaaacaaacaaatcctgaaaccaaaatcgaactacgaaatgtaccgttgatacttgttccaatcgcttcctgttgcttcttcttcttcaacgcctttcttttcttcgcaccggacggcatgatcgatcggaaaattcgaattcgtcgccgcaaaatgaaattgtttcttcacttcaaacttcaaattttgtctcttctctctctctctcttgttttttttttccagtgtgagttggtgtgtgtgtgtgtggactgcgttttcctttttgtcactatgttgggcaaaaccagaatctcccacagaggaaagagataaggattctcctttttttaattttaattcaacctgccttaattgaacttattctttattcaacgacaattcatttccatttttaatcacatttccacaattagattgattatacaatgaacaataacataagattatttaccgccttcacttatttactgtgattaattactacggtcaactcaaatctgttgtcaccgacagcattaacaattgagcaggtcgcaccattttaggctatggtttgaaatcagaatcactgcattagaccaacgacgacaaattaaacaaaatttgaaatttgcccttttgtattactaaaaacagaatatccctttttgtgtgacctttcaaattttagtttaagaacacttttagtaagaggactttgtcagtatagactagtagagggaagagcacaatcatggcttaccacaaacttatgttaagagagaaaaacgtgaaacccacctaccaaattttcaacattatggctacaaaagagaacccacctaaggcacagagcaacacagatcctgtttttgtctctctaatttttctctcagaacttgctttcggttttaataacacgagatgagagccactgcatcactagttacatttaatcagaagattatgcggcgttgtaagaacctcctgatcagaatcaccaggagctgtcccagacaccattaccggcatttgaaacttcggaaagcttcttcttcatcatcatcatcatcatctgggaagcaagggaccaaagtgttggcttcattcttcctcttcttccaaaagaagaaacagaacaaggagaagatgaagcggcttaacgaactcaggagtttctcgggtgccgtcggtgaaaggaaggcgtcaaatcctgaatcaagaaagaaggtattcccatcgtcttggctttgcccaggtaaggctcattcacaagaagtctcacaaggtcatgatccacctagagacagcacaagcgcattccttccatgactcatatgtcaaaacaacgcgagatcacatgtatagctttcaatttgattatgtggttgttgtaggatatctcattgtcgtgatttctaacactaagaccctactctgactctctcaggatgtatgatgaatgcagagtaaaattctttgtagtgcagaaacttaataataagattgatgtgtatgattcaataaatctatcgaaaaaactttgaattagaatcagaaatgattatagttcaagaacccaaataatttccaaacggaagagaagatagacatcaaactttttttatacatctatcctacaagcacggaccaatggcttcattcccctaacccaacctggggcataacaacaatacatctcaactcaccggttccaaccaggtgaatatccttgaatcagttcttggcaacatctcaactctatgatgacctataacatcagaagaaaagaatgcaagatatgaaaatgttctcaacaaagaaagtaataatattgaacaaaggaaacccaaaacaagattacacactttatgcaacagctcaaacaaactgagaataaggtttcctgagaccctcaagcctataaacttagattaagccacactaaattacttcatcataaattcaactttcaagttaccacagctaattggggttttttgacattaagctttagaaatatggtaagccattacacttaagatatactaaaccaaagatgacaaaatgacctaagatttgccaattttgtgatttacagcttccggtaaataaaagattcaagcttcttttagtaatcatattaacaaattagtaacgcatttcgaaataatattacctagatacagggcaaaatcaccaacacaaaaccatcttcgttcacattttaaaacctaaaatcaatgatgaagctaaaaccctaacaatcgagaaacccacatagataaacgaccaacattaaagcatcgaactagaaaacccaacaaaattgagatcagaaccaacaaaattgagatcagaaaactttaccatttccaaggaatctataggagcttggaagaagtgaagccatgggcgaaactgtacagagagatctggtatcgacaactagaagatagtctcttaaaccctaagagagagagagatttagagagcttaataagatggagaaagcgaaagcgcacagatatcgatggaagagtgaaagagaaagagagagatttgttgccgttacgcgagtccaaggtctctcttcgtttttgtcgctgttttattcctaataaaaaaatagaaaaaccccgcgaacttgagtttgggcttctaatgggcctaatggaccgatactaggctttatattagaacactctctacctttttatttgatcagattgactcaattgagtgtgctctttactaataatttatcttcttaaatctttgtgtcatgcagggaactgatataagaaatctgttgaagagattatgaagaatattcatttttacctattcagaaattaggtgctaaataccaaaaattgcaattaacagaaaccaatattaaatcaaacaaaggattaggaagaagaagaagaggaagacttcccattgaactgtattagctctaatgatttaaagtcttcttgtttttcatcaaagtttaaacctcttacgtacatcatatactaaattgttgatataagctcctatcatttaggttctacatcagatttcgtatgatccaactatttatacatattgttccaatcattagaatgttttctaaaacttatatatgtaaacaataacaactttttccaaattaaattgccattagaaaagaaaaagcatagtattgaaacataaattaagttaaaatatcaagtgcaaataatatgaaaagagaaacataaatgttgaaaagaaaaataactaataattatattttccctactactacatagtagcaaactcatccttattatttaggcttcttaagaacacagacaccacccttgcatgaacctttctttgaagatggcttcgtgaaacaactaaaaagcttggagaagaaacccatctttcttgaaatctgaaaagaatattggagctaatgaactttttcaggatctatgtgtgtgttatgtatctctattagactatttgcatggctatatataacaataatgtcacaaattatttggtaatgaattttcttgtattaaatgtgtttggagatccaaccgtcgaaatgactggaaatcatgaaaaatataattatacaatattcaaaaaagatatgaaagaatattaatatgataatttaggaagtttaacattttttctaaatgtatagtttacattttattttatcgtatattagaaaacttagattcatcatattttatacgatgacgttaggagcagaaaacagtaggttgctattgatctgacttctaggtataagaatcaaaaaagaaaacacccgcgcattcaagtatgggcctttaatgggctatagtaatgaaacaatactgggctttacattaggaacgaactatctctcatgtccgtctgtaaactaggaacggactgactcgacggagcaaagtgaacggaaaagtaactgtcaagcgagcgagtgagaaagagaaatcagaaatggtggttacggattctccagtttcggggataatggctgatcagaacatcgatcctaacaccacgacgagccctagtcctaaagagaagcatgtttctgcgattaaggctatctccggcgacgagaaagctccgtcgaaggagaaaaagaactacgcgtcgaagaaatcaactaccgtaatccagaaatcgcactgtttccagaattcttggacattttggttcgataatccttcctccaaatcgaatcaagtcatatggggaagctctttgagatccttgtatacattcggtactatcgaagagttctggaggtgagatttatgtatcctttttcttgttgtatgaaatagtttcttcggtttcactgagaacaaatctggagtgaatatgaaatagttttgaggcagaaccagtagattagggattcgatagctgagctccatgattcgtttgtgccttgatcttagatttatagctatagaaagcgttgtttctatccataaacctgaatttcttcaagttttgtattggagaatacttgaattgtatctgtacataaacctgtaatctttacttaagattgtttccatctcagaagctagtttggtttttgtgtgccttctttttctgcgttttagattatttctatcttcaggtgtcctgtgtatgttatggatgtgtttaaagggctgcttgttgatttcttgatgcagtctctacaataacattcatcctccaaccaagtgggtttcgggggcggatctttactgcttcaaagataagattgaaccaaaatgggaagatcctatctgtgctaatggaggaaaatggagtatgatgttccctaaagctacactagaatgcaattggcttaacacggtattgtaacttttcaggacttcattgtagtttttcccttggctattttgcttgtttgatgcatctttgtgatgtttcttgtctcctttttttagttacttgcgttggttggtgagcaatttgaccaaggagatgagatctgtggagcagttttgaacttcagagcgagaggggacaggatctctctatggacaaagaacgctgcaaatgaggaggctcaggtaaaacatggatgccttatattagatatttatctggtaaccaaaaaggcttgttcttgagggagacacaagtatttggtgaattttctgaagtctccagttttctaagttcttaaccaaaaagtaatagggagattacaagataaagacatctaatccttgtttcgttcatacattggtttcatcgtttaacttaactagggccaggatctaggtttgtttaggagccttattttttgggggactgataccttatattcttattgcggtgtttgctgcagctaagcattgggaagcagtggaaggaacttcttggctacaatgagacaatcggatttatagttcatgtactatttctgcaacatctttttgttctcctaaactacataggtttgtgctattgtgacttatccaatttgtttttcaggaggatgcaaagactcttgatcgtgatgctaaacgtcgatatactgtatgagattcaacagttttacttgtcagcttcgccggggaaatcgagaagacgtaaaaggggaagtcaacatgacctttagttgcctctgatctatctttactgtaaaaaaagatgcacatttagttcacattttcaactatcagaattgttgaaacggatctgtatcaaaagtacatgatttcgtaattttcttagtggtataaaggaaaaggaatttcgaaattacatttcttacgttaatcattttctcagttgttggttttaatttgtcttataacccataacagagtagctgttgaagaaaattaaatccattaaaagccaggaaaatgtttcccgccaataaaaaaactaaacttgcaaatatatttcttccgtgtgaaaactgaaaactgacgtgtcataaagtatgcatataaaaaccattctttgatttgattttcagagaagaagagcatttagaaaacaaaagcggaataagaaacaagattgaagaaagaagtcggagaagacagtagaagaaactgatacgaggagaacttactctcaactttaatggcagacgctggagataatcagagaagaagcgatgaaaaagagtcgatatcaactgaagaaacgaaggtaaacaagaaactgaacaagaacttgctctgttctttgcagtggattattatgatgaaaccagatcgatacgaatttctcaggagaatgaagacttgggatctggaagaaacgacacaggtcatcatgtatacaacgagggacacgaagaggtactagagtatctgaaacaagagagactgaaagatgctgatatgcagaggaaaaggcatgaaacagagtcgaaatccattgaggtaaacgagaaactgcgcaagaacttacttgtgatgttcttactgtgacttctcatttgaatcggcgtttcgttttctttagattagtccttactcctttcgtttcttgtgaattctgaggagaaggaaaagacgtaatgaaacagagtcgagaaaaaatggctatgttgcttacttagatttgttgatttaacgttttgttcacttttgattatcagggcacaactcctgatattaggctgagtgattcagggaaagggtctgatgaaatacagaaagcagactcagtttacaaacgctctaacgctgacacgcgagtgagtctgccacaacagagacgactgaaagatgtggtggaggcgcatagggtacgccgtgaaacagagtcaagattatggcaccaagagagggtaaaacaactaacttcttacacagtatcttttgtttgatttacgtgttcctttgattttgattctcaggatagatctctggtttggggaggaagtgaacccaggatgagatttgatgaaagtactcagggttggagagatagtgactatgaatccaaatggaggtttcatgagagaactccggattgggattggagagatagtgaatccagaatgagatctcatgaaagaactcaggataggagaggaagtgaatcccaaggggtatttgatgagagaacagagaggagacaagaaccagtgcgatggcccggtgaagagtgttggtgtctgcggtgtcgaaacggaggaagttgccgttacaatcatcctactcaacttccacaggtgagaaatgtttgacttagtctctaagttgcaattttactcttggcttactgctttcaaacatctttattaggagcttccggtgaggaatcgtttgcagatttgcagggtaagtgaagttttgtaactttatctaagagctattgtctggtttagtctttacttgatttgaaaagagattcgttgcagtattttctgaggggatattgtaagttcggctcagtttgtggatttcaacacataagggacagggatgttgcagaacctatgtatgaggtaacttcatctccaaggtaagaagccatctccataatactgtagtttgatctaacgttttcgcatgattttgactcttagaattggagttttgatgtgagaactcagaggagatatgaaatagagtactcaggattcaggccagagaagagggtaagtaaactaaaatgtctctttttgtttgtttaactgctttccgtttaaactcatatgaatattcattctcaggcaaaaactagtctggattccgtagagcctgattcaagaaaaagactggaaggtctagagaataaacgagagcaagagaatccgcaagaacctgaaaggcagaggactgaggctcaagacaatctgcaggtaccaaaagaaaactgattctcttctttactagtggatgaaaaactcgaagatctaaaggaaggggtatgtataaatcaagaaagaagttgaattttgttgttatttagttatatgatcatgagtccttgatttttcttcaaacaatatcgtaggaatttcgagagcaagagaatccgcaaaaccagatacagataaatactgaaagacagaggacaatggctcatgacaatctgcaggtaccaaaaataactcactttctagtgatatttcttcctttactgttactggtttcttatatggttgttcattctcattccaagatcgtttcggattctcgaatgcatgatccaagacgccatgatacagagttgagactcgaacgagagaagatggtaaacagagaacttgaaaagcagaggatagaacatctaatcgatccactagtgaggcgatacatgcaagcaaagagagataaagaagttgaacagagagagagagctagcattgagagccagaggatagtggctcaagagattctgcggcaacagagattacaggttaaaaaaactaaaacaagacatgattctgtttcttcactttggattgtataacacatagagaagataacatttattgtttcggttcacaggggatgcgagagaatcagaacgtggattctcgaatgcatgatccaagacgccatgatacagagttgagactcgaacgagagaagatggtaaacagagaacttgaaaagcagaggatagaacctctaatcggtccactagtgaggcgatacatgcaagcaaagagagataaagaagttgaacagagagagagagctagcattgagagccagaggatagtggctcaagagaatctgcgacaacagagattgcaggttaaaaaaactgaaacaagacatgattctgtttctttactttggatgatacaacacatagagaagataacttatactatgttttcttactgtgacagtgtgacttgtcatttgatttattgtttcggttcacaggggatgcgagagaatcagaacgtggatgctcatgatcaagagaaaactcaggaactcggtttcaaaggaaaagagggagatggagtttaagaggaaacggagttacgagaccaccaaagagaactctcaagatgatttcttttaccgcaagaaactgatgtgtttttcctttgaacgcaaataataagttcattttgataaactgatcgtttcggaatcaattgtgttattgattgattaaacgaatgatgaaacttttaatgcaaaatatttgaacaaaataactgttatttagaagaaagaaatatcaatagctattgaagataaaaagaaaaatacgccctaacagtttcccgccgaaaaaactaaagaaacaataccattctttgattaaatagagaaacaaaaacagcattagagagaatattgttagcattgacgaaagagagtcgaagagactgatacgaggagaactcactctcaacttcaatggcagacgctggagataatcagcaagaagctgagagaagaagcgatgaaacagagtcgagatccattaaagaaccgaaggtaaacaagaaactgaacaagaacttgccctgttctttaactatggattgtttcgaaaaaaacagagtcgataaacgaatttctcaggagaaagaagacgaagatgagaatcctcaggatcaaatacagagcaaaggtagtttcaaatctttgagagaaccatatgatcgatctacggttttctacttatgatcatcatttgtgatctctttaagaatcgtatggatttctgttgatccaagtttggatatgtgtataatctttgatgttgttggtatgatgtttagagaggatgaggcagtcgagtccgtatccagttcgtcccggtaaaaaagactgtcagttttacctcaaaaatggtctgtgtcgctatagaagtagttgccgtttcaatcatcctactcaacgtccacaagtgagaacttctctatgtttggttgagtctaagtttccatttttttctcttggcttactggtttcaaacatcttaacaggagcttccggtgaggatttgtaaggtatgtgtagttttgtaacttacgtggtcatctagcaaaaacttattctagtttatttaagagctaaacaagaacctggaatgtaattaggaatctcttgtctggtttattcatttgaaagagacttgtttttttttaacttcttttataatgaacttcgttgcagcattttctgagaggatcatgtacgtttggctcaggttgtgtatttcagcacattatggacagaaatgttgcagagcctatgtatcaggtaacttcatctccaaggtgagaagccatctccataatagtttgatttaacgttttagtatgattattattcttaggattggagagagagtgaatcagaacggagatttgatgagagaactcagcgcacatttggtgatgagagaactcaaagaagatatggaatagagtactcaggagccaggccagagaagagggtaagtaaactaaaatgtgacctttctttgtttaccgttactagttgcttatattgttgttcattctcagtccaagattgttccggattttcaaatgcgtgatccaagacaccatgatacagagtggagattcgagcgagagaggatggtaaactgaatagacctgactttgttctcagtttgtgttttgctttttcttcaagagaatcgcagctttgattgaatctgcaggaacgaattgaaaggcagaggagagaggctgaagaaaatctgcaagaacagagacagagagatagcattgagaggcagaggagagaggctgaagaaaatctgcaagaacagagacagagagatagcattgagaggcagaggagagaggctcaagagaatctgcaacaacagagacagagagatagcattgagaggcagaggagagaggctcaagagaatctgcaacaacagagattacaggtttaaaaaactgagacaagacctagttatgtgacttctagaagaagagagaacagagtactacagtctgttattttctactgtgacttgtcatttgattttatggttcggatctacttattctcaggacatgccagagaatcacaacgtagatgatcaacagaatctgcaggaacagagacggataagcattgagaaggagagaacagaagctcgtttgagactagaacaggtttttagttgaatcatcaacattttcttaaaggtcaattacatgacaaacaaaagattgttatgtaagttaatttattttgttttcttcagatccgacccactgtttcatttccaataaacgaatttattcgagccgtagtgttgctgagagaactgatagagaattgggatgataaagcttggaagaaatagatatttaggtcaaggtaaacacctatctgtttctcaccgtggaaagagaagacaacttcttactatcttgtgacttgtcatttgatttcttgtttcggtttatgttgtttttcgttttaaaaggtttatatttttcttattaacaggaggaaacagagttatgtatgagaccgccaaagagaaatttcagatgattcctttgaccgcaagaaacttatatatgtgtttggaagatttaggttaagctttcgttgtttcaatgttttgcaaaattataacatgctgggtaaaaagtaaattacattattatgaaagttagttgagtagaaatgaatatttctgaacatattgaaatttacacatcaatattcttgtagagtttaattcaagaaaagacatattacgtggaaaagttatgaggaagatctagaggaaggggtatatatgaagaaattgactttgttcttattttgttatatgatcatgagtccttgatttttccttcaaacaaatatcctaggaaattcgagagcaagagaatccgcaagaacatatatttcgattttacagtttaatcaaaaacaagagatgcagaagccacaatcccatacaacgcagcaacaacaatctgtgcagactccgctgcaacatcagacgttagcttctcatctctatcccgtaagaatcaagaaacaaaaagttgatgaatcaatttcttctccttgggggtctgatatatcgtccttgttaatgtcttggattcgcagttggtggaaaatttaaaagatgtgactgaatctagagcacgagatcagaactctgatgccctggttagtttctctatacaaaaatttccaagtcttttttaaggttgtttggctttctagggtttcatgaatgttgaattgcattgcaggtgactgaactgagtagccatttcgacaagtgttaacagattttgaattcgatttctagatccctagaatctaaaactataaaggtataacataacaataaagtttggacatttggatcagaataaagtttgtctgtttttttgcttacgggttttcctgttttacaagtatgttgatgtacagaagcaaaatctagaagaaagtgaacaattgcttcaacaaagaatgtaagcaagttgttacaacttctttttatttgattagatttattgtgctctttacttataagaatcttcttaaatctttgtgtcatgcagggaattgattgaggaatacaagaaatctgtcgaagagattgtgaaaaaagagccttagttccatatggttctcaattttactcattcagcaatgtaggtgctaaatacaaagaattgtaatcaatagaaaccaattttgacacacaaaggagatcattcatttgttttatgtgcatcaacaactaaaaaataataatccaaatctttgtctgtaaatcgaattgccaatataaaaacaaaaaggcataaatcatatcttgtgtttctgaatttattctcagattaagttaaaatatcaagtgcaaataatatgaaaagagaaacataaatattgaaaagaaaagctaataaataatatatctttgcctacgagcactacatagtagcaaattgatcattattatttaggcttcttaagaacacagacaccacccttgcatgaacctttctttgaagatggcttcgtgaaacagctaaaaagctttgagaagaaacccatctttcttgaactgtgaaaacaatattggagctaaatcgctaatggactttttaggtgtttttgtatggatgtacctctattagacttgcatgcccacacatatatatataacaaaatgactaacctagttacctagattatgtaaatcgtgtgaatatatcattataggatgtaaatatattaaattaggaagtttaccattatttctaaatgtatagtttacatttttatttattttgtaagattgatcatattcaatacaatgacgtcagcagtctaattcctagttaaaatagaaaaaaaaaccacgcatttgagtatgggcctttaatgggccacatttatagtaatggaacaatactgggctttatataaagaactaactctctctcatctccgtctgttatactgggaacggactcgacggagcatagtgaacgggaaaataactgtcaagcgagcgagagagaaagagaaatcagaaatggtggttatggattctccagtttcggggagaatggctgatcagaacatcgatcctaacaccacgacgagccctagtcctatagagaagcatgtttcggcgattaaggctatctccggcgacgagaaagctccgtcgaaggagaaaaagaactacgcgtcgaagaaatcaactaccgtaatccagaaatcgcactgtttccagaattcttggacattttggttcgataatccttcctccaaatcgaatcaagtcatatggggaagctctttgagatctttgtatacattcgctaccatcgaagagttctggaggtgagatctttgtatctttcttgttgtcaaatttctttggtctaagctggagtggatttgaaatagttctgaggcagaacctgtagaatagggattcaatagctgagctccatgattataatggttgcggatgcttttgtgctctgatcttataaatatagaaccgttgcttcttggatttctttgtattggagaatgcttaatctcagaagctagtttggtttttgtgtgccttctttttctgcgttttaggtcccctctatcttaaggtgtcctgtgtatcttctttttctgagttttaaagctctgcttgtgaactacttgatgcagtctttacaataacattcatcctccaaccaagtgggtgtcagggtcggatctctactgcttcaaagataagattgaaccaaaatgggaagatcctatctgtgccaatggaggaaaatggactatgtttttccctagagctacactagaatctaattggcttaacacggtattgtaacttttcaggagttaattgtagttcgcttggccatgctgctgcttgttggatgcaccttgtgatgtttttgtgtcattgttttagttacttgcgttggttggtgagcaatttgaccaaggagatgagatctgtggagcagttttgaacttcagaacgagaggggacaggatctctctatggacaaagaaagctgcaaatgaggaggctcaggtaaaacatggatggtttatagtatatatttatctggtaattaaaaaggcttgttcttgacgaaacacaccatgtagttagcgaatttcctgaggtctctagttttctaagtacttaaccaaaaactagtagggagactacaagataagagcacctatttcttgtttctttcaagagacttttttagaatgtaaacgaagatagttttgcgttggtgattttgtagcaattgtgtttcatcgtttcaattaactaagggccaggatcttggttttgtttaggagactctttttttgggaactgatatcttattgtggtgtttgctgcagctaagcattgggaagcagtggaaggaacttcttggctacaatgacacaatcggatttatagttcatgtactatttctgaaacatcttttttttctcctaaactacataggtatgtgctattgtgtgacttgtccaaaatgtttttcaggaggatgcaaagactcttgatcgtgatgctaaacgtcgatatactgtatgagattcaacagttttacttgtcagctttgccggggaaatcgagaagacgtaaaaggggaagccatattagaacatgacctttagttgctctatctttactgtaaaaagaagatgcacatttggttctcattttcaacaatcagaattggtgaaacgggtttgtatcaatatagtggtataaaggaaaaggaatttcgaaattaaatttcttacgttaatcattttctcatatgaacaatttggaaaagatatatatgaacaaagtgaattgtggagaagacttcattaacactggtcgaagacggactattgtcgatccgcagtaagttgaggaattccccatccaataacatttctcttcttctcaaattataatgaattctaggagtctagaaggtccgacccgttcacaatctttggaaggcctaagaactaaaaatcacaatatatcacttaaatggtgtttttagtgaagtttatatcacttaagtacatttttagagaatcaagcctacgaatatatgtttgattcttgatgtaaacaatcaagaacctttttttatcaaatcggattaccattagaaaaagaagaagcatagtagcaaaacataaattaagttaaaatatcaagtgcaaataatatgaaaagagaaacataaatgttgaagagaaaacaataataataataataactttttccctactactacatagtagcaaactcatccttgttatttaggcttcttaagaacacagacaccacccttacatgaacctttctttgaagatggcttcgtgaaacaactaaaaagcttggagaagaaacccatctttcttgaactctaaaaacaatattggagcttatggactttttaggtatttttgtgtggtatatgcggatgtacctctattagacttgcatacccacatatatatatataacaaaatgatgtcttcaatgtattgagagatcgaaatgactaacctagattatgtaaatgactaacctagtctatctcacggtgacgagaaagatccgtcgaagcagagaaagagcgatgaatgtgtgtcgaagaaatcaacaaccgtaatccagaaaccacattgcttcaagaattcttgaggacacatcatatatctttggtttccatgaaaaaactaagctctgaagcagaaccagtagaataggggttgcgtgagaaagaaaaggaactttgaatcgttatcacttatcacaattatagaattatttcaggtttattgaaactcagctattagttatattttttgtttttaaccgtaacagaatagctattgaaagaaaaagagaaaatccaaactatcacctttaaacatttttcccgccaaaaaatcactcaaataaataaagtggtgttatatttgaaagtcattaagtgcatgtacatgtatgatctatctactaggggacacatcctatagttcgcaaataatcaaatactgttagggtaacttaaattttatccatagtgccaattagtatatttatgtggatggaggtcatagcgaataaattaatttctcttaagtaaaacttgaaccttggttttgggagcttccctcatttgaaggtcaagtcatagcgaataaattaattcctttcaaatagggttcgaactctagttgccggagtttccctcatttggggtccagtcaacaatgcattactgagttgtcattaagtgcatgtacatgaatgatgtatctactagggacacattctatagtttgcaaataatcaaatattatcagggtaattttaatattctctatagagccaattagtgtatatttatgcgggtggaggtcatagcgtataaatttatttatttcaagtaaggttcgaaccctggttttgggagcttccatcatttggaggactaaagtcatagcgaataaattaattcttctcaagtaaggctcgaactctggttgcgggagcttccctcatttggaggctagtcaacgacgcattactgaattgcctatacttaaaagttacatagtcaaatattgttatgaaaattattattattattattattattcgcgaccaatcaatgttatggaaacatgattttcaaattgaatatgaagaaccaaactattctttgattttatttcttgagaatataagcaattaaaaaacatctgaggagactagaaaaactcataacaaaagttgttgtggaagaacaaagtctagatccatggaagaaacaaaggtaaaaaagaaaatgaacaataacttaacgtgctaatccatatttttgctaaccacttacgatgttattactgtgatttctcatttgattttacgtttcgggttttatttagtttggttggtccttacaatctcataaaacagagccaagaaatatggctaacgtttcgtttacttttgattctcaggaacaaaataaggaattgaggccgagtagattagtgggtagatctgatgagagaaatggtaggagacagggaacagagcaaaagaagaaggtaaagaaactgaacaaaaacttactctgttatctactctgtattttgtgatgaaacaagagtcgacacgatttttttcaggagaaagaagactcgggttttagagtaagcgaagagggtgagattcctttgcaacaagggtcaaatactgactcatacgcgcgggatgatctgacacaacaacagagagtgagtgatgttgtgatgcagaggagaagccatgaaacagagtcgagattatggcaaagggtaaagaaactaaagtcttgctcttacacaatatgctttgtttgatttaacgttttcttttgaatatttgatacattaggctagaactcaggataggagaggaagtgaatccagaatgatgtttgatgggagaactcagtggagtcacgcaccggtgctatcgagtgcgtatccagttcgccccggtgaagataattgtctgttttatatgaaaaaccatctgtgtgaatggggaagcgagtgttgttacaatcatcctcctctacaagtgagaaagaaaacattatctcaattaatttggctaagtataatttgcagttttcctcatttcttatacctttgttactacaaacaggagattccgtgcaggattggtaagaagctggattgcaaggtacatttcttggatgtcttgttattatctcaaaacctgattaattcgattggttgttgtggtatgagcggattataaagagtaaaaaaaacctagattttcttctgctttaatgcattcgagttgagcgtcaagtaacaagaattccaaacttctatatgcattttgttgcagttttttaaggcaggagcttgtaagagaggctcaaattgtccatttaatcacccaaaggaaagggatggtgatagtttacctatgcctcaggtaatttcaccgcggatattatattagtcttagcaacgttttattgtcaaatgtgataacttaaaccgagtttattctccagggttagaagccatgactatattagtttgatgtaacgtgttttaagttttggctctcagggtagaactccggatttgagaaggaatgattcagggaggaggtacaatacagagtcaagatcatggccagagaataaggtaaggaaacagaacaagaacttattctcttcgttactttggattatgctgagacaagggtttatacgaatttctcaggagaaagaagtgggccagtttcgtgatcaccaagactctaaagaagacgcgcaagaggttctgctacaacagagacctagagatgttgagatgcggaagagggtaaagaaactaagttcttacatagttttctttgtttgattttaacgttttcttttgaattttgattctcagtctagaagtccggattttagagcgagttcatcgagaggaagagttgaaaataaatgtcaaagacgccatggaaaggagttggccttattcaagcgagagaggctaaagaaaatgaattatgacttgattttgttctttgttttattttactgacttcagtcacttaatgatcctgagtccttttgacttaactcgttgctttttcttcaaacaaaatatggtaggatcttcagaaaccgagacaaaggaacatcgagaggcagaggagagaagctcaagagaatctgcaactgcaacaggaaaggtttcaggtaaagaaaatgaactgagacctacttatgtttatttgctgatgatgccagagaatcacaacgtagatgttcaacagactctgcaggaacagagaaagagaaacattaagaaggcgagaatcgaagctcgtttgaaacttgatcaggtgtttagttgaatcatcaacattttctcaattgattttttttatatatacttgacaaaagattctcatgtgagttaatttttttttgtttcttcttcagatccgaccaactgttgtattagaaaatagtcgagccacaaaaatgatgatagaatggggatttactgattttcgcaaactccaaggctccaaccttggaaacaagaaatggatatgttgggtcagaaaacattgttgttaagtcagatttaaacttttttatttttctaattttttttttattttaaactatctcactttctgtcataagagaattggttaaaactattgatgcataatttaacatgtcaagcttggtacaacttctagatggtagcattagcatgtatgaataagtacaatgttaaatgtggcacgtttttgttaatcattgttctgaattctgattgctaagttgcataatcattgatcatgcgtttttaatagactttagcaacataatgtatgtgatttgttacatggccactcattccaactaaaaaagcatattcttaactacatcaaaaataattatgcatacaccaagaaaataaaaactacaaaccaaacaccattatttttaactacataacaccaaattctgctaaacttgtagaacatatcttatttttaaatcaaacataatactttcttattctattttttatatgctgaaatcaattgtatttttagatgaaaacttactcatttcgaattttttcttccgaatttgtgttgggattaaacttttaatattgattcttaagcctattaattagtaccatcacagccattaataaatcttgaccaatttaatgaaaatgatgttgataatgtatttttctttttctggtgtgtatcactatatctttgtggtcatgcaatgatttatattttgattaagttggcataaaaacctttcagactaaacatctacaaaattgcgactccattaaattactgtttgactaaaattaattagtaacttttttttcttcttaaatcacatttgatttgttcattcctttatacaatttgtttgttgggttttttttttgatgcaaataaagggaattggacatgtttaggcacttttacaaacttttatttcttttgagacacttctcacgtacaagacacttttccttgtttttgaaaaataaatggacaattatatccccacccatctaaaccaaaaatttacttaaccggttaaaaaggttttgttttgatttggttctcttctaataaatcgacagttgatatttacagatgagaaaaggaagttaccttcgccgactgaaattatctcacaatatcaatgtcgatggttgttaattcttccgaccaagcaattactatggaaagtctcggaatctccgggtcactgtttcttgaattggttaatattactgtgcaacgatctctctcccttcaaacaaaacctctggaacaatttaaattgagttgcctccgccttaaccaaggcattgtgacgatgttttttgcaacgaattaaccgccactgtgattggagagatgacgtagaagtcgattaggaatctccccatgattcgggttatcgtttggatctgactctgtttctgcatcgtctcctccggaagaagttttaaaaaggaaacgacctacaaggcttgatataccgattggtgttgatggatttgtagctccgatttcttcatcggccgatgtaactgtgacgtcgagggaggaatgtagagaggttgaaagagaaggtgatgattattctgtttattgtaagagaggaagaagagaagctagagaggttgtatcaagttgggctccaatgataatgttagatgagcaaacaaaaaagtgctaattttatcgatctataaacacattcgcagcaaatcaaagacatacttgtccattaatgattgtccaagcagtccagtccatatggtcatcaaatgactcacatggtagtttcatactaatacataagtttatacataaacaataaacgccaatccaaagtacattatccatgtctatttgaccatttatccacatgtgtatagacatgttgagacaattttatcgagttataaacacattcacagcaaatcaaagacagacttgtccattaatgattgtccaagcagtccagtacatatggtcatctaataagtcatatgatagtttcatactaatacataagtttatacatgaacaataaacatcaatccaaagtacattatccatgtttctttgaccatttatccacatgtatatagacatgttgatacaattttatcgagctataaacacattcgcagcaaatcaaagacatacttgtccattaatgattgtccaagcagtccagtccatgatcatctaaagactcacatgatagtttcatactaatacataagtttatacatgaacaataaacgtcaatccaaagtatattatccatgtttctttgaccatttatccacatgtgtatagacagtcagttacgtagacctcagtcagttaaggaacttctccaaatctgccaacatctctacatattttaatgtagacgtaataggttggtttgaggatatgaggacaccgtcaacaatgaggagataagcaagccgaagtctatggtaagaagataaggtcttgtgattaacatttttgaaatatcacctaacgtagcattcatgtcttcacctattagctcttcacaatgttgggtattataaataaaattagcacacgattgaataattggagcaaataaaatgattggagaagattaataccttacatttgaggaccgagtagaagttactagcacacgccggagacgacgaatcgattaagagacaagaaaatgaagacgatgacgggagaacaactgttgacgacgacgacgggagaggacgaattaatgtcagccgattgaaagctttgttgatgataacgacgagagagtgacgaggaaatgactttgtcggtagaaaactcgtcgggatgatcgccggagtcgagatgatgttatcggcgttgtgatgattttaactgtccagataaatgaaactgtaaaatcgtcgtgaaggattgggtgagaaaaagaagtttctcacaaattggttttagtttagagattgagattaaaaaattaaaccgaaaaccggctaaatttgttaggttttgttaaaccaacgatttcagggtaaaatggtaattctactgagttaaagtgattaatgtttttaaagtgcctatttatggctaaagtttcaaaatagtgcctttacgtgtaatattctcgcaaataaattataatcttttataatttatgaattaaaaaatctttcgagagtctttggtcagagaaaatctggtcaaaatccctaattagaattttcccgccagatttgtcaaaacacccctcctcgattgtcgatacagtccaggttcctgaaatgttctcgtcagggcgacattagggtttcttcattcccgtccttcagattcgtatttgaaacaggaaggagagaaaaatgggtatacaagggcttttgccgttgttgaaatcgataatggtaccgattcatatcaaggagctcgagggttgtatcgtcgccgtcgatacatattcatggctacacaaaggggctttatcttgtagccgagagctctgcaagggattacccaccaagaggttcgtctctctccctcctctcaagttgcttgatgaatcccagatatagattgatattgattttggttttgcccaattagtagaaagtgggtttctttgtctcgaagtctatggtcctaattcgttaggcaaactctgaaaaatcaaaccttttctggttattatttgatgggcatttcgatttctatctcttgaggatgttaggtaaaccaaactcgaaagatttgggtgttctagaattttcaccattaggcttgttgggtaacgtgattgagatctcgttttacactttaagatgtgttctcgtgttactgttctggttctggttttgtagaagataatgagttttactggtgtttaatctttcaggcatattcaatactgtatgcatagagtgaatttacttcgccatcatggagtgaagcctatcatggtctttgatggaggtccgttaccgatgaaactagaacaagagaataagcgtgctaggtatgcaaacattggctaactaatataagcagaatatgcaaatgtatgtttgttttcttggttatcatcttacaagtttcaaaccaagtcatttcttttctataacaatcaagttcaggtccagaaaggaaaatcttgctcgtgcattggagcatgaagcaaatggaaattcctcagctgcttatgagtgctactcaaaggccgtagatatttcaccttctattgcacatgagttgatacaggtaacagtactcttctcctgataaaaagattcatagttgtctttaattgctttgttttccatttctttgaaccgaagttttctaatttctaccattcaaggttctgaggcaggagaatgttgattacgttgttgctccttacgaagctgatgcgcagatggcattcttagctattactaagcaagttgatgcgattatcactgaggattctgatctcataccttttggctgcctaagagtaagctttctgttacactttgcatgagatatatgcagttcatcagaatttccatttcattactggtatatagaattttaattccttatcgacacgacactagagtataattcaaaacttcaactgctaatttttatgtaatagatcattttcaaaatggacaagtttggtcatggtgttgagtttcaagcctccaagctacccaaaaataaggatctcagtctatcaggattttcaagccaaatgcttctcgaaatgtgcatattaagtggctgcgattatttgcagtcacttccaggaatgggactcaaaagagcacatgcactcattacaaaattcaaaagctatgacagggtatacattcttttctcacttaacaaggaacttggtcaagcaagagcatgtttaattcaaaaactggatactaatttttttacagaactagctttagattttccggcatcaatcatatatactcagttttggaaaagagtttacttgtgtgatatgttgctagtttgctttcaggtaattaagcacttaaagtacagcacagtttcagttcctcctctttatgaagagtcattcaagagagctttactgactttcaagcatcaacgtgtctatgacccaaatgctgaagatatcatacacttgtgtgacatttctgacaaccttggtgaagattcagattttgtaggcccatatcctttgagacaagtattttgacactaggcctccatttatcaaaattaattaacatctaattgatttcttaacataattcacatcgatgccacaagatattgctaagggtatagctctaggccagcttgatcccttcacacagttgccattccaggtatattaagacttttttctatttatagtgtctccttctttttccctcccggagatgttttcttgactcgttgtcttgttttcttgaatgaataggctgagagtgttactcctaaattggctgttgatgatatatcccgtcccaaaagtttcaaacctgaaactgtaaagaaaaagcttgatttgccagtccaaaaaaaccttctcaccaagtacttctgtatccttaaatggcgcatcccatatatttctttgcagtttattacatttggaatggggtttacttggtttagtaggatttttgttttgatcaagatgtcctgtatgtctttaagagtttcaatagctgttgaaactggagatgtttttttatctgatctacttgttcttcacttaacatctgaaaggctttgcgtctgttgaggcaaaaagaaaattcaaggctcctaggatatcaccaatgtctctgaccccaactgatgagtctccaagcattcctgatgacaacacaccagatttagatgctctttcaagccagacaacaaatgaatccccggtttatagcttggtaagcaactagaagaaccacatttttgatctggtcgaaagttgtatcacaagctcgaatctctttgtgtctttagggtgagaatccatgtgttagcgaagttgcagagaaaagagattcacccgatgacggtacaatatttatttatttccatgattgaaaaaaattatactctaaacttactatcctgacttaccttttacgcatcacaatctttagatgcagtggaaaggaatcacaaggaccttcatcataaatactgcgaacgggaagtggataggccgaagtcagatagtttgaaggttatagtaagaagcaagtattttaagcagaaacaggaggacaaaagtctgaaacaatcgatcccatgtcttaatgattgctctgtgattggtcagagaaaggctgttaaaactgtgattaacatgtcaagcgcgtctaaaagagaagagagtcacagagctatagcaacaagtccatgtttacaccatgaccgaatctacaacgatcatgaagatgctaaagaagcgagtttctctgccatgaacgaggtggctgagagaacaataaacacccacaagattaaccatcagatcaatgaagaagaacagaacccatccgttgaaattccttctgcctttagtactcccgagaatgttatacctctctcttccattgctattgatagttgccatggagttgcaacagggaagaggaagcttgactcagatgaaaaccttcacaaggttagatattgttctattagccaatgtgacaatgtccatatttgccgcttatgctatcattattcaagccatttatcaacttttctaactatttcttcaggaaaatttgaaatccaagcacatgcgcatggatgaaactgatactggtaattatagaaattcttgctcccataaatacctggatctatataattgttatataggcgcaatgggatctttgacggaaactgattttattcatgtactatcttgtgaagctcttaatgcagaaacaccattagaaaccgatgatgttgagaagtttggatcgaacatttcacatatagggcattactcagaaatagcagagaaatcagtggaaagatttgtctcagctatatcgtctttcaaatattctgggactggctctcgtgctagcggtctccgtgcccctctcaaagatatccgcaacacttgtccgtccaaagggtaaacatttttacctctgatagtataatatcttcagtacttttggtgattgatgcaatattctcatagagatttaattggttttgtcaaaaaaaaggttatctcttaaaccagacatcagcaagtttggctatgcgtcaagcaaccgacacatggtgacaaagtcaaggagaatgtgagctcagatttgtaagttaaccatctctttagagccacatgtgagagctttagctttagaattaacttcttggtcgcatgatgatatttttggtgttgtgtctgtattagctttctacttactgtgcatagcattcttgttcaaagacacttcacacaacagttggattcataaatgaaacaactttcaacttgtcatctctaggaaaatcataaatttttgaaaattgttttcataaagtgaaagttgcagagaaccaaaaggcaatagtgtgcaagcaaatgcaataaatgttataattgggccaaatgcaatagatagagctttcaagagatttattgagaaaaagacaagctctaatttctgtatcaaatgatttaggattgtttgtatgcacacgtaataaatttagggaaatttgtggctaaaaaggtatgcacgtgaacgctaaaagaaacatatcatttgatatgtgcaagtccaatcagattctgacagtttggatcatcaaactcgaagtttctgctttttcttacacacgtggtccacttgtacttccacgtcatctcacttacttttgctgtctttttccttttttagtgagtaaaaatcgtttttgtaattcacaatactacaagtctacaatggatgttgcgatgggccaacgtaatcatcaaatgcaatgtgaacaaaccgatggttgataatgcgattctagctatgcgtaagcattctattttcaataaaccagttttaatcaacgcaaattagttgatcatataaaacgtataaaacgtatttctgcaattagttgatcatgattaataataaaaaaatactaggtgatacatgatttgttttccaaataatagaataaatatcctcttctttttctgctatattgaaaaattgtttttgacatgtgagagtcatgaatcgtcgttgttagtcacgctataattgcacaaaactttcttagtctttttttttttttttgttaagaaactttcttggtcttttccttctcaataaatgacagactagaagaattttatgcaagtataatgtgacttattatttccttgtcggttctttaattttttaaaacgcatgtttataagataaaggagctgcgtaatctaaagactgggcatgttaaatttgaatttgatacaatctctgttaaagtataaacattactataatatcgctataagaatgtgaaaaacaagcttgtaaagttagaatattataataatgtatattacataatttagtcatcagtaacaaagttaatggataagaacttggctagatgcatgtgccgtcggcttataatcatgtcatcatgtgtcaaagtatatatctacgagacgctaatattccaaagggatggctagtaagaaaaagtaattatgtcatgatcgttattattttatgataagaccttaattacctattgatctcttgcttattttataaagataaggtttgaataattgattaagaacagaagaatttgcttggggttggttaatcgagtatttattaatcaagttgtttttgtttgactatcaagtttttactactgcttctccctaccaatttgattatatatacggttttttcaagtctgattcaactagatagaaccttaggtaatttaatatcttcaaaactggataaatttacttgaccatcattttatatcggttaagcttgaccatgttattttgctcttaaagaaattaatatattagactcatcttaaggttagaactcaatagttcaatcaattcactacatttttttttttatttttttttaaaatatagatgtttttaaacgtcaaaaacacctagaatttcataaattcttagtctggaatttggtctagaatcttcaaaatttattatgaaaaaattacatgtataaaataatgcaaattttctcgcgttgatgtcaccggccagaaatgtctctttcttgctctctctcataatcaattacaacagaacagctgtttctgttcgtcttttgtcctcatcttattcattagagaaacaaataatagagatcttcataatacattcataaatttcattttcttacgacaaattcaatttcgtcagcgcaaaagaagtgttgatgaagaacaacaattagagcaaaagtaaaacttatatttttcttcttcttttttctattacatttaagagaatcaaaaattaagaataaacaaggaaattaatgttcttttctttttgacattttccttttgacattcaattaaaaatcaaactaaaaaaaaaacaattacgagaaccgctgattacttcttcgactaaaaacaaaaaaaaaaaaattggaagatcgaaaaaaattaatcaaaatccaaaaccagtccggtttaatccaatttcaagcttccaaaaacccggttaatttgagaaccgaattacgaacccggctcagatctcgtcctttaagagttcttccgttacctgtacaaacggaaaacgccatttgacctccttccatcctccgtccaactatcaaatgcggcggaatcattttccttcctccgtcgtcatcggaatattcctcctccgtcgaatacctcctcatcggtatgttaaccggaagcgaactagaaaacgccgtcaccgctgaaggcaacggcgtcgttttactccgtctagatgacttgttccacactctctcagaattttcccggaaatccaccggacggttattctctttctcgttaccgtcttctcgccggcgaatcggaaagtaattgtcagagaaaatgatctcagattcgtcgaattcttccgacattttcaagaaaacaaatgtttttaaagatgaaactaaaaaagggattaataaagttagggtttatgaagaattaagattagaattggattggagaaaacagtaagaagaagaagagaaatgtgaagggtttatatagaatagaggaaacgtagagagtactcaagtttttttttttgtgtgtggttatgtgatgatgtcatcataatggcgttgagtgcggaccccgcttttctttctatatctatacattgtgtatatagaatttaattaattttatactttcctttattttaacactttttataatagaattatgttttgtcttatcctatatctgtataatataagatcgaggactctcgttggatacttggattgaatttcttatatttttagcctaactatatcacattggacacatcttatccatagaatgtcattggtttaagaggttttgaaaaatagattaattttgtttttggtagggtgaaagatatattaattggtattaagattaaaatataggaagtttgaattattttggtaaatttgaatttttcattttcgaaaaagtaaattttcactttagaagatgtattccccaaaagtttaagtcaaagtgatacatttatttatattttcaagttttttcatattaaattactagataaatcattttcgtcaagattttttttgttgattgaatcaagacatcgacgacacagaaaaaagaatcaaattaagataatgctatgttaatatttgattataattcctttacaataataacccatccggatgataaaatgtgataataattaacaagactgattcaatttcaatttcaaatgacctagtcggtttaaatataaaggtagttaatatatatctcatatatataaatcaattataatttataatatggaaaaaaaaatatatggtagaatagaaccgtagaagtataataagtttcccctcttttgggcttagaaccctctttctctctcagtgtcttttcactagggtaagaatagagcttttggctgaataatctcgatccctcagccgcattccactgttcccttgtctgataaagctcaattcttggggtttctcaatagtgttttcaaggtttccgttcgatcttccatcggttttcttctactaaaggtctccgcggttcagtaaagcttcttgtagggggaagttctttgaggttctgcaatgtcggctgcaatggacagagctttaatggagaagtctttggatgacaaagatgaaccattcgagatgccggatttgcctgatctcatgtcttgtgaaaggaataagctctgtttaatagggagggttctcaaccctagttgtcaaccgatgaaacacttgattcgtaatatgccaaggaagtggcagaaagaagggaaagtcaaaggtgtagctctttcggatgaaagattccagttcattttcgattccaaacatgatcttgaagatgtcctggcgaaaggagtgcattcctttaatgaatggtccattattgtggacagatggtatgagcaccctccagacgactatttacggttcatgcccttgtgggttcaaatctggaacattccggtgaattattacactgagaaagctatcacgaagcttggtgatctcattggtgaggtcaaagaggtggtgttcaacccggatttgcatcaggctcagaaatttgtccgggttaaggtgctctttgatgtctctagaccgttaaggagatccaaagtcatcaatttcaaacatggagaatcagccacggtaaaattccattatgaaaggattcaaaagaggtgttatgaatgccagcggttaactcatgagaaagatatgtgccctctcctgatcaaggctcgtcaagacaaagcggctgcttcgagacaaggagtatccattccaagagctccaccacagcctgttttaaaggaaggggaccctctttttggtgtcttacaagaaagtcaggtgggtttggatcccaacacaggaagaccaagaattgctccagaggtcttggaaggtatgaggcaatacctcagagttgcaaatgcagaggagcgttctattcgggtagacagagtaattcaatctgttagagagactgaaaaagatccctttactcagaaaactgttctgcgattggaagccttacccttagtgcactatgatctgtctaaggaaaaagggttggtcttcggttatgatcaggaagaatcttcaagtcaaggaatcagtttcaacctcaactcgtcttctggtgttgctgaatcgtcacagccgcaagacgctagagagtggttgttgaagaagccgatcaggaattccttcacggaggctggtagcttccttgctctctctcaaccttttccggatagttcaatggttcagagtcctaatctctttgagataggctctactgggactactacgaaaaagacgaagcaaaggaacagatcgcccaaacatgctaggaaacctaagcctagagatcctttgtgtagtttgtctgatcaaaagctcaaagaaggtgcagcatctggttctaaagagaatagaaaggcagttgacaagggtccgagcactgcaaaatccatcaagctcaacccgaaattggtggtcccaaatgagggaccgtccaacgcctaatgagtcttatcagctggaattgtcaaggattgggacggtctcaagacttggcgattcctagactcatggaaatgaggcgttctcattttcctgaggtgttatttttaatggaaaccaagaattgtagtaatgtagtagtagacctgcaagaatggttagggtatgagagggtttttacagttaatccagtgggccttagtggcggtttggccttgctctggaaaaaaggtgttgttgttaatgtaaaatttgcagacaagaatcttattgattttcatctccaatttggttcctttgatttctatgtctcttgtgtttatggagatccggcttttagtaacaggcatctggtttgggaaaaacttactatgattaggcttaacagaaaagatccttggtgtatgctaggggattttaatgccattttgcataatggtgagaaaaaaggaggtcccagaagaggtgattctgctttccttcccttcaaagatatgctggaaagttgtgacatgttagagttaccaagcaaaggaaatgcttttacctagggaggtaagagaggaaatttgtatatttagagtcgcctagatcgtcgctttgggaacaagaactggttcaaggcttttccggtgtccaatcaagagtttttggataaaaggggttctgatcatcgtcctgtccttgtaagattggataagaccacggtggagtacagaggcaatttcaggtttgataaacgtcttttcaatcaacctaacgtaaaagaagtcatttgtctagcatggaatggtaatcaaactctcaggagggtttctactatggaaaagctcaagatgtgcatatcagctttaagtaaatggaaacaggagaacaattgtaactcgttgactcggattactcaggcgagggctgctttagagtttgaacagtcttctgatttccctagtactgaattggtttggactcttaaaaatgatctttgtaaagcaaaccaagacgaagaaactttttagagtcaaaaaagtagagcaaaatggatgcacagtggcgatatgaatacctcctttttccatgcatctgtcaaggataacaggggtaaacagcatattgagcagatgaatgatatcaatggtcatctacacaaagatgaagagtcgaaaggtttgattgtggttgcctacttcaatgagttattcaaatcctcgaatcctagcagctttcaggatctttttgaggattatccatctcgggtgactgaaggaatgaatactgtgcttgcaggatctgtctctaagaatgaggttagagacgcaatttttgggattagaagctcaagtgctcctggagctgattggttcactgggttctttttccagaaatactggagcatcattggccctcaagttacaatggagatttagaatttctttagtcaagggacttttcctaaagaatggaatttcactcaattgtgtttgctccctaaaaagaagaaaccagacaagatgacagatttaaggcctataagtctgtgttcagttatgtacaagatcatatcaaagattatggttaagcggctgcaaccttttctccctgatctggtctctcctaatcaatcagcttttgtgcctgacaggttgatctcagataatattttgatagcacacgaagtggtacatggactgcgcactcacaagacggtgtctaaagagttcatagcaatcaaatctgatatgtccaaagcgtttgacagggtcgagtggaactatgttaaggccttgttagaagcgttgggttttcatcagaaataagtggcatggtttatgttcatgattacttcagtctccttcacagttctgattaatgacaaagctcatggcaaaatcattccaacaagagggttgaggcaaggagatccgttatcacccttcttgtttattttgtgttcagaaggtctaactcacctcatgaaccgtgctgaaagccagagtctcattagtggtatccgcttttctcctaatggaccagctattcaccacctgctgtttacggatgatagtttgttcatgtgtaaagcggataagaaagaagtggcagtgataaaaaacattttcaaggtttatggtgatgctacaggacaaatgataaattttgaaaagtctagtatcacttttgggtcaaaggttgaagagggttgtaaagagtggattaaagcagcgctgggaatcacaaatgagggtggagcaggcacttatctcggtctccctgagtgtttcagcggttctaaggtccagcttttagactatattagggaccggttgaagtcaaggctgtcgggttggtttgctagaatcttatctcttggaggtaagcagattcttcttaaagcagttgcgatggcgatgccggtttacgcaatatcctgctttaaactaactaagaccacttgtgagaacctatcaagtgcaatggctgacttttggtggaacgctcttgaacataaaaggaagactcactgggtcagttgggagaagatgtgtctgtctaaggaaaatggagggttgggctttagggatattgaaagtttcaatcaagctcttttggcaaagcaagcttggagattattacaatatccctcctgtctttttgctcagtttttcaaaaaagtcggtattttcctgatgaagatttcttagaagctgatctaggagccagaccatcctatgcttggagaagtgttttgcatggcagggatttgcttactaaggggctaaggaaagaaattggtaatggtaattccataagtgtatggatggacaactggatttacgacaatggaccccgtatccctcttcaaaagcatttctctgttagtttgaacctgagggtgaaagatttaatcaaccttgatggaagatgctggaatagagatttgcttcaggatttgttttttcaggtggatattgatctcatttgtaagaaaaagcctgtggttgacatggatgacttttgggtttggttgcactctaaatcaggagagtattcggttaagtccggttactggttggtcttccaatccaataaaccggagctactctttaaggcttgtaggcaaccgtctactaatgggttgaaagaaaagatttggtccacatctacttttcccaaaatcaagctctttctttggagaatattgagtgctgctcttcctgttgcggatcaaattctcagaagaggaatgaatgttgatccttgttgtcaaatctgtggtcaagaaggtgaatctataaaccatgtgctttttacttgttcagtggctaggcaggtatgagcgttatcgggagtccccacccccgagtttggttttcagaatagctccatttttgccaacattcagttcctttttgagctgagttttttagccagggttccagttcaggtaaaaaggtcttggccttgggttttatggaggttatggaagaatagaaacttgttattattcgaaggaataagtttttgccccttaagctccattcttaagataggagatgatgtgtaggaatggtttctggcacaatctcttatccgtctagtggatccagaggagaacaatcgggctgacccttgtaggccacgttgggaccctcctccgataggttgggttaaatgcaatgttggagcggtctggtcagggaaaaaaaagctttgtggtgggtcttgggtcgtgagagatgatcgtggtcaggttctgcttcacagccgtagagccttcgggaatcttacaactaaaaaggacagtcagatcacctgtgttctttgggccattgagagcatggctagtcataaattatcgaaggttctgtttgctttcgaaccgggagacttattgtttgcttttgttaggccgaaagcgtggccttcttttgctttacaggtttcagaactaacacatttttttgaaaagattggagattggaaagtggtggaggaaaatgtggtttcaaacaagggggcttctcttatagctcaaagcgtggtcaaggatggaaggctacaatcttatgttgcagttggtcatccgctttggcttcatcagttctttgagggtgagagaatctttctttaggtcttctctccttgtatttggtttgttttttggtccctctctaatctttggctctgtagttgaatggcactttctagtgtttcattcttaaccgtaactggttttttttaaagattatgtatcccaacttttatatatatcctttcagtaagaaaaaaaaaaaaaaaagtataattaatatagatggaaagttggaatgatacttttgaagtgtttaactgaaaaaggaagctaggtgcctgcgcttactgacaaatcagtctccgtttcttgtggcccacgtattgttccacattattattttattttgtgataaacacattattgcatttcattatttcaattgagtaatatttttacacatcagaaaacaatattaaatacatagcgtgaattctttgaactgttttgggcagtggtccaatttacttcaatcagaaaacgaaacgataaagctttctcattatctttataatcatcatatggtacataatttagtttatgttttaaatgtattggttgttttacaagggaagattaatgaattagtacgttgtatgtatctttcgaacctcttaaaagttaaaccttaataagttttggcaaagaccattttaagttttttaaaaagggtatgtaacccttttgttcgttgtctacaatttacacatgtacataaccaattttgaacataaaatatgttataatatgttcaaacaaatcactacactatatgcatgttttggaaaaaaacttgcgaatcttatttgcctaattattggccattcgggtgctatgtacacccattttctcatttcgtgatccatttttaaatcaaaattaggagattatgcatgtgttcattcttacattaaaattattattccttggtgtttgttcattcttactgttggtattaactatatgagtttataatggcttgtttcagtgaaatatttgacaaaaacgaaagttttagtatctataaataaaaaaacgacgttgattgattaggaagtttgggtttcttaaataagaaatttttgttttggatttgatggatattttctccctcattattggtatataaatatactataatgttgaaattttttattgtaccaaattactaacaacgttatgttgataataaacggcatgagtgatccgttttgtaaagtaactaaataagattctttacgtgctcaacaatgacaacatcacggggttttgtttctaacataccccatctctttccaagctttcaaactcatatattctaaggatacattgtatttaaagaaactatcataatacttaaatcatggaaataatggaatgatggaagaattataaccagtggcatcatgttcgaaaatatgaaagtccataaaacaaaacatcttataagaaggttgcgattttggaagtatccataagtcaaagcagagcaaccataatcagttaagcaattggtcaaattatgctaacctataccactatctcagcttttggttccaatccttttctttttggatatacataaaccataaaaaaaaattgaaaacgtcagtgactataatcgttttttttttctcagacactaaagacagaaatttaaaacagttaattgtgttcacattttaagccataaacagtcacagaatcgtaataatgataatgtgaaaacggttgcaaccgcgtaaaggattatgaagaaaccgtacttacccaatatcacaccattctttaaacaaatttgaacgacatgctctaagcgacttctatcagaatttcgaagacttttacaaactcagtacttttttggtaatactattttcatattttaaaatgaagaagtaaacgacacaaatagttgcggaagtgacaaaagagttttgggcattggaagtgtgttgtgttaatttatggcatcgttggcctcgtcaatgcaaaaccctcgtgggtctcactttccagatctatcttgaagtgtgataaggccttttgtgaaccaaacacgtgtaatgatttcgtcatcatcaaatacggatctcgaagtttatgctttgcttcaaattcgattgatgggactctcaatgtcgtctctgtacttgtcttctcttacgtggcagattttatactcttttaagattcatttatttttggagtaactatattcctaaatcttttgattcgtggactgatacttgataagtgatcactcttgaaataagtatgtgtttaaaaaatagtttatgctagctgataagctccatataggctatatagctcgattttctttttattgagtttgaaactaaattatgattagattaccagacaaaaatatagatacagatattctagaaaattgtggtggggtaagatcatatgaatacaattatgtactatacaatagagtttgagtcattaaataattattttatcttttattaatgcgatgatcctaaagtgtatacattgacacgtcttaaagattgtgaaaacgacttcaatgtcatctataaatttctttgaaaagaaagaaaacttcagaaaagagcgcaggagtcaagagttaggactcgatttttgtaaattctttttcgttaatttggtgttgctattttgagccacgttactaatatggtttgaacacctgtcagataaattcatatataatcagataagcatgcaattatatttttgttgatttaatatttcggtagaaagaataagtaattttgttaaacgattcatcaaatcacaaattagataagatgatgagtttagatttgttctatgatcatcacatacgtgtgcgtaagtatttgcgtaggcagatatattcctgcgttattattatatagatattgtagagtcaatgttgtgctggctgcaagacgaaccacaactagatttagtaaattactaatgcttgcccgaagttatggttgatttaatacgtacgtaaaagtcaaatggcaatgttagtcacacgaaattgctgaatttaattacgtaagtatacgtacggatttgtccaatgattgatgtttattcttagggttttggatacttatttactaagcaacgtaaatgttagataatctaataacaaatgatttggaaaagatgcttactaagttctcagatacaaatgatcatggcgttagttccatatgatttgattcgaaaatttatgatgacaatacattaaaatcctcggttttattggctaatgctttattcacatttcaccccctacttcgaaaaatattgtagttattatggttgtttgataattggttaattttgttggtgctaaaaagaatttagattataagttcatgacaacaaacaagcctttactcatccaatatgtttgtactatttttgtgtatgtacatcacaataagattttaatgtacttattaatgtgttttgtattaatgatttttaattccaatattttagaaaaaaagtttgttttaatgtgggattcgaactcaggattccacgtacacatgcggttaaataaacggggaaaagattgtatctagagttgtggtcttgtggatcttatgaaatagtatgaaatttggacgacaattttagttacgttcataattgtatggtcgtttagttggataactaaattatgatttaagatatattagcccaattaaaggaagcctgacccagttcggcccaattgtagctgagaacttagtaggcctggtcggcactgatagctatatagaggataacatctatcccccgatggttcaaagttcaaactttaacccaagtacccaaccaatattgatgggcaatgaagttacatcattgtcatacagtgcaagtactctttaaaattatgaatttgtaacaactaacaaagtaatagatctagacaagatcatgaaattacattgcattatagtattttttaagataaacaaaatgtaactaaaacatataattttagtttatgcatgggtaaactactacaaaaaaacaagggatttaaagtcactttttaaataccctaacgtaaacactgactctatctaacaatataaagtgactttttaaaatgacttacaagtgatgaggttaagtgttttaacatcacttgaaaaactaactttaaaactaacatcaaaacaaaatgggctttaattctttaatgaactttatttttttttgtctcaatgcaaaacacatttgcatttacacttatgttttgtctgaatccaaatacatatttgtttgaatcctttacatgttgtctgaatcaaagttgtaaataaaacaagggacaatagccaaatgaaatcaaatatctcaatagtaaaaacaatacataatatatagtttcatgtttagaaaatcaaatagaagaatacaagaatattgttaatttggtatacaagtgccttgttctcatccaatttttatatcaaatctgatatgcacttcttcttgtacctcttctgaagcatatctgaactgaaacaaaaacatatatgggcatatggcagtctcaatttttctcagtcttacaacactataataacatgatctttttattctacaactacaacttagacgataataacactacttgtaccttttgattccttaactacaacttagccttaactacaaacgatttgaagaaatagactaatccataaaccttgggattcaatgctaatctaaaaggtgttttcattaaatgatttggagaaaaaaactcatccattaattcactaataaatagtttcagttgagttaagtcgttattcaataacttattctgatagttctaaatactactattggataggagtgttataattttcatagctgtttgttgaatgtggacgtgagcagcaaggcagaagagtaaaaaaacctcacttctctcaaaccgttactaatcttaatttctctaattttgtgacggaataatcatatcattcatatgtcaaatcaagtctatggatatacatgtttttgcaataagaagtaaaatacaacattgtcccgacagatcactatggcctgtaaattgtcctatatcagaagcaatcaattttcgaatgatatatgttgtgtccaaacaatttattactaaaccaacattttgggatcaataatgtcatgcgaattcgtttaatactactatctttaaagtgaaggtaaagtaagcaaagagttacagtttgctattttttttttttttttcgagttagatgatttcgaccatatcataagctagcatgttagattccgatattcctcgaattaacagataaattacttatatatccgtttctattatgccattataatttcttgcaaaagcatagatcactaatgtatatgatctctgtcgtatagctgtccaaaaatggagaatttatttcaagacaagagattaattcacataaattcatcaaacattacaaagttaccccctctgttttaaattgcagataaacatgaacctgaccgtcaacgtcttggaagatttagtttaaagcaggagcacgttcctcactaactcagtttttgacttttatttggtgtcctacaactaaaactcccaaccaactctcattaactgcatgcagttccaactcactaaacaaaaaaagcatttaggaccaattaatcgcaaccattgattcctttataataagaccaatttgggtgatagtacatcgtgaaatagacccgccagttgtaaacacaaaataaacaatagcactaatgaagaaccaattaatgtaagtgtttttttctttctttttggtatccatgttaagtgaccaattactataattttcttggttaaggttaacgtacaaaggatatttaagttatagattttactggttgatataaaaaaaagaagttatagaattgacttttctagactgaataaatgacgaataagtttcgtttggaatcaagtttgtggatcaatcaaaaccccttactaggtgcatcatgcttgtccacacaaaaatgtttatcgatcttgtttcaacgattaattacaaatctctgtgaaggctgaactatttcatcaatgcaaagttcataaattgataaacgtaattttatcttcgtgacgactaagtgatgagacacctctcacacgtattatgcttttgtctaccatagctagccaaatcttttcatcactttttaatcgtttttcattataagttatttctttacagtttaccatttttttttaaaaaatagctgtagatattccaagcaatgagcgaaatgttttgggatatcataatattgaatattattatactgttttcgcatacttaacatataagcattttaaaacacgttatcattatacattaagttataaaccaacttatttttcttttgaatataatttaacattaaattaaaaagcagattatcatcataagatatttgatcaaaatactaatctatctaaacattaacaatatatactaattaatatctttatgttttgttcaaaatgtacattctacaaaacttttgtgggtttagttaacttttgttgatatatatatatatatatatatatatcagcttgtagaagaggggaacctttaatcgtgctaacacggacccgatccagttaaagtgcttgtatagcaaaaaattgatctgactatttattgcattaattggtatggtcacgttaataaatcttattacattgcgattgacgttaacgtatgatgttactgctaacaagaattcaaatcaaatttacaagagaaaggttcaattcaagccaccatttttgcttttctttttttcgcttcacaaaaagttggattagtgaagcatactacaacactctctttagggatcggacccctctatgcactgttatgtcggctagtgtccgcacaccctacgcagtattatttattgatacttacacatagaatattttttgccaacatttttagtaccttggaatatagtatataccgttgctcaaatagtttcactaataatgtggttaaaaacagacgatatttgatacaatgtactttctctgtttcatttaactcttatattcacattgtttttctctttcaaaataagtgatgtatgcaaaattacctcattgtcccaatttatccttattgtttttcatactatatctgtatttttttaaaactttttttttgaagaaactatttgtaattattgcattgcttgtaacatagagataattatttgttttgcatgttttcctaataattgtgcatttatccaaaatatatttattttggaaaagtagagtaatattctctccgtttaacaaaaaaaaaaaaaagacttatttaaacgtaagaatgataaagaaaaatagtttttatttccatttcaagcgtataaggttatagcaaaatgaaacagccagttcatagacaaatttgaagatagtttttcgtacatcggtacatatgataatgaagaagtctagacccagacacccagctaacggatcttaatctttctagagtatgcgacttagtaaaagatcaattcatagatcaattcactgacgttattatatcgaaagctttcatgcccacataatgtcaaatatctaccattttctcgaacttacatttgaaccatcgatctcaaatgtaacatgtatgatcgatgtataatatcatatttgtatgatgaatgtgtataattgtctatgtgtaacaagacttaaggcgcacgtatcagccaccagggcggctcgttttgattattacatgtcgaaaaagttttcacaaagagtccgcgtgaatttaatgccccaacctaactctcctcacttatttcccactccttccatttttaaagtttaatctttgaaatgaaatatgtctctgtatgcgatcgaccatacaactattgttacagtttttttgaccgaaacgtaaatatctttttaggcattattcattagcattagacaataatcaattattctagacactgttagaaaacacagctgcctagctgccaagacgactatctaggcaatcaacggttttcttccgtcaaaaatagtcccaaatcgactacactaattaatcttatgacacaaccgaatcttacatatctaagactaagttcagaatcactatgtccaaatttacaagaaccattaaacaataatatacgacccgatgatagtttttcgagaaaaaatctccaccaatcaaacgataggatcgatcgtgtttgacatattatatcaaaaccatcgtgatcaatatcttataacgcagttatttgtgagccgacaaatccttttaccacgaacatacatttacagcgtagttattattatttcaatcccataagatgtcattaactacagttctcttcgttttttttggtgcaaccaattatagttctcaaaacgagacaccaaaacaaatacaatttataattggacccatcgattttaaagtaaagtatgccacaaactttaaaaaggctaaaaaaagaaaagaaaatataaatacacttacgtttctcagactccatatataggactcaaaacttctctggattcttcacatttcaccacaacgaccaccactcctacactaacacttatatcaccaacacattgtgttctactatacataaaattcagttcctaagtatttttgttttgttttgtgagatcgatggagagttacttgaggaaatggtgtttagtttctgtgtgggttttgcttttaggtttagggtttaaggtaaaagcagagcctcaagttccatgttacttcatctttggtgattctttggttgacaatggaaacaacaatcgtcttagatctattgcaagagccgattatttcccttacggcatcgatttcggcggccccaccggccgtttttccaacggcagaaccaccgtcgacgttctcagtaaacccttaactatatctttcttcttattttttcttctcaaagatattactttctacttaatctgtctaattaactaaactagagtgcgactgaaatgttataatcagaatctaacatgttttttttgttttgacatgacttgtgtgatataatgaagctgagctacttggatttgataactacattcctgcgtatagtactgtgagtggccaagagatacttcaaggagtcaactacgcatctgcagctgctggaatcagagaagaaaccggtgcacaattggtaacaaagacaacactttgataattctcatgacctctctgttctgtttaagactagaaaaatattgttttaactttttcttgtttttttgctttgctttcggtaatgaagggacaaaggataacatttagtgggcaagtagagaattataagaacacagtggcacaagtggtggagattcttggagacgagtacactgcagcagattaccttaagagatgcatttactctgttggtatgggaagcaatgactatcttaataactacttcatgcctcagttctactccactagcagacagtacactcccgaacagtatgctgacgatcttatcagtcgttacagggaccagcttaatgtaagtttttctgtttaattcgatggaaaactatggggtaatttgggagtcctctgttttttttgtatccttgattctcattttgggatgatctattttatgatatgatctttagcagtaattttaagtttattttcaattgaacgttacttatttcacaatctttcttattttgcgtgtgtatgaaggcactgtacaactatggagctagaaagtttgcattggtaggaattggagccattggatgtagtccgaatgcgctcgcacagggcagccaagacggaacaacttgtgtggagcgtatcaactcggccaaccgaatcttcaacaacaggctcatatctatggtccaacaactaaacaacgctcattccgatgctagtttcacttacatcaatgcttatggcgcttttcaggatataatcgccaatccctctgcttatggtataatagagatatcttcatgaaacttaagcctatgattaaataaatattctcttctactttatggtaaaaagaatctaatctatatattgggttctctgaatgaatgtttttagggtttacgaatacgaacactgcgtgttgcggaattggaaggaacggaggtcagctaacatgtttaccgggagaacccccgtgcttgaaccgagatgagtacgtgttttgggatgcatttcatccttcggctgctgcaaacacggccattgcaaaaagatcttacaatgcacaaagatcttccgacgtttatccgattgatatctcgcaattagcacagctttgaaaggacagagaataggagagttttacaacaattgtatgcttttcaggttataaattgaattattggaaatgattctgatgttatgtgtgtacccaaagtgttcaactttataaaaaaaaatagggattgcattatctgagttacttccacaatgttttttttttttttttttttttcttttctgtaatcgtgtattttcattcagtttcaaaatgtgtagtctaggatttattgtctaaaacttttgtttggttgaacacggcttcgctgaaactggatctagtatatagataggaattgtgttaaattgttttgatcatttgatttttattaaccgtcattaatcaactatgagtacaacaaatgtaagaaagaagacagaaacattaaataatttgaacgcatctctattcattacttccattatgcactttgaaaaatctcttgatcctctcaggaaagcacgtaacgtaattctttcatacgtaatattacattctccaccgggctaaataaaccaagcccaaaagttatcaatgaagcccaatagttgtcaatcattttttcatatcgaactaaaaatgtgtttttttttttttttgttttggtttttaaaaataacatagagtgcaccagccgggaacatgtagttaatacaattaactaaaaaaacatgtagttaaatataatttttttttttttttttcttgtcgtctactcaaaatttaattcaccttgttttgtttcgttaattaatttaggttgttgttctaatatatgcttttatgattgatacaatgactaggactggacacaggacacaggtcatctattttcaattttagaattgccattagatttttaagagtattctactggaaaagagtttttttgttagttagcgatatttaaatctaagtttaaattgtatgataacttgaaacatacaatttgttagttagcgatatttaaatctaagttcatatatatatggataattcctactaaaaactttttttttgtaatgattcttttatgaccaaagcctaacatcagcaagtattcaaaacatattaacgacgaaattatctgtcaatcgatgactagaatgatttagtgaccaattggctttacttattttttctttcttcagagaacatgcaatagtttaacaataaatgtagcattaccctaagttaagagttttgacctacgatcttaaatggaaagagttgggagggaacatggaagcagcaccggccttgttcaattatgatacaaacaagtcgttgatttattcacaaaatatccactatacctttcatttattgcccaaacctaattcttcacctgttttcttttcacccaattttcttccatttcaaataattggtatctttcaattttagatatatatacacaacaagtgacaccgataatacacaatctatcacgattttcttttcatttcgtatttatttataaaatgatttttaattggctcatttatccaattatgacaaaagttaggattttgtacgcggaaaaaactctacagctggtcaacgttcagagagaaggacaagtggctttgtcaaacctacgactttgtcttctctcatactattataatgcaaaatatctttttcttactttaaccagctgcaaatgacctttctaaatgctttaaacaatatatatatcgaaacaatgatcagaaattagggtttagtgagggtatatgtacattactaactgtaaataatattttattggtataagtcatgactaaaaataagcccttgtcgataagtcataaatcctactctccgcgcgatatgtttaattttggtaattacctatccatttactgtagttctttttttgttcaatgttccttctccaactcctctttaagttccttatataagttaatgttaatttagttgtcggcacatataccttttaaattatcgaatataaagccattgataaatcttgattctgatgttgaatgagaaaaaactggtcacattatattggacccaccaatcttaaagtgactaggcctacaaaaattaaatctatcaaaaacacaaatgtctctctatatatagttacacaacttctttggacttcttcacattcactcatatcactacactttccattaattaccaatatatttttactacttaaaaaagatattggtcttgaaatggagagttacttaacgaaatggtgtgtagtgcttgtgttgttgtgtttcgggtttagtgtagtaaaagcacaagcacaagctcaagttccatgtttctttgtttttggtgactctttggttgacaatggaaacaacaacggtcttatttctattgcaagatccaattacttcccttacggtatcgatttcggcggccctaccggccgtttctccaacggcaagactactgttgatgtgatcggtatgcaatcttattaattagatagagttgttgctaattagatagtttatgcgattagaaagttaatggtcttaatctaacatgttttgacctttttttttgatgtaatgaagctgagctacttggatttaatggctacattcctgcgtacaatactgtgagtggtcggcaaatactctccggagttaactacgcttccgcagctgctggaatccgagaagaaaccggtcgacaattggtaactgaaacattaaaaccttttttcttaactctctttattcaaaaaaatattattaaagttccaacgttaattttttttttttttttttccggaaaatgaagggacaaaggataagctttagtggacaagttaggaactaccagaccacagtatcgcaagttgtgcagcttctaggagacgagactcgtgcagctgattacctcaagagatgtatttactctgttggtttaggaagcaacgactatctcaacaactacttcatgcctacgttttactcttctagcagacaattcacacccgaacaatacgctaacgatctcatcagtcgctacagcacccagctcaatgtacgtttttttcttttcttgtgactagtttatctctgttttcatgttattaaatgatacaaaaggtttggctctctcgagtttacccatttagcagtgatagtaaggtttttagacgtgggtttggtctatcttttaactttcgtattatgactcttttcatttaaatacgatttggtttctaatatgaaaatacgactttttgaggcagagaattacaaaaatagcaatttatagctttatagtacaagactacaagttaaggtctcacaccagttaatttaaacccaattttggtcttcacttgtagtacacaatataaagtttctagcttaagctttttctgagtgacctatcttgtgagaaatgtttttatttttggaaaataatataaaggatgaataataaaatttatgcaattttgtaaaattttcatcggagttttacttccatttttcggggtttgtgcaggcattatacaactatggggctcgaaagtttgcattgagtggaattggagcagttggttgtagtcctaacgcgctcgcaggcagtcccgacggtaggacttgcgtagaccgcatcaactcagcaaaccagatcttcaacaacaagctaagatctcttgttgatcagctcaacaacaatcaccctgatgcaaagttcatctacatcaatgcttatggcattttccaggacatgatcacaaatcctgccagatttggtatatatacacacaaacacaagtgtggttttcttttaagtatgaacgaaaccgaaattgttatctgatttgtcggaaacgttttttgttttcagggtttagagtgacgaacgcgggatgttgcggtattgggaggaatgctggacagatcacatgtttaccgggacagagaccgtgtagagaccgcaatgcgtacgtgttctgggacgcatttcaccctactgaagccgcaaatgtgatcatcgcaaggagatcgtacaatgcacaatcggcttcagacgcttaccctatggatatttcaaggctggcacagctttgaagaaacatagtaaaataagaactaaagaagttccacaaaccaatgtgtgatcttgttgtgtaccgtaccgctatttaagattttcttgacgtaattgaaatcgagtaaaacattattctatatacattcgatttctatatcaacttcatcactcatacaagtgagccatgagaggacattgttcacgggaattgcgcgtgacggttcatttcgacagtcgcaatatcgagtacaaaacacttaccatgttgcttccagtagtcagccatcggattgatccactccggttcagcaatctccgctctcgtgtgtttcaaatcatctgtcgaaatgttgtacttctcatctcttctcttcaccaactctggccttagtaccccttgccccaccccctgaggtgacatcattagttcgggtgcacccattggtaacttgtcacctacagaaacacacataaataaccaatgattggtcggatcaaactaaaccggacaaaatcgaacccacttctagaatttctatgattctgattaatgtttgaattagttaacctctgagtccggataactaattgtttaaccatacgattaatcggtatactaactgatagaagcggtttacataaaatctgtccggatccggtttcggaccagtatttagatgaggagacatacctcggtctatctgccaggtgcaccaaaactttccgtacgttttggctatgttcttgagctccggagcagccacaacctcaggcaatcgtggataagcccacgagcctgacttaacctcatatgcatgagagtgccaaagcttttgctcatcctcagacaaagtttcatataatcggtcggatattacatattcaattcctgttaacacaactttgctataagttttcataattggcattcgatgtgattaacaagaaaaaacggtatgaaaaaaagagtaccgattagaggtgcatcggagcggtcagaggcgtaaacagcacactgaaggaactcgtcgttgacgcggtggacatagtggtgagtccctattagccgggacatgtcaccaccatatatcgcaaaagtagagacatgagtgttcatctgcttcaccggtaatcgccgctgcatgatcgtcgatccggcatcaatcagacgtgttgaaactgtcatcggacctccaggaggtacctgatcatcgccgccgctcaaagccatccttaattttattttcttggttacaattttgaattttctagtttatggtttcgtggttatattgcatgtaatcttttttgaatgaattatatgatacatggcatgcatatttcatagaaacgtgtcacgaaacgggcatacatcgaccatgtgttgaatatcccactacaaatttacagctctgatttaataaaatcgtctacaaaaccaaaccggaccaaaattaaaaatcaaccaaaccaaactcgtgtcaaaccgaacagaaccaaacggttcccataagcaaccgaaacatgtacaagaatgattcgctgtgcaaagaatgctgacggaaaactttcccggccgccggaaaaacaagaactcatctaaaatctctcaataatttagcaacgaatacttcacacgcaatacaatcttacccttttcaacgcctagctttgctccagtgacaagccaatgtccaggtaaatcctgtggtccttttaacatctctgacgaatccacaatcttggccagttttcctgattgccctgacacttcctcggtcgaacttgatgtagatggacctcccggttccagtctccctgaggaagcaacgggagtgtggtcccagacggaccttcttattgtacaaccggggactttagagaagagtagtttcaaatgcaaaacgttttttgatccgaaatcccaaaccccgagctgagctccagtgacaatgtgaacgccggagagatcgccgatgtgggtctctgtgtgttcgataggtgaggtgcttacgtgagagaagttcttccatttgattggctcgaaccagcggctatcttgctcctctggtccttgccatttcggtgcacctattggcacgtgagagtcccaatgtggctgcaggattttagggagagagactaagtgttgtaaatggatagagagacggttttgtttgcttccttctaagctcagtctgagacctgtgaccggcttacgcccaacagttacctgaaattacccaaaaggcaaatatgttcagttcatacataaacagaacagtaactaaacaaaggaatcgaccgctctatgttacctgatcagcgctgatgaatagtttgggacccattaagctgaattgaagagaagaacacacaggttctttacgttggaggttactctgttcgggagcccaagctcgagctatttggtaatccaagaagtattgtaaatcttcaataggaggcttatctggtaaaaatatcgagaaatttctatgagaatgtaaccaggtggattcaaatacaaagaagttaaatttttagatacaaactcacattccaagtaaagttcgatagcacgagtcaaatgccgtaaaccaggcacaccttcaaggagagaaacaataggagtaaaagtcatgttgataatgtctggagctgcgggtacagtctcagcccaacgagcatggctttgctcaagatcgtcgcctcctcttcgcctaaatattactgtgatatcctacaggagagagctttttcaactaatatctttatcaaaccataattttataggaaataaaattcattaacaagagtaatctcgccatgcccttaacgttgtactaaccttgtctttgtatttcaaggggccggtaatagattgactctctgcttcatgaaatctgtgctttatcatgtcattcacatagttttctatttcagatactggtaaaggagaagactgatgttgtctgatgtatactacatctcttccaccaatggtcaccgaagttacaatatgagtgccgtaattttcaataaagctgtaccaaaagaaggaacaagtggagaaaccacataagaatcatgatagatgtcatcaagaatcacataaaagtgtagcaaaaggacaacaaaaggaaactgactctcaattagagtgtgaacctttgaagccatgttcatgtaaacagcgagaacagaacatacagaaaagcagaaaacatggtgtattaaagagagggaatatacctagctagggaagcaggatcccacgaggaaggaacagcacgtctgatctcattgtgcaaaaccaatgtaagctttgctaatttgacatcataaagcgggataaaatatccaaccagtgcaagagatttagtggatgctgcatctacttgccaagaacccgtgtaattgaacattgcgttaaagcatccgagtggtatgttcccttttacacctgatctcacattgaattcttctgccatctgccaaaaaacgtatatctaatgaataaccagcagcaaaacaatatatttccacagaatatctaaacatcaagactcatttttgttccccaaagaccaatctttatccgaaaatataagaaacatcattctgctctgaaatttcccttagcatctgacttgatcgaactacaaattgcctcattcaagttaaagctcaatgtaaagcttctaaatttagacatgtccaaagtagattagggtcctatgaactagtggtttcacaaatacacagagcagacatcatctaactgtagatacgtaatcaagacaaagacaaaaaaggggttgaatctaagaatggcatttcaacatcagaagtagaaaattagggggtcacctcatggaagctgcaaacagagattctttgtgtgccactgttgccgcgtgaacagtcaatatcagcagggacattaggaagaagaaacccatgagacaactcaagatctctgttttgtccttcttctatacgaacaagtcttgacccaggagctcctttgcaataaagaagccgaacatcagatgtaacatcgaaaccacgacccaaagcttggatcgcattacgaagcgtcgtggtcaaagcttcggagctaggtacgctaaagtttcctcctttacgattctccatttaagacgcaagcacaaaaaaaataaaacctttcgagactaaatcttgaaatcgatgattgatgattaacaattcatctagggtttgtgagttcctgggggaaagaagatggagtttttgagctttcgatcgattttttttagactctcaccaacaccattgctggttttgactctacaaaaatcgtagaaaccgcgtttgagattttattgtttttattgttttttttctttctgagtgatatcaagaagattcttaggttgactggtctttattttcttttggttactaattacatagatcctttcttcatttccagacagacaaatagtttgactttgtgtttttaatttcccttttttctagggttgccaatatcatcatgtctttgttcttgaatttgagcatatgctttctttttttaaggaatatacaacagtttctatcatgatttcaaatatttcttatacaaacgtatgtgtatattttcgtatgttgtagacttgtagtccttttttcgaccatattttagactactttttttctttagtgtttccaaaacactttgttactcattttttctataatcttaccacattatacatgttgtgtgttatgcatcttctttattgaaaaaagttgtgttgaagtttagtttgctctctgccatagaactagagtaaatagtgtgtgtttctctaccatagaactagagtaaatggttccaattggtaacagtgtataatactataaatatataatatttaaaagtaaaattaaatctcaaaataaagtataatctttatattaaatagatgtatagtaaatttatttatgggattggataaatttgagtacaaaattactaatatctacgtatactcaataaacaaataatacttttatcttaatgaatttcagaatgttttatttgataaaaaaaaagtattagaatattaaaagtatactcccaccatattttaatagttgatgtttaggagaaacatatgcttcaaattagaggatgtttttcaacttttaatataaaactgatcagtttttgttggttttgacgatttatattttatagattattttaaatttattttaaacatgactataacttgacttaatttttcttgtttaatttcatacttttataaagttttatgtacagtaacttttttcattctatagattttttttttttttttaaatataactagacttaacatgatttattttttcttgtttgatttctgctcatactttttaaaagtttcatgtataataacctttttcatgaaataaatttaaacatgccgtaaaaaaagaattaaatttcttttttgaatgacttaaaaaaaagtttaccatgaccagacttaacatgacatattgaatttgatttctgaaatttgtttcttagactttcttctttttttgaacaagaagatttttttttgacattatttgttacttattctctacttacttaaaatgaataaatagactcatcatcgtttcgcccaacatccaaaacccagtattgtataggccacgaaaaacagcgatctctgaatatagagtattcttcttgtttaaaagatgcaaatgattgttggttcgacaaatcggattacatgaaagcattatagataacagaacaaaattcaaactttgtcaaaactaataaaatgttggatggtgcgtatttggaacaggcttgtctatgaccaatggcagcatatgcatttgcctaaggtccaaatgctcaatttaaaaaattgtttatgataaaaggcacaaactgattttaaaacaacatattttacgttataaactagataaggccggcccaattcggagggtgtgagaaataaatataattttgtatcgataatctttatattctaaatagtattctatatttttcttaatatttaatttagtaattttgtttcaaatattgctatacactttaactatttatttgataatgataaactgcattttaattctacatgctccatacatcgaggccttagaggtgtttgaaaaaaaacagggatttcatccaaaagaatgataccgtggagcttgattacatggaaggttcgatcttcaaggcattgggggaagaaaccaaagacatgaatctcaagttcacatattggttgggttctattgaatacttttcgagaattactttgggatcaatattttcagcaaatctactcttcaatacgatagagcaaattgagttagacttgtatcacaagttatcactgcgccaggcaaaaaatggtttgtttcatcttagacaacctgaatctgacggctttgcttcttctgaattcaacccgaaccatccctgctagcataaaaacaagttcgggcagtgaatcagggaaattgaagaaatgaagcatataatcgaaacttcagagacaagaatccctctttccaaaaactaattttagaaaaattaagaaaatacgatatctaatcagttcaggttttaacttttaagttgcatgttaggctgtatttctttcatgattaacgaataattagtgaccttttcagaattgcaatgataatattccctttgaaaaattgcggttgatatagtatcattttttttggttttatatattattgtttttaattatcgctcttctatttttgaaaacgttactttcaagtgtggatttggttagatttgtaacttatttatggtttggaatgtttccattctagtttcttaataacattgtgaaagcgtattcaccaaaaaaaaaaaaaaattgtgaaagcgtattcaccaaaaaaaaaacattgtgaaagcgtcttctccttaagcgattaatttaaagaaatgtaaataaaggcaatactataatggacttatagtaaaatttactctacaaactgatcttttccttgtttctttggttagtgcaacccctttttaattagtaaaaccttcttttttttttgttgcttacctacatgtaatctactattccaatcgttttcattatcaattccatggctagagtatatataactacaatcttctgtattcaacttcacacgacaaacaaaactggtttgcaactggaacatgtcactaatttattattatgatacattaattattccaaccttaaatgaaataatctttaaatagatcaacatatacaaaatatccgtccttagtcatacctccaatatctctcctcttctccactattacatctcctctaaaaagtttcatttcacatgtgtatatttacatatgtgtatactctcatgtacagtttactttctaaatgtctgaagatggaaccaagatctctagcggtatacctgctataggctccaacacttgagcttctgggagctcttttaacaataattcctgcattcacaattcaaacatccaaaacattatatcaccattgatttggaatttgggatttattttctttttggttaagagaaagctgcaccttaaatgattcaatagttccttctttctttactaggcttgctaaaagtccctttgcttcaagctcgccattttgcatcggcacaacaaacctaaatgtccaagataaacctgattgataactacaaagtgcaagagtgtagatacattatcttgagactaaaacgaaaagacgatagatgattatttacttggctttcaagagtttggcaagctggacagcgtcttcttgaccagaaacaagagtaaatcgtgggagaagttgtttgatgaccggtgtgattacaatgtcggctctttcattcttcagaagttccatgttgcatacacaatgcggttcatagtagagagatatctgatcttcaggggatacaaggagatacctgagaacacaaaagaagcagaactgaaataaccatgaccaggttattaattatgtgttgcagaacaaatctacagagcaactggaagcttgataagagtttttttcttttacccgttttcagggcgttgccacggtggaccaaggacaggtccagctgtggctttaactcgaaccttagaaccgtttcttgcatttagctcaaagctatctccaggttccagataagtgacctatagtaatatttcagaaactcttatatataactctttctcattttacatttttttgaagatagtctgcaattctgatttagattaggaagtttgaaacaagtcacttacgttactaaaaagaggatctagcaaaggcttagcatttggggttgctataacctttatgcctggagatttctcggaaagtggcctaagggtattcaaatgacaatgatcatcaaggctttgagttatgagaaggcaatcaacttcagggagatcatcaagctgcacagaatatagaatcaaagaaacttataatgaaactgcactgcaaactagattcctgaatatactcgtaacctgatgatgattcatgcttctttacaaatacgaaccccacaaatgatgattagaatgaaagaaaaaaataaacaagtgttaccttgaaggccttcaaatatctcttggcagcatcataaagccatgggattccaaagtccaaattacccacaagaatcggatcaactaggattttcagtccagctgtttcccatagccagctattgccctaactcccacaaaaatggaagacatagtaatagtcaaataagatgcaacatttggaaatacaaatgctcaagtagtaaagattcacctccaagtaagtcagcttgaatgcatctgtcccagagccactaacgttagtagctctgtcctctgacaaaacagaagataccacagtgagagaccgggaaacattcggcgagaggcggatggagagggatctggaagggaggtgaggagtggacgagaatagtggaaatgctgatgcacttagtactcttgatttggtgttgatacttagaggaagagaattggcatgaagcggcatcatggctgctttgccacctgacaccactagagccattgattttgttttgccacctaaagaaatgttctcaacaaaatgagatttttcagccttattaatatgctatgatcagccttaggttagttatgtgtcttggcttgtaaatgagcttgcattttctctaaatctgaaacctaagcatctatctatgaatcaaaattagtcctagccttgggattatatacaacaagattctgaaattcttttctaattagcttacgaatatacaattagctttgaagaagacggtaatagcctaaattctccacctaagctaatttgcactaatcaacatcgaacccagaaattcatacaacatcatatgggatgagcaaattaacagaaaaatccaaaattaaaactttcaaacattgattcagtaacagtaaaaacccagaaaagtattaaatcagtagctcaactaatcaaaaacacacaacacaagaagaagaagaaagaacctgattttagagttgaagagagactgtttggtgagggtggtgagtgttttgtctgtccccaacacacaaataatcaggaaaaacaaaattggtggttaagagtgaatttcacgacttcagctacaaaacgctgcgtctaggaagattactggtctctctccccttgcccggacccggtttaccaaaccaataaatcaaaatcacggatatgctttttagggtttcgactcgattctgagattttttgcttgcaagattcgttgcttttgtgttctccgtcaccggagttttaccatcgtgaaatggtgcgattgtggtgtgggaagctcagactttggaaaccctatttagcgttagctacacagagtagaaacagctggttctgttcgggtggtggagctccctctcatcatcttcacatcctcaaaaagtatggcagctcagagatcacagagatgatcaatcggtataagcgaaacgtagccggacacacattgacgcagaattcaatggtaggtcagtacaaaacaacagtttctccaagtgttgctcaaaatgttactattgagacatttgattcgttatgtattcaagggaattggagagaagctgtagaggttttagattacttggagaataagggttatgctatggatttgattagacttttagggttagctaaactatgtggtaaaccagaagctttggaagcagctagagttgttcatgagtgtatcattgctctggtttctccttgtgatgttggcgctcgaaacgcgattatcgagatgtattctggttgttgttctgttgatgatgcgctcaaggtgttcgaagaaatgcctgagtggaattc

SEQ ID NO: 1150 - DNA, 35930 bp, Arabidopsis thaliana
aagcttccctaccttcgggagatgtaagtgctcttatacaagtaactcaaccttgctttaaactagctaggcaagttaaaagctgctaatttgatcaatggttcttgctatattttagagacttggcctacaactacatcaatgggaccttacctcgtgaatgggcttcttcaaatttaacttttatgtaagagtgttttcatgttatgttttagttttagtttctaaatgctcttgtacagtaacagaatgtctctgcagttctcttcttgtgaatcggttgtctggagaaattccgaaggagtttggaaactcttctctaacatacttgtaagttttgagcatcggtcaatcttttttgttctggaaatttgtttggtctttatttcaacggaaagttcatgtactaactatccatgagtttagctggtggaaatattacaactttctacctcttgaaacttgcactactaggtcccactattagcctttcctgagggtgaacccgttaaaattatcatgttgtatgctttagctgaaatttgaatacttcagtacacttctcttttggaaagctttagcattctctatgggactgctgttgtaatacttttgctgcttttgtatagggatctcgagtcaaatgcgttttctggaactattcctcaggagcttgggaacttagtccacttgaaaaaactgtgagagtttctgattccctgtccgttcttggtttcttttgttgtgacgatgttttagcgcgtggtgtgtttctgaaggatgagatctttctggtgggtcatttcttcttacaggttgctttcctctaacaaattgaccggaactttgccagcttcactagctagactacagaatatgacagatttgtaatcttttgttatatttccctttaacttaactacttattacggtggaatctgttgttcatctgcttcttggttttaaacaatgcagcaggattaacgatcttcaactcagtggaacgatacctagttacatacaaaattggaagcaactcgagagactgtaaaaatctatttattttataactcttttctgttttgttagcactcagtgatgatattctcttcataccttgtagtgaaatgattgcatctggtctcactggtccaatcccatcggtcatctcagttctgagcaatcttgttaatctgtgagtagacaccactcttttgacgtccattttttcttcataaacttaatttgttttcatttattgcaatggagatcacacttttattataatgccctattgttttcaggaggatcagtgatatacgtggaccagtccaaccattcccttcgttgaagaacgtgacaggtctaactaaaatgtaagttagttctgtcatatgtcttcgtgaagctgtttaatctatctctgattttatatgatttttgtttatttaatctttgtagtatattgaagaactgtaacatttctggacaaattcctacttatctttcacatttgaaggagttggagacactgtaagcatgtcttcctgacattttcatatagtctcagcgaactacattatagattattagttgatataccactaaagaattatgaactgaaagcaagttaaaggaggagtaggtttgtacatgaaacacaacatgactgattaatttttttattgtgttggtgaatagggatttgagttttaacaagttggttgggggaattccgtcgtttgcacaagcagaaaatttacggtttatgtaagtgaaaagattctactgtcatgtatgttaaaagttctatcttactttgacttaaatttattatttgactgttttcttttgcagaattttggctggaaatatgctcgagggagatgctccagatgaattactaagagatggaatcacagtgtatgtatatttctggagtttgcaaattgccttcaacattgctttttcagaaaactaggaatccaagttttttttgttgcagtacatcttcattttgatgtcagtttacttgttgatgcagagatctttcatataacaatctcaagtggcagagtcctgaaagtcgtgcttgtcgcccaaatatgtgaggatatcgtcatgttttcttcttttacggttttggtggacataattggcatttagctgacaatttatccgacttctcttgttttaggaatctgaatctaaacttgtttcagagcacttcgacaaaaaaatcgtaaggtcttttcttttgattatctttagcatctagaggctgtgtttgtatcttatgtatacaagctagaaagtgtacttcgaagaaattcggctgaaatgtttgtacttttcggaaaaataatattccacaattgatacggatatgcaattcccaattgatgtttttgtaggagcaaatttctgccgtgtatcaaagatttcaaatgtcctcgatgtaagtacacttatctacataacagtgatttatttgctaacaatcacataggactaataatgatagatcgtttcacaagagtctcgcatttgaaaattgaaaccaaccacctgctaaattgccttctactttagtcccacgtcaatattgttatttcctgtcttgttatcatcataacatagaaatgttgatgtgtaaagatcacttgattattctctctcaatttatgcaatttggtatatctggcagattctagctgcttgcatgtgaactgcggtggaagcgatatgtatgttaaggagaaaaaaacaaaagaattatatgaaggagatggaaatgttgaaggtggtgctgctaagtattttttgaagcctgacgctaattggggatttagcagcacaggggacttcatggacgataacaatttccaaaacactagattcaccatgtttgtcccggcatctaaccagtctgatctctacaaatcggcacgaattgctccagtatctctaacttacttccatgcctgcttggaaaatggaaattacactataaatctagacttcgctgagatacggttcaccaatgatgaaaactataaccggcttggaaggcgtctgtttgacatttacattcaggttagcgtttgccccgctggtgaaataaagcagctgtgaatgcaattagttttatttttcttaagcctcttttcttcaggagaaattagtggcaaaggactttaacatcatggatgaagcaaagggagctcaaacacctataatcaaaccacttactgcctatgtgacaaaccactttttaaccatccggttgagttgggccggtaaaggaactaccaggattcccactagaggggtttatggtcctatcatatcggctatttccatagtttcaggtagctttcttattcttgcagcagccaggtggatgtgtgcatctgattttgtatgcattttgaactcttttctcaccacagtattttttcttaatacttatatcttcaatgtacagattccaagccgtgcgaacgtccgaaaactggaatgagccctggagcatatattgcaattggaattggagcaccatgtcttattatctttatactgggatttctgtggatatgtggctgcctcccaagatgtggtcgacaacgaaaaggtgatcactgctctttttttgcagttctttttacttttgatattgagttgataatagatatacctgagtgctttttatgaagttggaagaaagtgtatttttcttgtttattgattcttagtttgtcccacagatccgtatgaagaagagttgccttctggaacttttacattgaggcaaatcaaattcgctacggatgacttcaatccaactaacaagattggagaaggtggtttcggtgctgtctttaaggtaaagattacgagatgaaataattctttatatacgaagaagttaaagttgtaatgcagttcatgctgacataaaatatcatttgcagggtgtgttagcagatggaagagttgtagcagttaagcaactctcatctaaatcgagacaagggaaccgagaatttctaaacgagataggcgcaatttcttgtcttcaacatccaaatctcgtcaagcttcatggtttctgcgtcgagcgggctcagctattactggcgtacgaatacatggaaaataacagtttatctagcgcgttattcagtgagttttttttcttatttcccaccttttgctaatgaaggctttttgatgcttcggctctaagtaaaatgtgtttttgttgcaatgtttaggtccaaagcataaacagataccaatggactggcctactaggtttaagatttgctgcgggatcgcaaagggtctcgcgtttctccatgaggaatcaccgttgaagtttgtacatagagacatcaaggccacaaatattttattggacaaggacttaactcccaagatatctgatttcggattggctaggcttgacgaagaggagaaaacacacatcagcaccaaagttgctgggactatgtgagccctgagcctgcctttttttttttctgttaatcgtattatttactattatgtttgtttgttcaccagaagaatcatttgaacttctctgcagaggatatatggcaccagaatacgcactgtggggctacctaactttcaaagcagatgtctacagcttcggtgttttggttctagaaatcgtcgccggcataaccaacagtaatttcatgggggcaggagattccgtttgcctcttagaatttgtaactataatctgatcccaagttgcaatttgcttatgaacttttaaaaccaaaaaacggttttcttgataaacctttttgtgatgtatctgcaggctaacgagtgcgtagaatcggggcacttgatgcaagtagtggatgagaggttgaggcctgaagtggatagaaaagaagcagaggcggttataaaagtggctctcgtgtgctcgagcgcttctccaacagatcgtcctttaatgtcagaggtcgttgctatgctagaaggtctatatccagtgccagaatcaacaccaggagtaagcaggaacgcaggggatataaggtttaaggcatttaaagatttaaggagaggcatggagaacaatagtaagacgcagtgttctgttaaaagctatccgtcttcttcttcgacttcttctggggcaggacaagcagttcaagaaagaaagaaagaagagtcaaggccttgaagaggttttgaatccttccctctcttttttttttttttgtaaaatgtctgtctttagtaaaatgtttatgagtttattctgtgattagtcatttactgtaattccccatatctgtatttaggttctgttagttggggattgaatgttgtgaaaactcaaaactcaaatgatatataatcagtgatctttcataggctggatttgtgaaatgatttgtgcacaaaaaaaaaaaatgtaatcttaaagaataagcttcctattgtcttaaaatagtctgcttcaaaggatgagttgacttaccaagaaaaggaccaaattgactcaagtccgtatagtactttagtacttgttgcataaaactataaactactttgtcagagaatcagtgaaactaaaatggaataatcttaattctaatctcaactagtttttggatccatgtgaaagtataagtcaactatcaagaaggttgattgataattgaataaaataaccaacaagttcaagtgttcaacataagaagtttcatgtaaaattcaatcaaaattattaatacaaaactgatcaacccctccaattttcatttgttgacaaaactagccacatccttcgaattgggactaaacatctaaaattagagttgtttatgaaaggtttttctgaaagtggtgacaataatgatgacttagaatcatgaattctcacaaggtttaacttttaagtatgctcttctagtagtagtactacaagtagaatgcaagctaaaagggtgaataagctcaatttcaaaggttctcctcatactgtaaacaaataaaaacagagaggttgcatgcactgtaacaaaagtgctacatttatccgggtttaacaagcaacagaccccatgtgtaaaactcttaatttaagcttagtcaaacttcatttcaagacacttcacatctttcacaattttctatatatatgattatctaactgtaataaagaagagttttagttattttctttagaaattagtactatatacgtagtgttttcaagtgatgtatagatcacttgcacataatcttcaatgtctgcagcttacaagctcatgatcatgtcgcgaagccgcctttttagctctctactctctgttcttactcttatctacttggtctgtacagtattatctgcttctccttctctgcacccagatgaaggtttagtggttttactgcattatatatttgccaaaacaaaatggcttgtctttatgaatttgagcttaactttattgtgtttctgattgtttgtcttttccagtggaagcgcttaaggatattgcattgacactcggtgtgaaacacttgaacctaagtgaagatccatgtctcacaaagactctggttataactcaagatgttctcaaggaaggacaaaacagcacaatcagatgtgactgtcatttcaacaacaacaatacttgtcatattacacacttgtaagaaactagccctttcttttactgtatatagtatatggttatcggctctatataagtaattttgcttcatgtgtagtgtccttaagacattcagtcttcctggtagacttccaccagaattttcgaagcttcggtatcttgaatttatgtgaggaagttctttttgtgttctgtttcctctgttttcaatgttgttgaggaaacattataaaaaagaactttttttggttgtttgtgtagtgacttgtgccgtaattatctttatggctcaattcctatggaatgggcttcactgccttacctaaaatctatgtaagtctttgttctcaagtttcttgtttgttaaggaagtaaaaaatgcttctgagttaacctgaaatgtatcctgcagctctgtttgcgcgaatcgcttaacaggagacattccaaagggattagggaagtttattaacctcactcaattgtatgtttctaccgttttattagttcatatgatgtgattatagataaagtttcatactcttgaaatttgaaactaagtttttttttgtctgtttgaatgatttcagaggtcttgaagccaatcagttctctggaactatcccaaaggaactagggaacttggttaatctagaaggattgtaagcaaaaatctgttaatcacgctttaaatcaaaactttaagtttataaattaggtgattctattggactatgtattttaatcttgtttttgttttgctgattctctctcagagcattttcttctaaccaactagttggaggtgtacccaagacattagcaagactaaagaagctgactaatctgtatgctcctctttcttttcattacaatatggccagttttttatatgtgttgttatgtataacacttcattcattctattgtttgcagacgattcagcgataatcgccttaatggatccatccctgagtttatagggaacttatcaaaacttcaaagattgtaagccaagaaattctgcattatagttttaatagcttgaagcattacaaagttttctgacttgtgcctatctttgatcagagaactttacgcgagtggcttaaaagaccctattccatactccatatttcgtctagagaatctgattgacctgtaactaatccatttctcaatacattgtaagttacagaagcatgttgctcttcttgaatctaaactgtagccatttctttaaacgcaggagaatcagcgacacagctgcaggattgggacaagttcctcttataactagcaagagcctgaaatttttgtatgtccatacatctaattatgtgtctggaccagagacaagatcctacgttttacataagtgtttaagactcaagattgattctgttaactttccagggttctaagaaacatgaacttaacaggaccaatcccaaccagtctttgggatcttcccaatctcatgactctgtaagtttcatgtatatatgtttatatcactcttcataatgcaaaaaaccaccatcaattattttgactatgatgctttttattttccgggcagcgatctttctttcaatagactgacaggagaagtaccagcagatgcaagcgcgccaaaatatacgtatgtgcaatcgtgttgaaagatgagagcattttgtaatatgaaaaagttttgaattcatttcctggtttcatctttttcagatatttggcaggaaacatgttgtcaggaaaagttgagtcaggacctttccttactgcaagcaccaatatgtatagccaataataacttctctaatactcaaatatgtcaaaaatatttcaatctaatctctattttttcttgcattggataaacatatctgcagtgatctctcttataataacttcacatggtctcaaagctgcaaagagaggaagtatgttcttctattcttttcttaagtacttattttaagactttctgaaagcttaaaatatgtattttttgatgcagtaatataaacacatatgcgagctcgcgttcaacaaacagtctgtaagaacatttttgacaatcttatcaatcacaggtcattgtgtatactgttattaactcattgttcttgatacagaaccagacttcttccgtgttctgccataaacctatgccaaaattgtaaggttttgtttagttgtctcttgttttgccaaatgttcagtttcaagtttttggatatgatcttgaaagaaattcattttttgcagataataggtcgttgcatataaactgtgggggacctgatgtaaccatcgaaaactctagaggaaggtttctatatgagggtgataactatggacttaccggatcagctacgaactattatgggaaaaattggggattcagcaatactggtgactttatggatgatgcaataacagaagatacatacacagtttcatcagaatctgcagtttcagccaaatatccagacctttaccagaatgctcggcgttctcccctgagtttggcttactttgccatctgttttgaaaatggaagctacaatgtgaaactccattttgcagagattcagttctcagatgaggaacctttttctagactagcaaaacgggtttttaacatttacgttcaggtacatatagccttttggtgcagattccttaagacccctttttcagcgtttgtagttgattttttgaagtttgaactttgttatctctttaggggaagttgatttgggaggattttagcatcagggaggaggctaatggaactcacaaagaagttataaaagaagtgaacacaaccgtgactgataacactttagagatacggttgtactgggcggggaaaggcacgacgatcattcctaaaagagggaactatggctctcttatctctgcaatctcagtctgtcccagtaagtaaaatctctgtaaaagaaaacattaagtttcactcagaatcctaattcttttgttgttcttgttttatcaggttcagaatctgaatgtggcggtaagaggaagaattgtctagtcgtttgaatcctcaatttgtctaccttttatatctgaaaatgaatcactccttttcactttctgcttctgtcaattttcagttccggtgcaaattcatccagtcacaaaacaacaacacaaacaaagaaaatatcatctcattctcggcatagcagccttaatagtctctctttctttcttgatattgggcgctttatattggagaatatgcgttagcaatgcagatggagagaaaagaggtaacatcggttaaactttttttgtcggtgtttttggtaaatgaaagctcaaagagatatctatctgataacaggttccttcagtttgaggcaactaaaagttgcaacagatgattttaatccgttaaacaagattggagaaggcggcttcggatctgtttataaggtacaaaagagtctcaagctctagaaaaatcaatgttagtattcttaaaaacaggtaacgttaaaaccaaaactcaacaatgcaggggcgcttaccaaatggaacgttgattgcggtcaagaagctatcttccaaatcatgtcaaggcaataaagagtttataaacgagatcggtataatcgcttgtctgcagcacccgaatcttgtgaagctttatggatgctgtgttgagaaaacccagctgcttcttgtctatgagtacttggagaacaattgtcttgccgatgcattatttggtaaagttctgcttcttcttcacctctgtagatgatcatattgatctgatagagaccaaatccttttactgcagtctcttctatctttgagatgattgtttgcttataactgttgggtgcaggaagaagcggtctgaaactagactggagaacaagacacaaaatatgcttgggaatagcaagagggcttgcctttcttcatgaagattcagcggttaagatcattcacagagacatcaaaggaacaaatatactgctagacaaggatctgaactcaaagatatcagatttcggattggccaggctacacgaagacgatcagagtcacattaccaccagagttgcaggaacaatgtcagtcttacagtcagtcatatacacataatccatacttatgataataatgtctcagtgacagttaatgttgttatggttgcagaggatatatggctcctgaatatgcaatgaggggtcacctaacagaaaaggcagatgtttacagcttcggtgtagtagcaatggagatcgttagcggaaagagcaacgcaaattacacgccagataacgaatgttgcgttggccttctcgattgggtacactaaaaccaatccttttacactcacaagaactcagtttttctctcaactgggtacttataaaggttcttgattttcaaattccaggcatttgtactacaaaagaaaggagcatttgatgagattctggatccgaagcttgaaggagtgtttgatgtgatggaggcagagagaatgataaaggtttcacttttatgctccagcaagtctccaacattacgaccaactatgtcagaagttgtgaagatgcttgaaggagagactgagatagaagagatcatatcagaccctggagcgtacggtgatgaattgaggtttaagaaaacggcggagatagggtcatcgtctttaccttccgattatcttgtgtcgattacttcgtcctgtgaatctgcttacgatttgtacccacttagtcccgagtccgttgttttctctagaccctagatcccattgttaacgacctttacataacaatctctgttacatttttttcacaaatttcattgtcaaagactgaaacttttggtttataagaagaagaaaataacgctttgtagtcattgaccaaaaatcgttaaattggggtatgaaattagggttctttcgttcgcgccgtgggtgtactcgtaagccagctatgtcgacgttatcaccctctccgccggaaagaacatcacgatgatacttcccggtggctccgtcctgagctcgacaatggcgcctacattgcagcacttcttcttccccaacgtgatgactttgaggtctgtgattctgttattttttggctttcaagtatcatcagtggacaaagagaaattcgtcaaattgcagatattaagaattctgatgattgaaatgcagtaggccatagctttttgtctggtagagattgtaacttggtaagcttgaagctgcattttgcgttgacatctatgaagaaagaacacacacagataacgagattaaaactgcataattagactagagctgtagagtgtcatcacttcgtgaattatggtggtcacatctctgttattgatcgggtcatttgctagcttataccgtgcatcaaagctttttcttttgcttagaatctatcatgaactgttgaggacactctttgcagtgattagttttaaatcaggtaacaaagtcttgccttttttctagctacaatgacttcttcatgaaatgttagtcaaatcaagttaaatgttctggttaacacaatttgcaactgaggtatcaaatgccatgttatacaactactaatgtgacatctttggtgtctttaattttttacatcatacttcctcttttagtcttgtatctgtttctctgtgcactggaagactttttattggctgagcatatgtctctagattgtggttttgacgatgattcgggaagaaaccattcccaaaacgtgtgtaatgaagttataagcatgaagtctctagagacaatatgatagggacagcttgatttcttgccctgtaaacgttttacaccattggtaagatgattttcggtgtgcatgatattttggataacaagtatgtcattgtagatttcatggtagtctgatctaaaaatgatgtcttatttgataaggagctagggatagggaattcttgcgtatgagagagtctgagatatatttggttatttggatctctctctctggcagttgcagagcttctgactttattggcctttaacagaggacattcaataagattaatatgagtaaaccaaattttatacccactagctttatagatccaagggaaagtagaagtcaactctcaagaagactgaataaaatatgcaactagtcgaagtcttgtttcatgtactcaaccaaagttatgcatagaaattgtcaatccctccaatttttttatctattaacaaaacaagccatgatcttcaaattatgtgactcaagatctaaaattagaattgtttaggctatattctgttgaaagtgttagcaataatgcttttggaaccataaactcctactgctttttagccttttaggtgttcttctagtagttctgcaagtaaaatggaggcgaaaggctgaagagaattttctaatatttctgctcatattgtaaataaatccagatgagaggctggattgtaattatcccctgaatttggcaagctgcctaatacaagcaatgactaaccccatgtgcttactcttaacctcaacttaggcaaactgcatttcactttttcacaattttctatatatatatatatatgtgcattcgtattgtttcagttatatattatttatgtattgttttaagtcatagatagatcacttgaacacaatcttccatgtctgcagcttacaatctcatgattaagtcgaaaagttgcctttttagctcttctattctctttgttgttacacttatctacttattatgtactgtatctgcttctccttctctgcacccagatgaaggtttagtagtttcaatgcattatatcatatatacatgtgcctctctttgtgaatttgaactaaacttgattttgtttctggtttgctgtcttcgccagtggaagcgctgaaggatatcactgaaacattgggtgtgaagcacttgaacctaagtgaagatccatgtctcacaaagactctagtgatatctcaaggtgttctcaaggaaggacagaacagcacaatcagatgtgactgtcatttcaataactacagcacttgtcatatcaaacacttgtaagaaaaaccattctgaaaaagaagaaactaaccgtttttctgcttatttctcttgtttctgaccaattactatgtacctcatatctagtgtcctccagaaattcaatcttccaggtagacttcctccaatgctgtacaagtttcggcatcttgaatcgatgtgaggagggttttcagtgtttcaactactttcaatatctactgctatcgtagaagaaacataacaatggctggaattcttttgcttgtttttgtagtgacttatacaataattacctttatggctcaattcctatggaatgggcctcactgccttacctcaaatctatgtaagtctttgttctcaagtttgtttattgctaggaaagtaagaaaaggttctgaagttacctgatatatttctccgcagctctgtctgtgcaaaccgcttatcaggagacattcccaaaggattggggaagtttattaacctcacccttttgtatgttcttaacattattttgttgatcttatgagattacatataaagctttttgtcctttttgaaaactaaatctttcgtctttttgtttgattgcagagttcttgaagccaatcagttttcgggaactattcctaaggaactagggaacctagtgaatctacaaggactgtacgtaagacccttttaaaaatcacttttgaagagatcgaaacaaatttatgacccagtgattttctcaaacatgatccatttaattttgttttgctgattccagaggactctcttccaaccaacttgtcggaggcctccccaagacattagcaaaactaacaaagctaactaatctgtaagatcatctttctcatctggattactaacaaaatatcagctttagaatgtgttcatcatgctgaattgtttttcattatattgtttacagccatttaagtgataatcgcctgaacggatcgattccagagtttattgggaagttaccaaaacttcaaagattgtgagtaaagtatctttatttttcattacacttaaatagttagtatttgtacatttcaatgttttctgacttgtgctgataacgttgtatcagagaactctatgcgagtggccttagaggacctattccagactccatttttcatctggagaatttgatcgacgtgtaagttttttatcctctttagatatttgttgaagcaataattttgtaagttgcagaagcctatgttcttttttgaaacgaaattgtggccttttctttctatgcaggagaatcagtgacacggttgcaggattgggacatgttcctcagataactagcacgagcctgaaatatttgtatgtaatagtacatttttatgtctcaggtccagatacgatcatatggtcaattacttgtgtttagactttagactgatgttgatcattttcagggttttgagaaacataaacttatctggaccaattccaaccagtatctgggatctgcccagtttaatgactctgtaagtctcatgttttatcaccacgcatcttgctaaacactgtccagtctcttataagttataacgcctttttttttgacagggatctttcctttaataggctgactggagaaataccagcatatgcaactgccccaaaatacacgtaagtcttaaagtgtcagatgatcaaaaggattaggtatgctattaaaatttactatagctgttgaactcatctcctggtttcatttttcagatatttagctggaaacatgttgtctggaaaggttgaaacaggagctttccttactgcaagcacaaatatgtatgaccattcttattttatagcagtcatatatgtcaagtcatttctcggtattacactaatctctccttttaccaatattcatatgtgcagtgatctttcctataataatttcacgtggtctccaatgtgcaaagagaggaagtatgttttttctgttgttaactaccgcctttcatctgcttaaattttctggatacttttaacataagtttccatgcaggaatataaacacatatgagagctcacactcaaaaaaccgtctgtaagagcattttgtcaatcttattaatcacttgctacttcgtgtactgttattaactcattgttctgtatacagaaccagacttcttccatgttccgccataaagcaatgccaaaattgtaggttcttttgctttttattgatttccaaataccctttttcgagtttctgcatatgaactggaaattgtttactttccacagatagtagatcgctgcatataaactgtgggggacctgatgtaaccatcgaaaactctcgaggaaggtttctgtatgaaggtgataactatggacttaccggatcagctacgaactattataggaaaaattggggatacagcaatactggtgactttatggatgatgcaataacagaagatacatacacagtttcatcagaatctgcagtttcagcaaaatatccagacctttaccagaatgctcggcgctctcccctcagtttggcttactatgcattttgcttcgaaaatggaagctacaatgtgaaactccattttgcagagattcagttctcagatgtggaaccatacactaaactagcgaaacgggtttttaacatttacattcaggtacatatagccttttgccgcagattctttaagaaccccttttcaggggttttagccgattcttgaagtttgaaatttaatatatgttcaggggaagttgatttgggaggatttcagcattagagaggaggctaatggaactcacaaagaagttataagagaagtaaacacgaccgtgactgataacactttagagatacggctttactgggcagggaaaggcacaatgatcattcctcaaagagggtactatggctctcttatctctgcagtctcagtttgtcccagtaagtaaaattctgtggaggtaaacatgaagtttccctcagaaatttttatcctaattgtttacttgtttttgttttaccaggttcagaatctgaatgcggtggtatgaagaagaaaatctcaagtctttgagtccttttgttcctgctaaatcttgaatatggattaatctttttctctttgttttcttttgtccgccttcagttccagtgcaatttcttccggtaaaaaaagatcataaaccaacaaaatatcctctaattcttggcttaacactctctcttgctttcttgctcctggccgcattctgttggagaaagtgtgttagcaatgcaaatgcagcagaacgaggtattgaattcgctacttaaaaaccatgtaaagttctgtttttttttttgaaaataaagagcttaagggacctgatctaagaacaggttccttcagtttgaggcaactaaaagtcgcgaccaacgattttgatcccttaaacaagattggagaaggcggctttggatctgtttataaggtacaaaggagtcttcaagctctagaaatcaatgttagtgttcttaaaaacaggtgacggtaaagccaaaaatttgacaatacaggggcgattaccagatggaacattgattgcggtaaagaagctatcttccaaatcacatcaaggtaacaaagagtttgtaaacgagatcggtatgatcgcttgcctgcagcacccgaaccttgtgaagctttatggatgctgtgttgagaaaaaccagctgcttcttgtctatgagtacttggagaacaattgtctttctgatgcattatttggtaaatttatctgatagatgattggaccaaatcctttgactgcattctcttctgtcttgagattgaatatttgcttgtaaactgtgggagcaggaagaagctgtctcaaactagaatggggaacaagacacaaaatatgcttgggaatcgcgagagggcttgctttcctccatgaagattcagcagttaagatcattcaccgagacattaaagggacaaatgttctacttgacaaggatctgaactcaaagatatcagatttcgggttggccaggctccatgaagacaatcagagtcacattaccaccagagttgcaggaacaatgttagtagtatattcagtcgtacagatgagttcagcataagatgatgtttcaatagcagttattgttatttttgttgcagaggatatatggctcctgaatatgcaatgaggggtcacctaacagaaaaggcagatgtttacagcttcggtgtggtggcaatggagattgttagcggaaagagcaacgcgaaatacacgccagatgacgaatgttgtgttggccttctcgattgggtactgattcagtctttttctccacaagaattctgctttctctcaaataaaaaggttcttagttttcaatttcaggcatttgtgttgcaaaagaaaggggatatcgcggaaattctggatccgaggctggaaggaatgttcgatgtgatggaggcagagagaatgataaaggtttcacttttatgcgccaacaagtcttcgacattacggccaaacatgtcgcaagttgtgaagatgcttgaaggggagactgagatagaacagatcatatcagaccctggagtgtatagtgataacttgcacttcaagccatcgtctttgtcgtctgattatatcttgtcgattccttcatcatctgaatctgcttatgatctgtacccactcagccccgagtccattgtctttactatacagtagcctgaaccctctgattatctctacgctagggttgttgttgtaggctacttcgggctcgagaaaagattgtaattagggctaatatcgctagttgtacttggaaaagaatttattttgttttagaagaaaaaatcatacttaaattgaaattcgttataaaattaaaactatagagaaaattccaaaatgaaatccaaaaggtccttgtcctagcgtttagccgtttactttgactcttcatccaagaaagtaaagacatggctttatatgctttcatttttagtacaaatacgagtggtcagtggtgtgtgtaatctataacgagtggtcaatggtgtgtgtaatctataacgagtgggcagtggtgtgtgtaatcgatgtatattgtctgtgtgattggccgtacggattggccgtagtttagtcaccaagtgttggctttctattagtattaatttgctgataacatggtaaatattttgatttttaaaacatgcacaagagcattttaaagaagtcatacatcataaggttctatacgcgctttgatatatataaataagaacaaagcatagcattttgaggaaattatcccaaggttttatagtatgatgaataacattcaattggagaagttagatgcaagaattgttcaacttcctccacagagtgttaattagttgaggttctaaaattaatcaaccaatacataaggagacatgaaacatcaagcattcattaacctctctattcaccactattaacgtcgacattaatgtttattttggtgaattggtcaatatatacctatactctctactcaccgacaacctaagaaaaccctataaatttgcttgttggtgatgactttgtgatctgccaaacaaattaaatacacatatatacaaagaatcactaaatataccttatatatacatatgtcaatcatcctctggagttttttcctgttctttaccattatcttaagttccctcacaaatataacaacattggcttctttttcatctcttcacgcagatgaatgtatcatttctaaaaattttataaatcataatcagaatccgtatatattttatatacttattttcaatatgtttttttgctatattaatgcagtgaatgcactaaaggagatagctactacacttggtataaagagattgaacctaagggatgaagatccttgcagttcaaaaactctaaagatcatacaagaagttgattttgttccgaatctagatatcaacaacaccattggttgtgattgtagcttcaacaacaacacgatatgtcgtattacagaactgtgagtgttagtttttttgtcttctcttcgtttaatccttttactttctcttcttttctaataatgttttgcattattatatataaatacagagctctcaagaccatgagtcttcgagggaaacttccacctgaattgaccaagcttccatatctcaaatcgatgtaagttctgaattatataattagttggatgtgtgtttttttcaatttgcaagacatggttatacaataagaagacatataggtctattatgctagtatggtcatatgttcgtttggcagccagtggaatggaaaaatattggttagtaatttgctcttctttgcagcgaattatgccggaactacctctcaggaacaattccaatggagtgggctaaaatggcatacctcactagcatgttagctttctctcttctctctttccaataatgttcattgtcatgatttgggagtaacgtacgaaatttttcttgcagctcggtctgcgcgaataatttgtctggaaacttaccagctggattacaaaacttcaagaatctgacattcctgtacgtctcaagttgttttgtataccggtatatatgttcgttttgatctgacctaatattacagtaatgtgacgaaattttcagaggagttgaaggcaaccagttctctggtcccattcctgatgagcttggtaacttgaccagtctaacaggactgtaagacccttttattgcattttaaccattgttcaaattaaacctcaattatcttctttgattttgtggaaggaatccagttttgatattttgtgaaactggattttgtagggaacttgcgtctaataaatttacaggaatccttcccggcactcttgctagactggtaaaccttgaaagagtgtaagttgttaactctacttagctatgaaagttttcaaataatgatctaaaaactagaagttatctaaaaggttttcaaataatgatcatatacatgtttttgcagggaacttgcgtctaataaaattgtagcagctaggtgtttgttttattggcagagatattgaactgaactagtagtttgttttcataatgcagaaggatatgtgacaataactttactggtatcatcccagcatatattggcaactggactcggcttcaaaagctgtaagcttctccttcttcactaacgataatttatcttatagtttatttctttgtgtgttctaacctgtgttgtgttttgatcaacagacatctttatgcaagtggactgacaggacctatccctgatgcagtggtccgcctagaaaatcttcttgaattgtaatgaactatattcaatagattagcaaaaggatcattgaattgaaactgatgttctaagcattatagatatatgtatgcaggagtcttagtgatacgactgggataaaatcctttccgaatttatctagcaaaggcctcaaacgcctgtatgtatatttcccactgaagctttatgtttctcttcgtgatgcttgatactaactgacaatgtcaaactattgtctctgttcctgcctgttccaggattttgaggaatgtgggtttgtctggtccaattccttcttacatctggaatttgacagacctaaagattctgtaagtgttttaatcatatttactacgactctgtagacatatcaaaactagcttgttctgtatcgtctacattttagtcatttaattacctactgtactatacggttctatgcttaaagttactcaattatatgtagataatcatcgtctcatgcatgggaaagaaaacaaatgtagagaaaataacctgttgtaagaatgatttgcaagtatgagagaatctgtttataaacttttgcagattctatagaagcaaatttatacagtatttacacaattacgtttctatcaaaagaaattcatttattttttcgcattgttttctgcagtgatttgtcatttaacaaattgaatggtatagttcaaggagttcaaaacccaccaaagaatatgtaagtactacaataatcttttaatgtgaactctacatatatatatactctgtataatttgccattcgacatgttcttacagttatttgactggcaatttgctttctggaaacattgaatctggtggtttactcaacagccaatcttatatgtatgtttcagcccttcacaagtttgtatggtttgtgaagtttgctgccatgtcaactaatcttcttgtcggttttctgtattttggcgaatcttcacagtgatctctcttataacaatttttcatggtcgtctagctgtcaaaagggcaggtatgagcataaaaccttggtaggtaggatacgttttctctctatttgcttatgttctcactttctgttgaatcagtaccattaacacataccagagctcatattcgaagaacaatttgtaagtacacactcttgccttatgttgcaacaagaacagactaaataattagcattctcttgcttccgtatattgtaatagatgctatgaccgtcttgttatacagaactgggcttcctccatgcgctgtgccagccaactgcaagaaatgtaagtacatattgagccgttctaacgtatctctaacatgcattagatattttgacgtactcacatttgttcatcctttttttcttaaaaattaataatttcacgtctactttttctactgatggtgatgaattgtagatcagcgatttctacatataaactgtggtggagaagaagtatctattagaaactccttgggtaaaataacgtatcaaactgataacagtcgtcaaaccaacgctgcatcaaatcagcagttcgattattggggagtcagtaacacaggtgactttaccgatgataatagtgatcatgatgagtactacacgtcaactaatttaaccctgtctggagactatcctgatctttataagactgcacgtcgatctgctctatctcttgtttattatgcattctgcttggaaaatggaaactacaatgtgaaactacattttatggagattcagttttctgacaaagaagtatacagccgtcttggcagacgcatatttgatgtctatgttcaggtggttaagcatcacttactacttagtaattgtttctttgattataagttgcatggaagattgacgttcatttgctattcgtcatttctcctgccctgttagggaaaattattcttgagggattttaacatcaacaaggaggctaatggaaatatgaagcctgttattaaagaaataaacgcgactgtgaccaatcatatgttggagattcggttgtattgggcggggaaagggacaaccctcattcctaaaagaggaaattatggtcctcttatctctgctatctccttgtgtcacagtaagtagtacccttaaactctaatttttcttaactatctcaagtctctgcttcaacaaaccttattcatcgtatggctttcatgactttcttaacatcgatttgttttactcataaatggccataacggtcagattattactttttcgtatatccgttgcctttttgtgcttacccttcatcatattgacactcgttcctgctacttaatgataacattcatctttcaaaatttcaggtcaggagccactatgtggaggtacatagattaagaaaattacttcatcgaaaatgatatttctgtacgtacgtagcttgtttcatgtatgatgtaaatgtatatatatattttcacttttagtgtctcatttgtagtggagaaaacaaaacatcacattaagtatcccctaattttgggggcttcgggtgccttggtaacaattgttctattggctgtgggaatatatgctcggggaatatacagaagagacaataataggagagaacgaggtatcatagttcagtgtatgaatccatttctggtacatgaacattctttttaatgattttctcttgtgaacctgatcacatagatttgagagcccagggtctacaaactgtttgcttttcttggaggcaactgcaaacagcaacaaacaattttgatcaggccaacaaacttggagaaggaggcttcggatccgtattcaaagtatgctatataccaacttcttctcaaacgaaatatggcttaagggtttattgatatgagaaacttaatgcagggagagctgtcggatggaactatcatagcagtcaagcagctttcttccaagtcaagtcaaggaaaccgcgagtttgtgaatgagataggcatgatttcaggtctgaaccatcctaaccttgtcaagctttatggatgctgtgtcgagagagatcaattgctgctcgtgtatgagtacatggaaaataactcccttgctcttgctttgtttggtaaattaatgtcattcagctttcccttacgttttcagtccaattcaagtgtaaatatatgttattccattcaacgtgatatcttttctatttggtttacatccattggcaggacaaaactccttgaaattggactgggcagcaagacaaaaaatatgtgttggaatcgcaagagggcttgaattcctccacgatggatcagcgatgagaatggttcaccgtgacataaaaaccactaatgtgcttctagacaccgaccttaatgcaaaaatatctgactttggattagctaggcttcatgaagcagaacacactcacattagcaccaaggttgcaggaaccatgtaagtattgaacataagacaaaaaccacttcatggctgaagaaatatctcattcttggtttctttccaataatgatgcagcggatatatggctccagaatatgcattatggggtcaactgacagagaaagcagatgtgtacagcttcggagttgtggcaatggaaattgttagtggaaagagtaataccaaacagcagggaaatgctgatagcgtctcgcttatcaattgggtaaccatggagcttttctttctctttagttgattttatgtgtaatctgtttccataagtttactgaaaccagtttttacatcaaatctcaggcgctgacgctgcaacagacaggggacatactggagattgtagatcgaatgcttgagggtgagttcaatagaagtgaagccgtgaggatgatcaaagttgctctcgtttgcacaaactcatctccttccttaaggccaacaatgtcagaggctgtgaagatgctagagggagagatcgaaataacacaggttatgtcagatcctggtatatatgggcacgactggagcatctcaaagctgagggacattgatacgcatagtagctcgagcacgtctggtgtgaccgatcagacgacaacaacaatgaaatcctctgtttctggttgtgatctctatccgttataccctgaatccatgatcttaaactccacagtagagaattcttcctcgtcactgtaatatcaaaagctatgatacattgcctacttaatgagaggctagtgaggttatccgaaagttaactacgtagttatatcattaaagttgtctggaaccttaccatcatctcaatttacatacatccaaaacacacatgtatcgctagtgctttttgaatcaaactatctttttctcactacgattgaactcatacacatcgatttacttgggagacatcaaatggacatgaaagcgtaattcaatgatgtagaaacacatgtattttctaagtttagatactctttatcacaaaatcttaaaggagagactgagatggaacagatcatatcagaccctggagtgtacagtgataacttgcgcttcaagccatcttctttgtcatctgattatatcgtgacgattccttcatcctctgaatctgcttatgatctgtacccactcagtcccgagtccattgtctttactatacagtagtagtgtgaaacttccgatcatctctacactagggttttcgttgtgggctacattgtgctcgatagaagtgtgaacttagggctcacaacattctctcgtggaaatggtcgtagaatatatagaccatttcattttctaatattaaattggactttacaccatttcatattttattgcaaaaaagtcttaagaagctctccatgtgttattgaattgcactttacaacaacagcttttgtcatgcttttattgtcttgcgtttacttagaaaactagagtcttcgagactgagacgttcagctttttttgcttcttcttttttttttcttctttttgtcgtcgttcatattcacacgctggattcaaacccgaatgacacgccgagaacactatttcaaatccattaaacataagtggtcctttatcattaattttgcagatttattgtcatcagttagaccaacttaatatccaataggcaatagttaccgtcacttcaacgtcgtacaataatgcatgtcttaagaggcaggcatttttgttcaaaaacatctcaaaatgtcattttgttatatgaacaagttggaatatatatatgaacaaaataaactttggaaagaggctaacatgaaatttggaatatatatatatatttattgtgttcacattttttgtagtgatttatcatttaatatgctgactggtgaagttcaaagagtacaaagacaacaagaaatacgtaagtactactagtcgagataataatattaaagagctagagctcttgcaatgtgaatcctgcagtcttatgatcaagtactatatcgttttgacatgttctttcagctatttgacgggaaataggctttcaggacacgttgaatctggtgtttttctcaatagccaatctaatatgtacgtttaggctttcccttgtctatattattgatatatttttggtcatctcaactaatctatctgatggttttctatttggccaacccttcacagtgacatctcttacaacaatttctcatggacgtctagctgccaagaaaagaggtgtgaacatgaatccttgatacacaagctactcatattgaagtttcagttttcactttctgctgaatcagtaatattaacacataccggagctcatatttgaagacaaatttgtaagtacactcttctgctttttattttggaacaatcaagaaccaagaacatatataacttcaaatatggcaatggaaatggtttaaatttgttgagatgatgaagtgcataactattttggtagtcttgttatacagaagtgggcttcttccatgcgctggtccaataagatgcactagttgtaagtacataatgagataatctaacttattactgatctctgcttagtcagttaagtctcattttgttgatggttataatcattatggattgtagatcagcgatttctacatataaattgtggtggatacaacatagttatcacaaactcttcttataaaactacttatcaacctgataactacaaattcaacgcggcaacaaatcagcgttacggaaactggggaatcagtaacactggtgtattcacggattatcttagtgaggaggagcagttcatcttttcaactagtttaactctacctgtaaatgctcctgatatttataagactgcgcgtcgatctgctctctctttagcttattatgcgttttgcttggaaaatggaccttacaatgtgaaactccatttcatggagattcagttttctgaccaagaactatacagccgtctcggcagacgcatatttgatgtctatgttcaggtaaagcgtcactatatactaaatgttttttaacaagcataatagatttgttcatttgctttgtaaatttttcttctctgttagggagaattgttcttgagagattttaacatcaaagaagaggctaatgggacactaaagcctcttgtgagagaaataaaagctgttaatgtgagtgatcatacgttagagattcgtttttattgggcggggaaagggacaactctcattcccaaaagaggaaattatggtcctcttatctctgcaatctctttgtgtcacagtaagtacttatgactatctcaggtctctgcatttgtaaccctcactctttatcgtatttctctcttcacatttgagttaatcataacttcaaattatcactgaacgctaatattcatctttttcataatgtcaggtttggagccacgatgtggaggtcgttttgaactagtttgttaaagatgtttttctgaagcttggtgtttatatatacttacacttttagtgtctcattttcagcggagaaaacgaaacgtcacactaattattcactcattttcgggttaacgggtgccttggtaacaattattctcttggcgttgggattttatgctcagaaaagatgcagaggagacaggaacatgagagaaagaggtatcagagttcagagactatatatgaatccattcctcatatatctcatagcattattaatgattttcccttgagaacatagatttgagagcccagggtctgcaaacggtttggtttacttggaagcgactccaagctgcaacaaacaattttgctcaaaccaacaaacttggagaaggaggttttggatccgtattcaaagtaatgctgaaagatgccaagttcttctcaaacgtagaaaataaggttgtttctgatatgagaaacttaatgcagggagagctattagaaggaactatcatagcagtcaagcagctttcttccaagtcaagtcaagtcaaggaaaccgcgagtttgtgaatgagataggcatgatatcaggtctgaatcatcctaaccttgtcaagctttatggatgctgtgtcgagaagaatcaattgctgctcgtgtatgagtacatggaaaataactcccttgctcttgtgctatctggtaatttaaaatcattcagattttctttacgttgcgagtctaaattcaaatgtggtacatgaaactgatatcatttgtcgttggttttacatccatcaccaggaaaaatccccctgaaactggactgggcagcaagacaaaaaatctgtgtgggaatctcaagaggacttgaattcctccacgaatgatcaatgatcaggatggttcatcgtgacataaaaaccactaatgtgcttctagacactgaccttaatgcaaagatatctgactttggattggctaggctccatgaagcagaacacactcacattagcactaaagtggcaggaaccagtaagtgttgagtataaaatgaaaactgcaccatggccgatgaatatatatagctcagtgtttgtttatcttatgctgcagcggatatatggctcccgaatatgcattatggggtcaactaacagagaaagcagacgtgtacagcttcagagttgtggcaatggaaattgttagtggaaagagtaatacgaaacagcagggaagtgctgaaaacgtctcgcttatcaattgagtaaccgtggagcttttatttctttaacccattcgattcactattgtagtttctataagtttccttgaacccttctttacattatacctcaggcgctgacactgcaacagaaaggggctttcaatagcaaagaagtagtgaggatgatcaaagttgctctcctttgcacaaactcatctccttctttaagaccaataatgtcagaggccgtgcaaatgcttgagggagagatcgaagtaacacaggatttttctgatcctgctatatatggacacaactggagcatcttaaagcggagggacattgaaacacatggaatctcaagcacgtctgatgtgaccgatcaaacaacaacgacaatgcgatcctccttctcgggttatgatctctacccgttataccctgaatccatgatcctaaactccacagtagagttttcttcctcgtcactgtaaaattaaaatcggtagacaatgccttgtctctcttatgagagaataaatgtatgtgaagttatcgaatagttatctaaaacacacacatcaatatgaaattttgttaaaattgaattatatcattttatggaagtctctagctctcacttgatcaaactatcttccttctctctttgttaagtgttggttgaacacttttccaaactcatttctctcaagtaacacgaaatagtaactcgatgatcatttaccaaaatctaaaaatttattgcatatacaaaggattggagtagaggaaaacaatcagttagctcaccaaagattgttgcaccggcagacgccatttttgaacaagtggtatatctttgcatctcgcttaatcatatctctgccagttatgactgacatcaacttcatcatatcatggcaatcgccaacaatgcgtatattagttaacagagtgattgcagatcgaggctttgacttaagaagactttcaacaactgcaatttcctctctgtaaccaaaaatctgttctttattctccatcgccatgattaaactacgataatacctagtgtcaggaacataacccatttctttcagttgtgacctcaaactcattagtgtctcgtaaatgatattcatttgtggatgtgaagaatctaccggtctaaaagtagaataaaaatatggttcagaccgagtgcttggttccttcttcacaaagtctgatgctttggttgctacaagacctgcacttgacactttgtctaatcttgtggcatctaacttctcaaccaactcagcacatctatctccaagctctacatctccatgaacccgagaaagattcattagtgtttcccacacgtcaacactcggttccatcggcattctctcaacaaagttcagtgcctcatccaagtgaccagatgttgccaacattttggtaacactatgatagtgttccattgaaggtacgattccatattctctgtacatagcttgaaattgcagagacccttccttaacatctcctgtcaaagtacatgtagaaaacacttggttgaatatctctccgtttggtttgttcccttcttctttaaaacgagtaaacaaatcaattgcttcttcaccatatccgttgttaacaaaacacctcatcataacacacaaagtccccgaattccactcaggcatttcttcgaacaccttgagcgcatcatcaacagaacaacaaccagaatacatctcgataatcgcgtttcgagcgccaacatcacaaggagaaaccagagcaatgatacactcatgaacaactctagctgcttccaaagcttctggtttaccacatagtttagctaaccctaaaagtctaatcaaatccatagcataacccttattctccaagtaatctaaaacctctacagcttctctccaattcccttgaatacataacgaatcaaatgtctcaatagtaacattttgagcaacacttggagaaactgttgttttgtactgacctaccattgaattctgcgtcaatgtgtgtccggctacgtttcgcttataccgattgatcatctctgtgatctctgagctgccatactttttgaggatgtgaagatgatgagagggagctccaccacccgaacagaaccagctgtttctactctgtgtagctaacgctaaatagggtttccaaagtctgagcttcccacaccacaatcgcaccatttcacgatggtaaaactccggtgacggagaacacaaaagcaacgaatcttgcaagcaaaaaatctcagaatcgagtcgaaaccctaaaaagcatatccgtgattttgatttattggtttggtaaaccgggtccgggcaaggggagagagaccagtaatcttcctagacgcagcgttttgtagctgaagtcgtgaaattcactcttaaccaccaattttgtttttcctgattatttgtgtgttggggacagacaaaacactcaccaccctcaccaaacagtctctcttcaactctaaaatcaggttctttcttcttcttcttgtgttgtgtgtttttgattagttgagctactgatttaatacttttctgggtttttactgttactgaatcaatgtttgaaagttttaattttggatttttctgttaatttgctcatcccatatgatgttgtatgaatttctgggttcgatgttgattagtgcaaattagcttaggtggagaatttaggctattaccgtcttcttcaaagctaattgtatattcgtaagctaattagaaaagaatttcagaatcttgttgtatataatcccaaggctaggactaattttgattcatagatagatgcttaggtttcagatttagagaaaatgcaagctcatttacaagccaagacacataactaacctaaggctgatcatagcatattaataaggctgaaaaatctcattttgttgagaacatttctttaggtggcaaaacaaaatcaatggctctagtggtgtcaggtggcaaagcagccatgatgccgcttcatgccaattctcttcctctaagtatcaacaccaaatcaagagtactaagtgcatcagcatttccactattctcgtccactcctcacctcccttccagatccctctccatccgcctctcgccgaatgtttcccggtctctcactgtggtatcttctgttttgtcagaggacagagctactaacgttagtggctctgggacagatgcattcaagctgacttacttggaggtgaatctttactacttgagcatttgtatttccaaatgttgcatcttatttgactattactatgtcttccatttttgtgggagttagggcaatagctggctatgggaaacagctggactgaaaatcctagttgatccgattcttgtgggtaatttggactttggaatcccatggctttatgatgctgccaagagatatttgaaggccttcaaggtaacacttgtttatttttttctttcattctaatcatcatttgtggggttcgtatttgtaaagaagcatgaatcatcatcaggttacgagtatattcaggaatctagtttgcagtgcagtttcattataagtttctttgattctatattctgtgcagcttgatgatctccctgaagttgattgccttctcataactcaaagccttgatgatcattgtcatttgaatacccttaggccactttccgagaaatctccaggcataaaggttatagcaaccccaaatgctaagcctttgctagatcctctttttagtaacgtaagtgacttgtttcaaacttcctaatctaaatcagaattgcagactatcttcaaaaaaatgtaaaatgagaaagagttatatataagagtttctgaaatattactataggtcacttatctggaacctggagatagctttgagctaaatgcaagaaacggttctaaggttcgagttaaagccacagctggacctgtccttggtccaccgtggcaacgccctgaaaacgggtaaaagaaaaaaactcttatcaagcttccagttgctctgtagatttgttctgcaacacataattaataacctggtcatggttatttcagttctgcttcttttgtgttctcaggtatctccttgtatcccctgaagatcagatatctctctactatgaaccgcattgtgtatgcaacatggaacttctgaagaatgaaagagccgacattgtaatcacaccggtcatcaaacaacttctcccacgatttactcttgtttctggtcaagaagacgctgtccagcttgccaaactcttgaaagccaagtaaataatcatctatcgtcttttcgttttagtctcaagataatgtatctacactcttgcactttgtagttatcaatcaggtttatcttggacatttaggtttgttgtgccgatgcaaaatggcgagcttgaagcaaagggacttttagcaagcctagtaaagaaagaaggaactattgaatcatttaaggtgcagctttctcttaaccaaaaagaaaataaatcccaaattccaaatcaatggtgatataatgttttggatgtttgaattgtgaatgcaggaattattgttaaaagagctcccagaagctcaagtgttggagcctatagcaggtataccgctagagatcttggttccatcttcagacatttagaaagtaaactgtacatgagagtatacacatatgtaaatatacacatgtgaaatgaaactttttagaggagatgtaatagtggagaagaggagagatattggaggtatgactaaggacggatattttgtatatgttgatctatttaaagattatttcatttaaggttggaataattaatgtatcataataataaattagtgacatgttccagttgcaaaccagttttgtttgtcgtgtgaagttgaatacagaagattgtagttatatatactctagccatggaattgataatgaaaacgattggaatagtagattacatgtaggtaagcaacaaaaaaaaaagaaggttttactaattaaaaaggggttgcactaaccaaagaaacaaggaaaagatcagtttgtagagtaaattttactataagtccattatagtattgcctttatttacatttctttaaattaatcgcttaaggagaagacgctttcacaatgttttttttttggtgaatacgctttcacaattttttttttttttttggtgaatacgctttcacaatgttattaagaaactagaatggaaacattccaaaccataaataagttacaaatctaaccaaatccacacttgaaagtaacgttttcaaaaatagaagagcgataattaaaaacaataatatataaaaccaaaaaaaatgatactatatcaaccgcaatttttcaaagggaatattatcattgcaattctgaaaaggtcactaattattcgttaatcatgaaagaaatacagcctaacatgcaacttaaaagttaaaacctgaactgattagatatcgtattttcttaatttttctaaaattagtttttggaaagagggattcttgtctctgaagtttcgattatatgcttcatttcttcaatttccctgattcactgcccgaacttgtttttatgctagcagggatggttcgggttgaattcagaagaagcaaagccgtcagattcaggttgtctaagatgaaacaaaccattttttgcctggcgcagtgataacttgtgatacaagtctaactcaatttgctctatcgtattgaagagtagatttgctgaaaatattgatcccaaagtaattctcgaaaagtattcaatagaacccaaccaatatgtgaacttgagattcatgtctttggtttcttcccccaatgccttgaagatcgaaccttccatgtaatcaagctccacggtatcattcttttggatgaaatccctgttttttttcaaacacctctaaggcctcgatgtatggagcatgtagaattaaaatgcagtttatcattatcaaataaatagttaaagtgtatagcaatatttgaaacaaaattactaaattaaatattaagaaaaatatagaatactatttagaatataaagattatcgatacaaaattatatttatttctcacaccctccgaattgggccggccttatctagtttataacgtaaaatatgttgttttaaaatcagtttgtgccttttatcataaacaattttttaaattgagcatttggaccttaggcaaatgcatatgctgccattggtcatagacaagcctgttccaaatacgcaccatccaacattttattagttttgacaaagtttgaattttgttctgttatctataatgctttcatgtaatccgatttgtcgaaccaacaatcatttgcatcttttaaacaagaagaatactctatattcagagatcgctgtttttcgtggcctatacaatactgggttttggatgttgggcgaaacgatgatgagt

SEQ ID NO: 1151 - DNA, 101091 bp, Arabidopsis thaliana
tatgtttggtcactcataggggcgaattcgatttacaccaaaaaagaagagagatttcgattgactcacataagccatgaatccgagatagtttgttgttacatgaagaaagcagtagagtttcgcgagtaacacgccgcttttcatggcttctcgtgaagctgtgttccagaaagacgacgacggagtcgccattgcctatttcttcaactgaatccaacgaatcgagatttgagaactacacaaagtctgcagatttcacgaaagtgtgaagctttgagacgaatcgttgagctatactgtgtaaaataaaatgtaatcataacccaatttataaacccggttatttaataacccagttaatttccatcagaaattgaattttggttacgtataggacccgttttatggtataagcgtgacttttcaaaatgatggcccttacattgttcagtagaaggaagaccaaatgtttaaaactatgtagaagcaaatacataatgataattgtagttcatagtcaaatgattacagtgaaagtaaaaccatacaaattaaaatctcaaatcaaatccacaagtacttgttcaaaccttgcttcttcatcgaagcagtaacacacaaaaagcaaaatacatagagagattcaaacataaaatagataccatcctgccaacaaaaggaagtgagtatagagggaggaaaataaagagaaaggtccagatagcgctagaccgatgatttacctcccgagaaacaatagtgatggaagaaccgaatatcggtagcattcaagattggtttgagaaatgtccaacgccaagtttctgagcttcgattttaagtgacttgagatactgaacagcttcatcaagaacgcaagctgtattcatctgttctcctccagggacaattctcctcaatactcccatcatcttcttcatctttttacgtcctttcccatcattgttactactactagcactgcccgataaactctgcttccttgagttgttgttgttgttgttgttgtaaccataactggaacaacaagattctgctgtggtgtttccataatccctggaagaagtacgagcagtgctgacttcttctgaatcaccaccatcctcttcaccttcattatcatcattctcttcataatcttcatctgcgctcaagagagcatcgatctcatttggatcttcttgataagaagaggatacttcttgctcatagttaccatagttaccataacttcccccaacatactcgttctgaaacgtcgaagctaaattgttcaacgaaggggtattcatgagcttatgagtcagctcaggatggtacatcacttggctgcggtcatatgtttgatcgaagatgacaaagttctttggacagaccgcagacggttgaagttcaacaccatggtatggcaactttgcacatggtgggaacaaagcatcataggatgaccctgatgcatacgggttgtgcatatttctgtcacccacttcatctgagaagtgaggaaactgattgttctgcatcagaaaacccgtgcaaacgtaaaaaaggaaacgcaaagagaaaaacaagttgtacacctcaaactgcaagctgcttgaatattttctactaccgatttgtcgcctttgtaagcttccagctgctcagttactactacactaagttgacacacggaaccaaatgctatatcaagttatggccatcatactaaagatatcacgagtttccaccagagcccttaccccccaaaccagaagctcccccacagacagctcttcagaataccagactctttaacaactcacagtaaattttttcgaaatcaaaagtagatagccgctcaaaaccccaatttccgaaaactccagacgctagactacgttacaggcttaagcaactgtctgaaatattcagcctgcaatgatttataagaaaggttgaatatcagaaaaactatggttaatactctaacaaatagctatccacatgtcatcaagaggatagagttcttttaatgacataaatcagtgttgcctaagcgatagaagtgttaggaaatactaaatcaaagagaggcatgtacctggcaaacttgaacggattggtaattagcaatgaaacatgtagtcatcataaaagttcctatttccttcaatgatcggtttcccttcttgtttccaacaatgcacattctcacaaactaaccagtataataagcacaacaacaaagaactattccgaattccggaaacaacacctgcaaaacaaggaagagatgccaatagttttaacacaagaagctgtatataaggtggcaacaacaaaatttgcttccacaaggtaccaatgtaagacaaaaacacaagatgtgaaatgagaggctggctcacctgaaaggaacaaaattacagaataacgaggaaaaagacaaccagacgagtgcaagttctgttgaaaaacatgaagaatgctgtccagggcatctttggttcttccaatatcaaatttgtaagtgtattaaataccgttcctcttctcacaaactctgcacaaacaaacaaaaattaggaccaacgctattcaaatactaatatattttcagtataggaagttgaaaggcactaacttcgaggtagaatcctaaaataactactggcaaaacaaaacagagaaacaaaaaaatgggaaatttctaattcctgattcagataataaaaaagcacaactttaggcatctgcgtacaacaaacaaaaagataggatcatgactaaagacattaacatcggatccagaataaatgtttttcgatttcatgatcacaaaccaaaatcaaaataacttaacaactctgcttcaaaacagaacacatagaggaaacaaaacctcaacaaaagaattggacttgttaaaagaaagaatctttacgcgatcatgaatagtttattaataataacacaaacaaacataaacaagacagaacattcaatagaaaaatcaaattcagcaatcatctgataaaccataaaatagctatttatgagataccgtcaaagtactaattacaagacaaagaaaaaacatataagtcctaataagtcagaaattgcggcggtataaagaaagaaagaagcagaaaacattcataccgtagaagaaatcaaaaaccctttggatcaaatgaatcggtgatgcgtaaaaactaaagctttagaagaatctgatcaaattcgaaagagtgatttttttgttttgttgttacagaggagaagaagaagaagatctaaagagagaatgatgtgtgtggcaaaaagagagagagaagggaagggtagagaaataaggagaagagagcgagcgagcgtggctttctttttctggtgcggtttgttttttttcgtttggtttgcccattttcatttctttaatcactcactcacacacactacactagtcactacacaaacaaacattgtttaaagttaataatttcgtttcacgcttttcgtgcgtgaatctacttgttttgttttttcaaatgtggagcaaaaagatgtttaactttaccgcaaatttttggaattttcaaaaaaaaaaaatgcactcctattaatttgattcatccaagataaaaaggtaaaaagcttggacaaaatatgtctttttacttgttagattagataaaaaaaaatcttggagtagaaagatgacacatttttattagtagtgttatttaaatccaacaaagtataagagtgtcgtgatacctatattgtttcttaactttttctcaaacaaaatatttgtttcttaatcttttcataatgttcagtttctttaatctgtttctttcggcataagtaattctttaactatttcactatctaactataaaagtggatattactattacagtagaaactctataaattaatactcgataaattaataaacacggtaaattaataaattttgtaggttccaagttgtgccaatataaaaattaaccaaaatcaataaaataataagataatcatttttttaaaattcctatgtaaaattatagtcccaataatattataaattaataattatagatcttaaatatatattttaagactaatttttatatgaaatttttgttcaagctataattacaactctttttaaaatacaactgatatgatctctgttgtactcacataactatttgcgtatttgatccgtcatagttgattttataaaatcttttatttgagaaagcattactatgatttgtgtaaagagaaactggattaactttcatgtttacgtttacgttcacgttaatgtcgtagatatacaaatacaaatcttaccgaaaataaattaaagaagtcaaattaaaataaaaacctaacataattatatatgcaaacaacaaagcatatagaaaattacattaagaaatatttttaaaagaatatagtatcgtactttacgtaaatatttctataaattaatatttattaacttatacggtaaattaatatatattaatttagaggataaattaatatcactataaattaataaaattttatggctcaccattattaatttatagagtttttactgtatctagtaaaatttactaaatcactctatttgaccggtgtcatgctttagattaggtctattaaaaaactcatgtatatcactatgtaagtggatagtaaaaactcaaacaacttctctttaggaaaaaagaattactgtatgtagaaaatatgttatccatttctgtaaagatggaacacactatgattacagtgtttaacccatgtatatcactatgtaagtggattttcttgaatgaaaagttttttaaaacataaaaataaaatagatgttatgataaaataataaatagtggaaattaaatggaaaaaaaaaaacaagaagagggagcacgcgtgaggggatggacagaagagagtcaaacaagggaaagtgtgagccgttggatgaaacaatcacaaatggtttccgtttaatgcggccttgatcgtgaccgttggtttggttgctcctttagcacgcgtgaaaagcttttgtggacctctatagctcccaccaaaaaaccaaactctctcttctttgacaatttttatttgtagttttagagacgacacagtgacacactcttctctctctttgggctcttgtcccaaccccatacttgttccaaagaatattacttattatttccaaaccaaactcatcattcttgtctcttcactttcagctgtaattttaagtttatgttggcatgcgtatgcttggtaatatttttttattatttgattggtaagcgacaaacaacaagtaagaatatttggtgagaaaaataaaagtagatatttggcaataagtaactaaggtttaaaattaaataatatatacgaatcgtgtgggtttaatttaaatcatgattatggacagcattagtttcaaaggaaaccattccacacattgcgaaatagttaatctcatgatgctgcttctttctaaatccatcattatgtttctgttaaaactcattcgattgaagtactggatgtttgttccaagtcttagtggaaaaaaaaagtcttgttaaaagaatcgagacaatgcaactaatattgtacacaaacaccaaaccgtttctgaagcattgttatggatggcaaaaagtgttcttcaacacttcaacggaggtcaaacctgttccttttctgccttgtttagggaaaaaatattctaaagcgaaaagcatttttggtatgagaatatccaagtgccaagtgagaagattcaaagaaaagtttagacgaaaagcaaatgaatggaataaaaaaatatcaattataacggagtgttgttatgtaactttgttaacagttgtaagtaatttgtaaaacaaaccaagagacaaaagtttatttgtaaggtataaattttttttactggaaggtaaaaaaaatgtgttacacaccaagtgcttgagtgtggtttttaaaaaatgtgttacaaagtcatcaatattcttgttggtaccttgtttgccttttgcttataacaattgtcgagtgtcgaaatgtaagggaaatgaaactttagtgttttgggaatgatctttggtattggcaacagaccatttatagtgacaaatatccattagtgttgaggaatgtccttaagtgctaacgaaaacgcgtattagtgttgaagaaaatctttcaatgctgacataagacatttagtgttcacggaaggccttgttagtgctatggatggaaaatgctcttatttctcgtaatatgaaaacttgctgctactgaagaaattgatcttgatgactaatttctaactattatatcaccttacattctcagaagttaaaaataaaatgcataaactttttcaaatacaatcagaatcggtcaatccggtgaccgaaatcaattatgatgtttttgagagttctgattgaattttcaaaatctacatcactagttggataaaggtgattttgatggctaccttgtgatcatcatatcatctgatactcttactagttggaagccaaagatataaactctcaaatacaaacggaatcagtcaaatcatatggtcgaataataaattattatgttttgacacaccaaagcctagctacatgtacacttgagtttatgttggtgaacgtcttgatcacaaaatctcacatacacaacattgatgtccagcgttaatgcgttatacccttctagagatctaattggtgacacaaaatctcacgtagtgtaagtcagcagaatgaatgcgtttcagagctaagatcttacatgttcaagccaatgctttcgaggaacggtttttgtagatccaagaaaggaatagaagcttttatatatatgtccagacaaaaatattggattttaattaactatatatatatatatatatattatgatcaaaatggataactataacttatgcatgacaaaatagattcacaagagtaagatacgtttttctaaactagtacagtatttatgagttctacaatattatgcgagccattgcaaggtacaacattacatactagtcttactgcatttaaatggtttggatgtgtatatcattatgtttattgcataatttgatcattttggatagctatgaatcggcattagattcatgttagcatttggattacaacataattttggaattgtgatatttcaacgttggtatcatattcgtaaaggtatgattattgtagaaaatatgagatcttatatagatatcctgatcctctcattgttgtttctaatgggatggagatccaacgttgaatatgagactatgcttcacacacaacacacaactcacgactcacgcaaaatatacttacccttctcctatcgtaaatactgtccgactagtcacataacatttttcaaacttgcacgtcgaaaatttttcgaggaaaaatctattgttgtcttcccaaggatcatccaaaccatataattgcctcattgatgcatctcccaaaccagaagctaagaaaaaggacccggatcgaaagttttagttaattttgttttataacggtcaaattgtctgatcgcgctcatccataagaccataaccataatccaacatacacgacattccccaaacgaaaaatcttcggcataattcaaccactcggtggatcccaaaaaatcagtttcgaacagtatgtatagatacacacttttaaacttatatcttgcaaaacaaacaaacacatcatccaatatatcatcaatacacgaaagtttcacttaactagctttagtagcaaatcaattttgctctttttaaaaatgtgatataatagtatttttattttatacctgttcgatcttgattaacgttgttttagtgagcttaaacaccaaatatcgttaaggttcaatagagaaattcaccaaaaaatagtaaaaatccgtatccaatctcgttcgaaaaattattaagaattaagggttcgaaatataaacattttaaagatgaggattatatctgcaataaacttgaaagttatcgacaaccagtaaaacccaaactcaataaactcctaaaaccctttcccttttttctcgcgccgccttctctctcagacttctccgcctctccatcaatttcctcaggcaagaaaaagctcctccgaaaccctaatttcagcttcctcaaacctcagaaccggcctagcttgagagcaaaccttaaatcatggttgtgaacgcgaaagactcgacggttccaacgatggaagacttcaaggagcttcacaatctcgttactcatcatatagagtctttcgattacatgacactgaaaggactcgatgttatgttcaatcgaatcaaacccgtttctgtttacgatccaaacaccgagaatgaattgagcaatatcctttttttttttgtgttgaatttactctatggctcttgtaatgttcaatttttgtttgtgttgtgtctgatttccttgacaagtatgatactttggttagaaaatcctctagtatttgctccacagaaggagagttttaaatcaacatcaaggaaagagcctttgcttccctttgaggtgaagtttttttgttttgaacatgtttccgaggtttatatattttgttggtgtgttagtaactttggttttggtttaatgaataacagtgtaggcaagcgaagatttcgtacacaggaacgtttatggctgatgtttgctttaagtataatgatggagtcgttgttagagacaagtttgattttgggcaatttcctattatgctcatggtgagtgtgatctgtttatttgatttcgctattgtttatttttactttgattctgttcctgaagatatgactattcccaaagcgagagtcacttctatggctggatgctttaatttgtacatttggttcttataactgataatggaacaaagcttagctcaatgatttatcttcttgactttgcttatgattacaagtctttgtttatgagctaatagaaattgatatccgtactttattgcagtcaaagctttgtagcttaaagggtgctgattgccggaaactgttaaagtgtaaagagtcaacttctgaaatgggagggtaaatgttcttccacctcttataccttatgataaagccactgtgaggcttgtggttaatatgtgattttgtgtctgtggattttttttctaaactgtatttttgtgaagcatgacagctatgtttatagcaatggaaactggggtgtgattaaaaacatctgttttgtctatgcattcatgttgctcttgatatatcttcccttctataagtcgatcatgataaattttagcttttcttgaaataggtactttattttgaatgggattgagagagtgtttcgatgtgttattgcaccaaagcggaaccatgtaagctacctcgccttttaactgactaagttcatgagtatagtgttttgcttataaagtttatgggtatagtgtattcccatgaagttccttgtatcataatttaactgactaagaatctcttataatagccaacaagtatgattcggaactcattccgtgatcgtaaggaaggatactctagcaaggcagttgtcactaggtatttgaagtttatctcttccttatgtgttgcatatagtaatgccaatcttcccctaaagtggcaatagatcttaaagagttcttcatgcggttcttttttcttaattcttaggtgtgttagggacgaccagtcatctgttactgttaaactgtattatcttcgcaatggaagtgccagagttggattttggtaagtgttaacttttgatgttggaatgtggatgacatttcctacaatttgagctacaggttaactttatttctaatggacacaggatagtgggaagggaatatttgcttcctgtcggccttgttctcaaggtatggtcttagtgactctatgaatctgtcttctgtagcataagaacattaattttttaaaggcgaaatgttttgagattcttttattcaaatttcgtcttttttttttgaattctcattcaattctccatttttgctatctgtcctcatatgttcgtaggctctaacgaattcctgcgatgaggaaatatacgaaagcctgaactgttgctacagtgagcattacggaagaggggatggagctattggaacccaacttgttcgtgagagagccaaaattattcttgatgaagttcgagacttgggtctttttacccgtgaacagtgccggaagcacttaggtgattacttgtctaagtgtttaagtacatgctcttaaactaagaagctaattttttacttgtaaaaccaacaggacagcattttcaacctgttcttgatggggtaaaaaaagaaagcctttctatcgtaagtttacttgatcattctgaacctccttatccggtttcatttctacaagtggtgatcattagttttgtttgcaaatcttctttgcatttgttttcatttacataatagtaacctttctggaaaaatataacttacttctttgaggttggctttggtctgttagcttcttgaaaattctgattggttctgattttgtaaacaatttctacaactgatgacagtaagttctttctaattacttttgttcctcttcatttttatatatttaggttgctgaagctgtgctcagggattatttatttgttcaccttgacaatgatcacgacaagttcaatttgctcatgtaatgtcttacttttgcctcgtgatgactttcacgttgagttttttagtgtgattatggtcaactttttctttttggctacgcagcttcataattcagaagctctattctctggtggatcagacttctttacctgacaatccggattctttgcaaaatcaggaaattttagtcccaggtcacgttataactatttacctcaaggtatataaatattttcccatatggtagaaacatctatgtggaggctcattatataagagcatgtgattttgtcattatcaatgtttctgaaattctaggattctattttgcataaccatgaattcttgtgtttactagacaaaggttttctttcattaaaaagagttaattgacgtcacatgcattgtttatctaggaaaaacttgaagaatggctgcggaagtgtaaaagtcttcttaaagatgagttggataacacgaactcaaaattttcctttgaaagccgtaagtcccttttgattttgttttccctgttcaatgttctgatcatctgcattccttaaaagttgaaactgtatgaaaccattttttttggtatatccacatttattttctgcctgatatttgcttgttctctttaacaaatattttgtgaagtcaatatcatgtgctcggtaatgatccgttcattatatgcagttgctgatgtcaagaagcttattaacaaaaatcctcccaggagtattggtacgtcaattgaaacattgttaaagacaggagcgttgaaaacacagtctggtttggatttacagcaggtaagagttggtcgcttgtttgggaagcttttaatcttagtagctaaagtccattaagtatgatgtagtttgatagaacaatactaatatatattttctcaattctttaccagagagcaggttacactgttcaggctgagagactgaactttctccgtttcctttcatttttccgggcggttcatcgaggtgcttcttttgctggacttcgtacaacaactgtgaggaagctgcttcctgagtaggttctttcactttttacctgtcaaacactacatgtgctgatgctgtcccaaaattgtagtcttcacatttttcctcttttattgttatcttgtagatcttggggttttctttgccctgttcacactcctgatggaacaccttgtggattactgaatcatatgactcgtactagccgtgagtttctctacctctcttcttcacacatcattttgtgctattcagtacgacatcttgaattcagcaatattattctgttatcttgacatttggttagaccaagttggagttacatagtttatttaagctttaaaatattagagagatttagatagaatcacgtttggttagagtgtgttatatttctcaaggtaacttattatagactggagtttcaaatagtattgttatattagagcatattttatttcgtttccctttttctccatttatctatagtttctatttgtggatgcgattaatatgcttaaatgtttagttcttgtcatattgtaccacagtggggattgtgtacactcgtaataccatttaatatgtcacttttttccagtaacaactttgcttattgtgttctgattggtcattgtgttttcaggaatcacttctcagttcgattccaagggaaacatcagagattttctgaaaataagaaagtcagttgttgatgttcttactggggcgggtatggtaccttcattgccaaagctagtacgagctggaccaccaaaagtcatccatgttcttttagatggtcaagttgtaggcacgctatcttctaacctagtcacgaaagttgtctcttatatacggagactgaaagtggaggctccttcagtggtaaggcgtatttacttcttaacagtatttgttgacggcaacctatttcattagaaaataactatatatgcgaatgcttctttacagattcctgaagacctcgaagtgggatacgtacctacaagcatgggtggatcttaccctggattgtatttggcatcatgtcccgcaagattcattaggcctgttaaaaatatatctataccttctgataatattgaactgattggaccatttgaacaggtagcaaatcctatcaatattatcttcatatccacctttcctggtatacaatcaaatgaaaagaaaaagattctaccaaaccaggtttttatggaaataagctgtcctgatggtggaaatggaggaaggaataactcttccctagcaactcacgaggaaattcatccaaccgggatgataagtgtggttgctaatcttacaccttggtcagatcataaccaaagtccccgtaacatgtatcagtgtcaggtattactagaaattcgatgcaaattttttatgattatgctgctggaagttttttaaattttcagttatacagatggcgaaacaaaccatggcgtactctactcaagcactccaatttcgtgccgaccagaagatttaccacctgcaggtcatttcctatcttactcttagaaagctgaaagtacatggtacaattttcagttgatcatttcgtctcttttggtcccattattaaattctttttgtatgctacagactcctcaatcccctgtggtccgcacaaaaacatacaccacttacagtattgatgagaatcctacagggactaatgcaattgttgctgtcctcgcacatacagggtaagaaactgcttttgcgtacaagatcttgtcagtgataagcttttttcgttaatgtttcttctcttgttcttttatccacctacctgtctcacagatttgatatggaagacgcgatgattttgaacaaatcatctgtggagcggggaatgtgccatgggcaaatataccaggttcgagttcccattctcatttctttattaagagtcctgctgattagctgaatatagtgcttaagcttgatgtaataagttcctttgggtctggagctttatcataatcctggtcaatgtcccctaggtcaatgtcccctacacttgttcctttatgaaccccataaaaaaatcttgtagttgcagcgagagatttagtatcattatacaaatcacccaaatttcttatttttttttaatttcctaacccttgtctttatatgatctcccagacagaaaatattgatctttcagatcagaatagccgatttgatagtggttctaaaagttttaggaggagtactaacaaagcagaacattttcgtatcgatgctgatgggttaccatctgttggacaggtaaataactgctttctatcctctctatgtactgtaagttaaatatttaattttagtttccttgtcaactttcatagaaactcactaatttgttgggtttaacgcagaaattatatccagatgagccgtattgtagtatctatgatgaggtaactaacaaaacaaggcacatgaagcgtaaaggtaccgaccctgtcatagttgactttgtctctgtcgacatgaaaagcaagaaacatcctcaaagggtgaggtttaactccaactatcgcatagacagattccaattggcttaaaatctaattttcgagtttcttggcaggcgaatattcgtttccggcatgccagaaaccccataatcggtgacaagttcagcagtagacatgggcaaaagggtgtttgttctcaattgtggcctgatattgacatgccatttaatggagttactggaatgcgtccagatctcatcattaacccgcatgctttcccatcaagaatgacaattgctatgcttttggaatctattgctgctaaggtatccttcagaatttttctccttagaaatttgtctgattcttaggttccatcgacgctgatgctgtgcatcttcttttcatgtgttgttgaacccttcccatttttatttttagctggtaagtaaagtatatgtaatgcttatatcctcggcttttacagggaggtagtttgcatggaaagtttgtagatgcaacaccgtttcgtgatgcagtaaaaaaaacaaacggagaagaggagagcaagtccagtttgcttgttgatgatcttggctccatgttaaaggaaaaagggttcaaccattatggtaccgagacattgtatagtgggtatttaggagtagaactgaagtgtgagatatttatggggcctgtttactaccagagactgcgtcacatggtctcagacaaattccaggtttttcgacccttctggcttcatttcttttatcatcctgacatatagtctccaactggcacttgtctcatcttcgtgctatatctgaatcataatactctggcttacaggttagatctacgggacaagtggatcagctaactcatcagccaataaagggaagaaaacgaggtggtgggattcggtttggtgaaatggagcgagactcactacttgctcatggagcctcctatctattacacgacaggcttcatacatcttcagatcaccacattgcagatgtgtgttcgctatgtggaagcttgctcacatcatctgttgtgaacgttcaacagaagaagcttattcaagaaattggaaagttacctcctggtagaactccaaagaaggtaacttgctattcttgcaagacaagtaaaggcatggaaacagttgcaatgccctatgtgttcaggtacttggctgcagagttggcttcaatgaatattaagatgactcttcagttaagcgatagagaaggagtaactgattaagattttacaccagaggaagaaaaaaataaccagatctttacaatgtactagtgtgtagaagaatatattattcatcagtttttggttttgctttgttagtatattttctagtggaaaacgtcatctatttttggtcaaagtgaatttttaaacaaatgtgtttgatttgtacggataaaatcaatgaatttttgattctccaataccattaacttaactttgacatgtataagttgttcaattgtggtaataaactctgcaattgagtgatccgaaggacataaaacgaatccaatttggtaattgccagataatttgagagaaaaacgagttatttgattaatgaaaaaaatacaaagtcttgcaaattttacatctaaacaagctctctttctcctctcacactcacgaagcaaagactgaagcaaaatacagataaaacttggctcactttccgggaacaaagttggtggcgaaggcccatgcgttgttgttaactggatcggccaaatggtcagcaaggttctctatcggtcccttaccagtgacgatggcttgaacgaagaatccaaacatagagaacatagccaatcttccgttcttgagctccttcaccttcaactcagcgaatgcctctgggtcggtagccaaacccaatgggtcgaagctgccaccggggtaaagcaagtcctcggcctctcccaatggcccatttcctgcgactctgtagccttcaacggctcccatcaaaataacttgtgtggcccaaatggccaaaatgctctgagcgtgaaccaagctagggtttcccaagtaatcgagccctccatcgctgaagatctgtgaaccggccttgaaccaaaccgcctctccgaacttgactccgtttctagccaaaagctcagggaagacgcagcctagggctccgagcatggcccacctgctgtggataacttctagttcacggttccttgcgaatgtctcggggtcagctgaaagtccggcggtgtcccatccgtagtctccggggaactctccggtaaggtagctcggtgattcgccagagaatggacccaagtacttgacacggtcagatccgtaccatgggctgcctgatgggccctttggcttggcaacagtcttcctcattgtcacacggccgcttccaaggacttcagatgccgcgggggaaagcttgacggccttaccggcgaaggcaggggaggagagagccattgttgaggcggccattgaggttgagtagtgcagcacaaagtaaaacgtttaagatttgttgttgtaagccaagaaatgggtggtttggtattgatgcgattttcgctatatataatacagaaatctaaatactgtcttatcttgaaatatcaatctctgaggttgctattggctagtcatagattttttttggggtttagattgtttgtttgcttacgtggttaatggctcgcacttcgcagattcgcaattgatatgtgttttagatatctaggtgcgtttcatggattggcgaaacacccactcatgacgtgacacgtatacgaatagatctctctatccttatgaaatcctgagagcatcaatgtaaaccaaaacaaaaaaaatttggataattgccttgtataatacattttattaaaccttttgtatatatgcttcttttttttttcttcttctgataataataataactcttggctagagataaaacataagaacaaagtagataaaactataaaatttatgtatggaaataagattatctaaaactacggaattgaatcaaactttaccacagaaacataagaaattattaccatcttaattagcacctgtattgaccataatattttattagaagaagaagaaaacattggaatccaccagatcaaggtgatggtcagggtcataagacagctccataatcacgagtcatggtcatagactcatagccacaagtctgcttctcccttaccaataccaacggcttcaacaacggccacaactaataagccaattccaacggccaccatataactgaaccggatattcaccaaacccatttcaaccggaaattgatccacaagtaattaaaaatgttctgaccaaatgtggaataggtgggaaaatgttgaagtaaaggccaattctataatgtgagaggaaaactcttttttgagcttcaggaatattttcttagacctgaccttgaatctatattttgtagttcttcaatgatttgatttctctattcatttccttataaattaaattacttgtgaaatgaatttctgtttagaaaaaccttgaacttcctagttgaccaaaggattagaaaatctttctaagtggagtgtctcctaataatggatcaaaagtgtttggagcaaaaaagaacgcatagtgtattagtgttaacagcttttatagttcaaagtttagaatgtgctctaaagcatatgtgtgagcctgtgaggtctagtgattgtaaaaaagaaaaattgtgcttcgtggaaagtgatgcaataaacaacacttctagggctgagtaaaaccaactagacatgtaatgatagcttaaaccgttttctataggagtgtgattgaggagtaatttgttgatgaattcggaaaaagcgaataaataagtttgttcaaaaggttgttgaagtttacaataaagataacttgaatcatgataagaaaaaaagtagctatatgttctctaaagtctaaacccatgatgatgaacatgccatatgaattaatatagttctttcatgttcttagaaatggtcgataagttaaaacagtgtttcattaatcgttgtgtttcttcgataaagagtaaaacgtcaaagttttaaggtgatatcacataattcatgagattattttggttattggataaagtgacgatgaaatcgattcataattgaaattaaactggtagtgatgatgaactaattaccattgaaaatattgatatttatgtgtgggtaaatgctttttataatgttactttatattaatgtttcgatcatcagaatctatattttcaaaatgttatactttaagttttagttattgggttgtagcaaaaatcattcttgtcacgagggtgtaagtaagtgtaaccgttgaagtattcagtggctcataacttgtggtcacaaaacgcttggctgcaatgaaaaaatcaaaacaaatgctggtggactagagattgccacgtaagactactaaacgataaaacaaaaatcttaaaatccaatgaatgaacagataaagattacttcagatataacaaacgttacaatatccctatataatccaacactatcgaaccagttttaatcactctcactcacaagttagtcataaaaaaaaaaaaaacacaaaaaagtttcaatggccgcctcaacaatggctctctcctcccctgctttcgccggaaaggctgtgaacctttcccctgcggcatcagaagtccttggaagcggccgtgtgacaatgaggaagactgttgccaagccaaagggtccatcaggcagcccatggtacggatccgaccgagtcaagtacttgggtccattctctggcgagtcacccagctaccttaccggagagttccctggagactacggatgggacacagctggtctatccgctgaccccgagacattcgcaaggaaccgtgagctagaagttatccacagcaggtgggccatgctcggagccctaggctgcgtcttccctgagcttttggccaggaacggagtcaagtttggagaggcagtttggttcaaggctggttcacagatcttcagcgatggagggctcgattacttgggaaaccctagcttggttcacgctcagagcattttggccatttgggccacacaagttattttgatgggagccgttgaaggttacagagtcgcaggaaatgggccattgggagaggccgaggacttgctttaccccggtggcagtttcgacccattgggtttggctaccgacccagaggccttcgctgagttgaaggtaaaggagctcaagaacggaagattggctatgttctctatgtttggattcttcgttcaagccatcgtcactggtaagggaccgatagagaaccttgctgaccatttggccgatccagtcaacaacaacgcttgggcctttgccaccaactttgttcccggaaagtgagccaagttctatctgtttgtaatttacttttctttcaatcttttgaattcgagtgagagacaggaggagaaagagtaggtttgtgtttgtggtggatggtagagactttcagatgtaaatttgcaaagactttgtatgatttgtcattaatcaaataactcattgttctctaaatatgtttcgtagaactataattgaattggattttcagttcttgggttcactccgttgtagaggctatttctacaatcgagcaacgtgattgaacatattaaggcaatgggtacaaagattatgttcttttcaaatcaagagaaaatgtgattctcggatgttagcttgaacaacacgaaagagtcttttatataagttttttatattcccttgatttaacttgtatatcgtctcttcacaaaatatgatcgcattgaagaagaaattgcaatcgttttttttcttctgattgagagaattagagaatagataatgaagtagtttcttccgtgtttggttgattctgaagctcgtaacattggctcatacgatatctggataacaatatatcacattgctctgataccatattaaaatcacatccacgcattgaatggactgatcatatatcttacatattagttaaaatccattgtcgtgcgagagattgccttccgtgacatcctctgtggaccaggttcgcttgtcacactagctataattggtgaacacatgataacatatatgtttggagcatagaagagctagcgcctgtgtcattggtgtgtggtatcgaaagaacaagagaatagaacaggagaacatgaatatagctaggtttattcattttcaccccaaagcttagaaattgcgttccaaagagtgggtgaattcatgtgtgagggcaattagtgattgtaaaaataaaattgtgttttgtaaaaaacttttactgtcgaaattatttagggtgatgaaaaaatcagtaaactacgaatgatagcttaaagagtttctatcaaagtgattgaggaatagtttgttgcaaattaaacctctaacaaaatgttttctgttgtggtttttcatctctacaaattttgaattttatgatgaattagaaagatagaatgagttactttagattttaaaaggttgttcaagtttacaaaacagattactagaatcatgattaaaaatttacaagctacatattgtctaaaccaatgatgttgaacataccagatgatagtttttcagtgtttgaacaatcaattggatagtttttatgtttctgcaaaatatgcaaataatcagtgtttttgagtctttgcattttgatttaaaagcaaaaacaactgagtttcaaggttaaattaattacattattcatgagatttatcaggttagtggataaactgacaatggaatcaatgttattgtaaattggtagtgatgttggacttctaatgttactctctatgatgtttcggtcatcaatatcacactatctttacttttatttaaaggaaagatcacacaaataagttatctctattcagaactattaagctgcttccaaaagacttgcaacatgtggtctcgaaatgctttggctgcaatgaaaaaatcatagcaaaagctagtggactagagactgccacataagaatagtaaacgttaaaaccaaaatctcaaaaatccaatgagtaaagagatatagattacttcatagataacaaacgttactcgcaattttcctatataatccaaccctacctaaccattttcaatcactctcactcacaagttagtcaccaaaaaaaaaaaaaaacacaaaaagtttcaatggccgcctccacaatggctctctcctcccctgccttcgccggaaaggctgtgaacctttcccccgcggcatctgaagtcctcggaagcggccgtgtgacaatgaggaagactgttgccaagccaaagggtccatcaggcagcccatggtacggatccgaccgagtcaagtacttgggtccattctctggcgagtcaccgagctaccttaccggagagttccccggagactacggatgggacaccgctggactttcagctgatcccgagacattcgcaaggaaccgtgagctagaagttatccacagcaggtgggctatgctcggagccctaggctgcgtcttccctgagcttttggctaggaacggagtcaagttcggagaggcggtttggttcaaggccggttcacagatctttagcgatggaggactcgattacttgggaaaccctagcttggtccacgctcagagcattttggccatttgggccactcaagttatcttgatgggagctgttgaaggctacagagtcgcaggaaatgggccgttgggagaggccgaggacttgctttaccccggtggcagcttcgacccattgggtcttgctaccgacccagaggctttcgcggagttgaaggtgaaggagctcaagaacggaagattggctatgttctctatgtttggattcttcgttcaagccattgtcactggtaagggaccgatagagaaccttgctgaccatttggccgatccagtcaacaacaacgcatgggccttcgcaaccaactttgttcccggaaagtgagccaagttttatcagtttgtattttgcttttctttcagtcttttgaattcgagtgagagacatgaggagaaagagaaggttgtatgtgatggtttgagactttcagatgtaaatttgcaagactttgtatgatttgtcattaatcaaactcaattttctctcatactagtctcgtattaactaaaattcaaatggaatgttcttgggttcgctcaaatgaagaggctgtttctacaattgcacaatcttatagaacataactcgagtttaagccaagcgttacatgacctgatacaatcaaaggcttgtgtatatctgaattaaaggaacaaagccgattgataaatcacaagtttgctgcattttcgaagattattcatagaaatgcttatgggtaacaaaatccgttaaaatttatcgtaaaaaagttccacacaaacgatcaacacacaacaaaaaaactaactcagacgagcaaagaagatacattctttacctcaaagaagtcctgaagagcggtcattttaatggcacttgacttcaagctcttgattccctcagcagtggccaatgcaccagcaacagtggttataacaggtaccttgtatgctagagccatttgtctgagctgtctcccatctttctgatcaagagcatcacccgagcttgtgatcaacatcaaatggatctgaccattcgccaccatatcagcagcatgtggtcttccttcatgcaacttcaacactctctccactggaatgcctttcagttccaggaaatgagctgttcccgaggtggcaactattttgaacccaagctcgaggaaggacaccgcgattttctccaggtgcggtttggtcatatcgtttaagctgaggaagactgtgcctgatagaggtagcttttgacctgcagcgatctgagccattgcaaacgcacttgagaattcagaactgatgctcatcacttctcctgtgcttctcatctctggcccgagtatcacatcgcatccttggaacttctcaaacgggaaaacagcttctttcacagagacatgtttagggataacttctttttcaaagttaagatctttgagagatttgcccgacatgaccagcgctgcatacttggcaagagggtgtccaatggcttttgacacaaaagggacagtacgggaagctcggggattggcttccagcaaaaaaacatccccagatgttgtgattgcgtactgacagttcatcagcccacatacatttagcttcttcgccagcttagtggtccatgttcgaatagtttgcaaacaagaagctgggatggtttgtgttggaagcatacaagctgagtcaccagaatgcacaccagcttgttcgatatgctccattattccaccaatcaccacatttccataggaatcagtaagggtatcaacgtcgatctcaatggcatcagaaagatatttatctaccaaaacaggtctctctgggtcaacttgtaccgcattttccaaataggttattagtctactgtcatcataaacgatctccattgctcgtccacctagaacataagaaggtcttaccacaactgggtaccctacctcctttgctatggctaatgcatcagcttcgctctttgcaatgcctcccttgggctgctcaatcttcagctcgtcgagaattgcattgaacctctctctgtcttcagcagcgtcaatggagtcaggtgatgtaccccagatgcgaacaggtcccgctccgctcaagctcatgggcatgtgcttatccaaataatgtttgatcggcagagcaagtttcagaggagtttgaccaccaaattgcactattatgccatcaggtttctcaaggtcgataacattgagaacatcctcgattgtgagaggttcaaaatagagcctatcgcttgtatcataatctgtggatactgtttcaggatttgagttcaacattatggtctcatatccagcatcctgcaaataaattaaaaaaagtagataagtaagtttagcataaaaaagttgaaacaatgtttactggcttttgggagagacgcttagattgtctaaagacatacctgtaaggcgaaagatgtgtggcaacaacagtaatcaaattcaatcccttgaccaatgcggtttggccctccacccaaaatcaaaaccttcttcttgttgtttggagctgattcacattcaacatcatatgaagagtacatgtatggtgtatgcgcttcgaactctgcagcacatgtatccactctcttgtaagatggaacaactcctagagaaatccgcttggtacggacttcttcctcggttgtctttgtagcaaaagcgatttgcttgtcactaaatccccgctttttgacttcgtaaaggtcttcttttgtaatctctgacaaggttccggacataagatactgttcgacgtccacgagctctttaagctgggttaggaaccacttgtccaccatgctcaactcgtagatttcatcaattttcataccctttttcatggcagcatatatcgcatggatcctgtcaggatttgggactcttaggctgtatttcagctgatcccagtcccaatctagctctttaatttttgcacaaccccaacccgagaatccacactccagagacctcagagctttctggaaagattcttggaatgtacggccgagagccatagattccccaacagatttcatctgggtcgttagcaatggctgagatcctggaaacttttcaaatgcaaatcgaggaatctgcatggtaaagaaatagatatcgttaagcaaaatatgcatttgagtttatatatcatgaagtggatagatgtgtgtaaatcttcaaagtcaagcgtatctcatttcgcaacacaaataaagccaaaagtatggaatgacaaaccttagtcaccacataatcgatggagggctcgaagctagccggtgttttcctcgtgatatcattaggaatctgatccaaggtatagccaacagacaacttggcagccattttagcaatgggaaaccctgtagccttggaagcaagagcagaagatcttgagaccctagggttcatctctatgatcataacttcaccatcaaccgggttgacagcaaactgcacattagatccaccacactcaacaccaatctcccgtataatcgcaatggaataatccctaagccgctggtactctctatccgttagagtctgtgcaggtgccacagtgatggaatcaccagtgtgcacacccataggatcaatattctcaatggaacagataatgacaacattgtcagctaagtctctcatcacctcaagctcatattctttccaacccaacaaggatttctccacaagaacttgacttgtcgcactcgcagccaaacccgatttacatatagactcaaactcctctttgttatacgcaattccaccaccagtaccacctaaagtaaacgcaggacggataatcaaagggaactcaccaattttctcagcaatgtcaaaacactcatcaagagtggtcccaatccctgaaggtggagtctttagcccaatgttcttcatcgcatccttgaacaactcacgatcttcagctttcttaatcgcaccaagcttagctcctatcaattcaacaccgtatttctccaaagcaccactctcagcaagagcaaccgcgaggttcaatgcggtttgaccacccatggttggtaacaaagcgtcaggcctctctttctcaataacctgctcgacaagctcaggagtcatcggagcgatataagtccgattagcagtttccggatcagtcatgatagtggcaggattcgaattgatcaggataacctcatagccctcttctcttaaggctttacaagcttgagtaccagagtaatcaaactcacaagcttgtccaatgacaatcggaccagcgccgagaatcataatcttcttcagatcggttctcttgccgacgatctccggagaaaaaggcttggtagtggtgtcggcgagctctgagacgggtttgagaacatgcgtgagggagcttttccgattgagacatggggggaaagtggagaaggaagaagaagacgaggcttgttttggttttgatctgtaatagatggcagagcgagagaagaaagtggaataggagagcttggaaggagagaaacgaggattggatttggaagaagcgaaaatggaggaacaattggaagagagttctaagcaatggtttctcatttttgcttcttcttcttcttcttcttctaagttttgcctgtgtcggctctgtaactggagactgctgcagaagagagtgagacacgagagagagggttttagggtttctcgaaatttggattattccggtttggtatttattttgtctttctcaatcctgctgtatttgattatgacaatccattttttcaacaacaattattgggaaaatatgataaatgacataaaaagataattaactcttccaaaaagttgcaaagagaaatgatttttttttttttggttagaatgtatcatttcgtcatttatggaatcgtatccataatatgatagatattatgtctctggtttaaaaaaataattaaatttttggaaattagaatattattgttttattcaagagtgtttaaaatataaaatggtgttataatgaatggagttttattggtagtaaatccaataaatattatttgatatagatttatttcattaaaaacaaatgttattcgtgtcatgttattaaagttatactctatatgacttttaaatatagtatatattccaaatcggttttaaaatgagtaaataagaaagtcaacgaattacaaaactaattaccgcatttattttgtagtcaatgcggtcgcaggtacttactgcttttgctttcgctcagatcatcaactcttctgctgactttacagtagattaaacagataatgtactatatataacagtcgcatctggtaaggtttccttaaactgcaaacttttctagtaccgcatgtccttctctatagaatcaatctttttaactgtatatagtagtattatatgtgtttgcacgtttgatatagtagtaaaagcttttttctctgtgcaactaactttaactttgtgtttctcaggtttgtgacgtctcttctgtaatggaaacatttgttcagagtcgtcatcctttttgataatggtgcaactggacaataagggatcagggactagtacaaaagttaatgtgggatcaagagaagaataagaccgataatatataaacaaaatgatatcgcagccatagcaatcacgttgtggagcagccgtttgtcgtctttcgtgggtatgaaaactgattttaatgtattggttagctcgaaaagtcgaacagatacctgaatgaagaaggaaaaaaaaagtgtaagaagtaataaaacgataaaagcatagaatggttttaccgatgcttttttaccaagacgtagatggccgtggtgagcatgaagttgagcattgggtattctgggatgattgataatagcaactttggctgcccatttggcacactcgatctgcaccacattgagaattattgttatactaacatatgttaaccataaaggcttcactaaccacattgtgaagtttctttataataacatatgcttcgatttgtagatcccactaaccttaaccagatgtgaaactgtgaaatgtaggtctcgagagttatcttgcccagccacctagagagagatcatggtcaaaaagctgtgtgcactgtgaacaagaaggtaacaataaggaattaagagattgagaatcttacgcaaagagtgtcagggaaaatctccgtagctgttgggtgcaatttcgcagacagatgtagacactgttccagatttaaaaccaaaggtcataaatcaagaaagcatattatctcaagatttagcatgaaccatgaaaatgaagaaaagacaaagttgttggtactgacgttattggaatccaagatgtgtagggatgatatttgttgtacgtaaccttgtccagcttgtagatgtattcataccaaaggtaaccagcctgaacatttggaaaccacgacacaaacatcagaataattgtggagaagactatatatgatgaaccagaagccgagaaaagctaacaactcacgaatgaagaaattcctattatgcttgtcttgattgacatccttctcttagcatcacactcctccaatttctccatccatctttctacctgaaatccccaatatatttagttgcgtctttcgagaggagatatggaaaaaatgaaagcaccatggttctggaattacagtgggatgaaaatatgcatatatcatgccgatgatccatatgtagcgatcaagtccagatctgaaatgccattcgtgtagacgtggaaggtctggtttagctggatctgtgtaccctgtatttgtgttaaagacagaatatcaacgttagttaccaatttttattcaagcatgccatccaaaatatttgtgtagaagacagaactacagatcagccacatgacaaaaatggtatgaaaaatgagagaaatttgttactgacccagtaagaatgccagaggactccagaaaatctcaaaaactccaggaatctcccacataaggataaccacgagaaagcatgaagcaatcttcagagccatcactgatgctatttcgttatactgactgtaaataccaagggctccatagaccatcagcgtgaatagagtgtgcattggacagatgtagtacagcatatagtcattgttgagaataatgcaacaaaacgccacaaaaaagttaagccgccacatcatctggattaagtaaaagctttcataaaaatcttgagctttgaaagacatagtgctctctaaaagaacatcacatggtaaactgaacaaactatggtgatcgaaaatagttgatctgacctgagtgaatcgtgcaagggagaaatcctttcggatatagtaataagagaagttcccaaaaccggtcatccacacatagccagcgatgaagaccctgattgcattgtaaaactcaactgccgcaaaataatgatacatcagaaatagaacctgcaaagtcccaaagggatggaaatcagttagagaatcgaggtgaatgcaaaagaaaagacacacaaagatttagatgaagatactattatgaagctgacgtgaatgcaaggaagtaagggataaaatggtaggaaaatgaaaactactgagtaaagttcgaacacagtacctgcatccaccctttccattcttcagtctggtgacgattgagatacagaatggactttcctgttattggtgacttgtcagtgtgtttcttcaaggacgtcatagctgacactatgatgagaagacagaagagaaagagaaaaaggtctcggctgtaattctgccaatggaatccacatcaaaaagatggacggtcaattgcaattgctaacacagtaacactgatataagctttctacaccagaaagaatttcggctctagtgaactatatattgcacaagtattttttttgaaatttaacaaccgaaaaggaaattcgtcaaagaagtttgatggaggcaccttttgagactgcccgatcaagctagttcgatcacaaatataaaaatataaaagaattgctccaaactcagccctacaatagaagaaaatggtcactatggagcctaatcagtaagaattcaatattgctgagaactaaggaacctacattgctctcaaggttgctcggttttcaagcaagaaagagtcttccaaagtcagaaacctacgaataaacacaatgccaatggttaagaaaatattatggctagagaacattcctccctaagaaaaacaaatagctataacaacctaatcaaatttgttttgattggtgagctataaaactttgaagaggcagatcttggaagacctccttccattaaaactgttccttcatcctctttgttcgtcaccatttccagttcaaccaaattcttatctgaatgactgcaaatgtggataacgtgaaaccacaaaaacagtaagttccaaagaaattaaacacacataagcgagatatcagtagatgagactcaattagataataatcatccatacacatacactttagcgtgaaaagaagacctcctatactccagaaattccgagtatagccatgctatcataagaggaatgactccaagcagaaacgaaacctgcaacagaaagaagaacaaaagaagaaagattgagaacaataacagtaatccaaaaaaacccacgaaagttgtgttctttcagccgaatacaaaatgtaaatctacgcaacaaggttcaatccaaatcttccaaactaaaagaaaaagtacgttgcttcaagctgaagaaaacacagagtggctgaggtagaagcttagtaagttattagtaattgaaaacacttgactcaatgttgagacattacaatctttgtaaatgaactattatagatcattgtgccagcagatcatctggtgggataatcaatctcaccactctactttacacagccaacattaatctaaatctagcaagcaaccgatgaactgaagaatgaatcaaccacattcatataaaggagaaagatagagagtcctaatcacattaagctacaggccaattcaatcaaaatctcaaaatccgcttcgggaagttggagaagaatgtaaatcgaaacttgaatcaccgaagatcatgaaaaattgtacctgaccaggcgtaattggctgtgacacaaccatatctactggatccataaaggaatacccagagattcaaaaactagatactgcaatatacactccaattgcaattagtttcaatctaggggatgaagagagagatagacagagttaattggggcagtggcaacgaagaagaagaagaagagatctgaagtgaagaagctattgcttcaaggaagaagaaaatggcggacgcgacgtcgttttcgtcaaattcaatcgtacggttggttggtttggcgattgcctctcctctaattgttaaattattaattacttattaattactaattaagtaaattacagaggtaatctgattgtggttatacgcaatttacagctctcactgcacacaaacttttctttctaatcgcaatgcctttgcttacagaaatgcatgcatttaggtttggttttgacaacatatttgtgtatctaaagaggaaaaaaagaacacaaaaacattagtgtggatttgcctatagataaacaaacgtagtggacctttctggtaggtgagggataagttggtaccaaacatcaatgttcacatatttgtttggtgttaaagcatttggaaaattttgcatccatgttgaaacgtcaaacgtgtagatgtgatgacatttaaatgtctttactctttattgggtttagatttcatttcgtcaaccaaacccactccttgggcccaaaggtttccacattatcatcttaaaccctaagggggccactagtaagtggaaacaaacacttcgtcgaatgcgcatcttctctacattcgtctttcatcgcagacaacaaatcttcaatcttcgtcaattccaaaccaccacaatccttcgcaacccaatctccatcgctccgatccagattccgatggacgccaccgagcagtctctccgtcaatctctttccgagaaatcctcatccgtcgaagctcagggtaacgccgtccgagctctcaaggcttcccgtgcagctaaaccagaaatcgatgctgccattgagcaactcaacaaattgaagctcgagaaatctaccgtcgagaaggagcttcagtctattatcagtagctccggtaatggttcgcttaaccgtgaggcttttcgaaaagctgttgtcaatactctcgagcggcgtttgttctatatcccttcgtttaagatctacagtggcgtcgctggactttttgattatggtcctcctggctgtgctattaaatccaatgttctcagcttttggcgtcaagtaaggaacaacactattcacatttctctgtatttaaattcgacaagattttggttgtataaaccgagttagatttgttactaaacgtgattgaatggagtagaaattgagtcaaatgtgacaagattcatagagtagagttacgtttggaattatacagattgatgtgggtcaaatttgacatgattcatagagtagaaattgtgttaggcttgttcttatacgggagtgatttgcttcgtttgcagcatttcattcttgaggagaacatgctagaagttgattgtccatgtgtgacaccagaggttgttctcaaggcatctgggcatgtagataagttcactgatcttatggttaaggatgagaaaactggaacatgttaccgtgctgaccacttgctcaaggattattgtaccgagaagctggagaaagatcttaccatctctgctgagaaagctgctgaattgaaggatgttcttgctgttatggaagatttttctcctgaacagctaggtgccaagatcagggagtatgggatcactgctccagacacgaagaatccactctctgatccttacccgtttaatttgatgtttcaaacatccattggcccatctggtttgattcctgggtgagtatttttcatgttataatcatttctgagccactttctttcctgagtttgttatcaaattactcctcttttgtgtttcagttacatgcgtcctgaaactgctcaaggtatttttgtcaactttaaggacttgtactattacaatgggaagaaacttccttttgccgcggctcaaattggtcaagcctttagaaatgaggtaatgtattactttgcttgatgtatgggatgtcttcatctcaatcttctttaagaaattcttttctgcattatgtctgggttttaataagtagcatattactcgcagatatctcctcgacaagggcttcttagagttcgtgaattcacgctggcagagattgagcacttcgttgatcctgagaataagtcacatcctaagttctctgacgtagcaaaattggaattccttatgttcccaagggaagaacaaatgtctggccaatctgccaaaaaactttgccttggtgaagctgttgctaaagttagtatttgtaatcatattcgcctacttaattctactaagaactcgcacacacccatttttatatcttattgatgcctgacactgaaatcctattcgtatagggtactgtgaacaatgaaactctaggatacttcattgggagagtgtatcttttccttactcgtcttggcattgacaaggaacggctgcgcttccgtcagcatctagcaaatgaaatggcccactatgcagcagattgttgggatgctgaaattgaaagttcatatgggtggattgaatgtgttgggattgcagataggtctgcttacgacttacgtgctcactctgtaagaacctcaccttttacttctattttcatcatttcgttttacagctagataattaatgatcaaaacccgtaagtgttcctgtttaaattcactaaagtatattgttgatcaactgttgcgcgacaggacaaaagtggtactcctcttgtggctgaagagaaatttgcagaacctaaagaagtagaggtattttagtgaacagattcattcatctctgtctttattacttgtccttaacatggttatcttttatatcagaaacttgtgataactcctgtgaagaaagaactgggtcttgcattcaagggaaatcaaaagaatgtggttgaatctttggaggttgaactcttaactgttttactgaataacttttttttttaataatatggtgatggtttagaataaatatcatgcttcgtgtaatgttttgttaggcgatgaatgaggaagaagctatggagatgaaagcaaccctggaatccaaaggggaagtggagttttacgtgtgtaccctaaagaaaagcgtgaacatcaagaaaaacatggtgtctatatcaaaggagaagaagaaagagcaccagcgggttttcactccatcagtgattgaaccatcgtttgggattggtcggatcatatattgtctgtatgagcattgtttcagcacaaggccaagcaaagcaggggatgagcagttgaacttgttccgtttccctcctcttgtagctcccatcaagtgcacggttttcccgcttgttcagaaccaacaattcgaggaagtagccaaagttatttccaaggaactcgcctctgtcggtatctcccataagattgacatcactggtacgtaaaaacaagttgagaattgaagttttttgaaatattgaaatggatcaaatcaagtaaagatttgttgtgtttgtgtgtgaacaggtacatcgatagggaagagatatgcgagaaccgatgagcttggagtgccatttgcaataacagtggactcggatacatcagtgacaatcagagaaagagacagcaaagatcaagtccgagtcaccttgaaggaggcagcttccgttgtgagctcagtctcagaggggaaaatgacgtggcaagacgtctgggcaaccttccctcaccattcttctgctgctgcagacgagtagctagctccttgtttttttccgaattaaaaaccaaagtgttaaattaattgttgctgaatctactcatttttaatgttttgtttcttagtgtcacgtaaaaagttcgataccagatttggagacgaagtggctataaagtataaactctctgttatattttcgtccattctactgctaattttctaaattttggtcacaaatttcagtccatccagttatggtctgaattgtttgtgtttgcattaagaaaaaaaagtatgaaggatcattgtttttacagtttgctaaggattacaaagttacaagttagagaagcaaagagttgacgcatccttgggcagttggtagcgccatcgtgcatatatactgactattttaggttttagtttagatgcagagatggactaaaccagaggaaagcacattcaaaagtttttgatatcgaataatgggttagttaaatccaagttttatgataatgcagccatgcaggcggatagaaatctcgatcttggaggacgtaacacaattaggcaagttatgaaggaaagtaagattatcaatatttatgattttatgattgttatttatataattaaatacaaataattaatacaatagactataggcaagatatatttaaaaaaatatttaattgaaattacaattaaaatgtttaagaacgaatagagattttatatttttttttaaaaactcatcgcttgagcaccaagtttcgcattgtaataaaaatcctaaagtaacaaaaccctgctgaagtttcccatattaaaaccctagctagaccaaaattgtgagcggacaagttcacacttttcttgacgattccaaaccactttggctccgattcagatcccgatggacgctcccgaacaatcttttcttcgggagaaatccttggccgtcgaagatcaagaactcgccgtcggaactctcgaggactcccacgcagcgaaaccagagaccaacgctgcgattgagcttcccaacaaatccaagcctgagaaatccgcggtcgagaaggaccgtgaggattttcgggaagcagtggtcaaaactctcgatcggcttttgttcgtccataaatctttcgatatctaccatggcgtcgctggactttacgatttcggtcctcatggtcgtactgttgaacttaatatacttagcctctggcgtaaggtgaggattcattcattcattcacatatatctctggcacaattcggtagacaagagctgattttgaattttctttgatatacagtgttttgttgatgaagaggacatgatggaggttgcttgtacagctttgacaccagaggccgttttcaacgcatctgggcatgtaaaaaagttcactgatcttatggtcaaggatgaggtagatggagcatttcaccgtgcggaccacttggtcaaaagttattgtgaaaaccgaaagaaagatcctaccatctctgctgagaatgctgctgaattggataaagttatagctcatgtggaagatctttctgctgaagagcttggtggagtatggaatcactgctccacagctccagtcacgaagaatccactttctcatcctcctcgccccttcaacttgatgtttcaaacttcctttggagcaagtggttcgttgatagggtgagtctttttccatgtaataattctttctttcttgagttttatttatttatttgttggtgtgtttcagttacttgcgtcctgaaactgctcaaggcagtttttgcaacttcaaggattattataatttgaatgggagaaaacttccgtttgccgtggctcaagttggtcgagtctttaggaatgaggtgaatatccttcaatattactagttgatatattgtatacgtttatctgaatctttcttttaagggatctttgtttctcacgcagatatctccacgtcaagggcttcttagaactcgtgaattcactctggcagaaattgagcactttgttcaccctgagcataagtcacattctaagttctctgatgtagcaaaacttgaactccttatgtttccaagagaagaacaagaaaaacctggccaatttgcaaaaagactttgccttggcgaagctgttgctaaggtcagtgtatttgtaatcatattcgcttacctcctttttgataagaaaaaaaaactaatactgatctctacaactgaaaatgtattagggcatgtgaacagtgagactctaggattcttcattgggagagtgtatcttttccttatccgtcttggaatagacaaggaacgcctgcgcttccgtcatcatcttgcaaatgaaatggcacactatgcaaccgattgttgggatgctgaaattgagtgttcatatggttggattgaatgtgttggaattgcagataggtctgattacgacttacgtgctcactccgtaagaaactcaccttttacaactagatatatgtaggtgttcctatttatatttacttaagtagattgtggactctttgttgtatggcaggaaaaaagtggccatgctcttgtggctcaagagaaacttgcagagcctatagaagtagaggtaatttgagctactcgacatttccacctctatctatataacttgtccttcatgtgattctcttatatttcagaaacttgctattacacctgagatgaaagaattgggtcctgcattcaagggaaatcaaaagaatgtggttgaagctttggaggtagactgaagtgaagtctattgttttactgaatagcttctttgtctcatggtgatggtttataataaagagataagttggtatttagtacgtttatgaaacataattatggaagtagtacactcactatttacaattagggaaatagcatatatgattagggtctttcatgtttatgttatttatcttcaaacaattaattattgcagatatgtaacatggctcatatgaatctttacctaaatctctgtctcttttctacttttctagctttaccaacggctgagttgaatctagaaaattatggtgtcacaagtttttctttttctttctttttaagtgtcctttaaaaagctcgataccagatttgtaggttaagtttcggttatcaatgtttctcttgttagagactacaataaacacaagcccaaacctaatgaagcccatgtgtgagcaatcaaagttctcataagcagtttgtttgtttgtttgtactactactactctacttgcttaaaccccctaaaacacatgggcttcattaggctgggcatgtgtttctgtatactgtacgttagttatgataatttttaatcggataaaatgacagagaatatttaccgtcatataggaaaaacttggatcgagggaactgattatggagcaagtcgttgtcgttaaatatagtcaacaatttccgcaacaaaaaaagcggagacttttatctaaaggaaaattaagacatcagtttttttttctttgataaggttgatatagttagcaatttttttttttttttttgaacaataacagatgtaagtaaatcaaagtgaaatcatcctcagctttccaccttttctttcttttggttccaatatcgctatgtaaaataaccacatcattgtcttctctaaacttctcctcgtttgaagtgtgatggttacttttatcaatatataacttgtctgcccccaaataaattaagataccacatcatatacccaattatacaaaaaatactctgatttggaagaggacaaaatgtaaaatactctaattaactcttttaataatcaagattacaaatgattagtagcagtgccagtgtgtcagtgaaatatatataaattaacatgcatgtatagatatgaataaatacattacctaagaatctacttacatacatatagtacaaatgatttatgcttatataatgcaaccataacgatacgatctatagtacgtacatacccctctctcaagactcgttcttggagaacattgaaggaacaatgtcctgaagaagaccatagtcaacaactggttgattattattaaaattgtaactagaggtcccatggccatgttcgtacgacagagatcccaccgattgataattggccggagaatgtttcatcatgagaaaatcttgatggtgacgagggaagctatggagtaaactgcctccaccaccacggtggactagtagatgttcagctgccacggttcctctcaacgtcgatgggatcggatggttgtgttttccttcgtaggttgtaattacgatcgacggatcttgaaacgatctctctacacgtttcttcacgttacacttctgtgttgtgcacctatagtaactcctgaaaacgcataaacaaattatgatattatgataatatacactttattttcttacaaaaccattatgatatatatatctgtaacttataaatgtgtggatttgaatagagtgtagtgaataaatgaaccttggataagggctgttcttcactgctttttgtccatattttcgccatctataaccatcttcaagatgatcaatctcgcttttggtcataaatgcaaccctaacttctctctctttcttctctcctttctttttaccttgttttgtcctgaccatacccatccatctaaagcatatcaatctcaagggtttccacgttctatgttggcaagtgattgttgatttttataagcttcacgttaattatatagtctaaattttgtttcaggacatctagtccataaagaacaaaaatatgtgaggaactccgaaagaaaagtaaaaggttgaaaaaaactcacagttgcttggagctttcaccaacaccatgtaggtcgccttcgttatcctccatttggtcactcttatcgttggtgttctctttaggctcgccttcattggaggaagatgagaccaccggagaattcgaagtgagatttaagtaagggttgtttactgacggtgaaaccgattgaaaaggggaactataaggtgagaatttgaagaccttctctagtgagttataatccattactaatgagctttgtaagcaatcacttaagctcttgaagtgtacttcttctaaagatgtgttataattgtgctcaacatgatcatccattgaagaagaggagaaagagaagaagaggaagagatttggttcttcaaacttaggtgttaggttatatgtggactttgggtgatcaagtcttataaatacaagtccattcaactttactttaatacttggatggttttttgttctgaatattctattaaggtcttaattaaatcattttggagcgatatcacttggaaaaaataaaaatgtccattggtaatgtttggtcagtaaaatcaatggaattatgataccatatttccgattggttataaattgagtaactaatctcttttaatgtaccaaattatacgtcctgtactttataacgttggatttctaacatatcagtttaagatcaatatcttttattgaggtataatatacctaccatatgaagattcatagatttgcattcaaaccatatgtagaagactgtcctttgtatattcaatttgaaaatatcaatgtagtggttatcaaaaaactaaaaaataatcccaagatagtctacttcagtgtgatttaatgttttagctaggaaaatttttacacaagacaaaattattttacccaaactggatgttgatttatggagttaaatcttggaaacactatttgaccctccaatcgaaactgtttttcgttacccttaattatattaaggttcatgaagcatattttggatattttaggcgtatgctccgttgttagaaattatatatatacctttttttttgtcatcgtttctaattgtattagaggaaaaaatttgcaattaattcccaactttatttgagtaacccgcaatggcagaaaatggacataaaagatgaattatactacaaattatgtgtatgatggtcgatgatctgagatcaaattttaatatatgatctatcaaccaaatagatatgaccaatttactagctaccagcaacaatcgttcttaatattattaaattacttgtcgaaccaaagtatcaactatggtatgtaatttgagattatagtctctctaaaatgtgaaatactaaactaatttgaaagaattcaagagggagatactgaaaagtttggaagggtcataatcttattagaagactttaatgggtataaattgttaaaatattttgatgtatatgaaaaagaaaggtttgacaatttcaactaaaaattaaatatagctagagagctattgaactaaaagtggtttctataaaggagcatttaactatatatttctctctaatcctatctaccacactatgttttggctttcattctttcctttttctttccttgtgtttttttcgtcttgtaaacatacatttggttaagacaatgaatagtttattcttaagagtctacattattagaattcacatggagattgacgctatgaatatggtcttgactaaacgtaaaaataaaatagaaaatatgttggaaaacatacgtacatatatcttcgtagatatctcatagtggacatgatcatcaccataacaccatatcatgtagtacataacaaatttaaactgtcaccatgtccatagacaatatcagaaattgaggtatatataaatgcaatctgattaggttttaaaagtttatgtgcgtagaagtcctaccgaggaatattaaaaataaagataaaatagaggtcaaatgtataaagttatgtagacattatgcatatacttccaactctttctactcgtcaaaagaaatctttcttggtgaattataacgaatcatatattaatacgcatatacaagaagccaaagaatagttaacagaagtcttcattttgcgcgcctctctctataaccctttttatataactttttggttcattaatacaaataacctccatagaaaagcttacgaattctttctttcttgtttaaataagggtttgaattagatatactcctttctttggagctacattattgttgttgattcaaagtcaacgaagactagttgtttttgtgaacagtcaacgtctttcaaagcaatgacttcactttctttagcttttctatttaagattagataagtctagacactaacaaataaccatatctctagacgtcgaaaaagaatcttaagaataaatatactcacaaaaataaaaacacaatgattggatctaaacatttctattatctaaccattgtttgaacttggaaaaacatatatattacgagtgaatcgagtttggctatttcgagcaatttgtctgtacgtacacggctttaaaccatatgattgcattcttactttttagtgttagaaacataaaatgtaattaagagacgtggaagcaaatgacaccgtatttgaccattaggatcagcaaagtcgtgcatgagactgcatatcacgtgctcttcattccccctgtctttgatgacccaagccctatgtcattttatgtatttgctttgtaattttagaattttgagtgtttggtgactttggtttatggtttctttaattttttaacggatttcatcactatgtgatgagaggtcgaacccactaaccatattcgtttgcgtgtttttgtaagtataacaattgaagaagtaaccttaaaggcttaaaccataattcttttaccaaaagagttcaagtgagtacagttcaacaacactatttcttggaaattagggagccaaaaaaccttcttattatattcgcttttcgttttttcatggaggaagttcaaaaatgctaagcactaatcgaagttttgtgtggcatttctagtacacctaacgtctagtggtgtttgataagtcaattagacgtttaagagtttactattataaaataaatagaaattatttgtagaaaactttgaatttaatgggaaaaacttatcatagtttaaaattcaaaaatactacgagacgctaattgataggtaaattgtggagacacttgtacaagtaaaaaaggtgcacggttgtcactttctctttgacatttcacctacaattttgctagttttaattttgtcgatttgacgacaaatataatataataaaagtatttcgatatttgctagttaaaaatagcatagataacctaatatttcaataacctttttcaaatccttcactctcagtaccaaaatagtttaagctaataattctctttacttagggggaaaagaacatattataattgtttttttgctaaataaatgtttcttatgaatcataatttctcttctttttcaatcatctacatgtcgtgtgatacatttagtttcacaagtagatgtaatgctctatcgtcaaaacttagaagtattcagttctagtccaaatttaaattatataacaaaaacatgaaaagtatatgactttgaaaaactcattactcatgtcaattctattttctagttgagtgtgacactaaaataatgaatgtttcgacgtttagagcaggtatttcgttaggtaatatttatgtacaataggtaaatgacaactctgagatatgattaattttcataatcgtaatgtttacttatccataatttcgtcaaaacaatgaaaaatcacttacataatgccctgaccgttcaggtccacctatctcacgtttctccactcttgtaaccatcgacggcaattagctattctcaaaagttcggaaattttgttcccaaaagtgttaagctttatgtttccgaaaatgatatttaaaaatccgaaatgttccatcttctaatatagacatataatcaattaaaaaaaaagtagatgcattatcgagtagtgttacattcatttttactatatgagataattatgaatacaacaaagactagagacaaggggacacaaaaaaaagtattaggaaatcgaaaaggaaaccaatgactggaaaagtcaaaagtcaacgtttaggctcaattgaattcgagaattcaagttcaacatccactccactaatgtcgttttctaatcactagtatttaagaagaccaagtcttagcgttttattaattgattattgtacggatcgtaacacactttgcataaaatgttgttcaactgtctttttaattactttttcaatatagccactttatttttgtagaaagatggcttatctaatgataatgactgatctatattcgaacgacgtactactaatcataagttatatgaactaatgaagcatacattacgtacgtgatcgatcatccttaaaaatcacaaaacgttttgattctacgtttgagattttcgtattttcaaacatgtgttttgagttcatcaaagctaaaattcgatataaaactaaatcgaaaaaagatacataacattttcttttaataattcatgatctcgatgaaaattatttttgaggatcaaaaccaactttttgttgttgctgttactttagactcttttttttttttcgactgttactttagactttgagcgatttttttttaataagacaaaaaagaagccaatgacttgagaatgccatgaattagtaataacaacatcaattttatgagaattacaattagaacagaaccatttttctttctaataatattcaaatcataacaggcaatgggaagagagacgaagatggagatagatcacacagaggaaatgccaaaaataaaaatgtagagcttcagtttcagattgctttaatctcatcccaagtgtttggaagataatcaagattcactcacaataaacatattgaacagaaacatttaagtagatcttaagtgaactcactaacataacagtgagatctccatagatatacaaagcacatcataatattcttcttccttcctaatcgtcgtccaccccacggcgccgttggtactacacgagtgaagataaatatccgagatcaatttacactcaatgatatcgatggttaagataagagcaaggactttgctttaataacttgtgtttttgaggattgtgtgaccttaccgtgactttcgtttgcttggtagtttggctgtttatttgttccaacagtgttataagccgttcctcagaaacctgtaaagcaaacagagtatagttcacgaactctttgatgcataacactcgtgtagtaccagcggcacttgagtagaaaccatatgatgtgtaagaattctgaactatgacattgaaaagtgactgaatttttttaccttctcaactatctgtcccatctgagcagccctcaaaataacatcctccacacctctagctttctcaggtttcaccagagcaattcgagcaactatcgaaaaaaagaaagaaagagaaacataaaagatataataatgacataatgaagaagaaagggagagtaactagatgaactccaacacatttttagatgagacttacttctctctcgggcttgagaagacaatacttgactaagcatcatttgcctacgttcatcagcttccctacacgaatgttccaatcagagaatacattagtttaaatatacaattccaaattcatatacataatacatgtcaactaatagacaatgatacacaccttttagcatcttcctgctgtttctcttgctctggattctgctgattgccctgcttaccctgctaatgatgcagtttagtgaagatcttaaaagggaaacgagccacaaagtacacttctttttgagaaaaaacagatgtcagttaaggtattaaatattaccatgccttgtcgagccatgagctcttgcattctcctctgtctaatagcttctagttcaggatcagcctacagaacaggaagtaaaaggagtaaatataaacataaaaatgcagtgttttaacatttgaagatgaattatctttggctaacattatactgaagattaatctatcaactgcatctaaaaaaacagtcgactccgtcatttcctaggaccattttttcataatacacccaacaaccactgccctactaaatggaagcacatataattcacactacactaaagtgcaatgaaatgaaagtagccagagttgaatattaatattagagagatgaatataattttgatcatcaatttcaattatatcaaagtgaaagcaatgagttgatttcactgaacggtaatacaactcaagaaccatgaataaaccatgaacaaagaagagaatcctgtgaagaaaaccaaatcaacaaagagatcattaaaagcaaagatcaatgtcaaaagcaacataatccaatagaataatttacaaatatagatgaagaactttaacatggaatcacacaccaattcaaacaaaacagattcagaaaaaagggcaccacctagaattaaaacagatccaccaagacggaaccactgatccaaatccctaaagtaacaatcatgaatttcaaaactctaagcgatatcaaacttaaatataattcaagcgaacccagtttccaatcaacaaacagttcaaattattgttacgcaggaacgaaatcaactcaatgcccaaaaccctaagaaaaattcgagtttcctaaaacgtatataggggaaaattgaaagaagggtaatgaattagagacaaaaaaaactcaccatcggagctgtcttcttcttcgtctctatcctccaaatcgaaattgggtctcttcttttacctcaaaaaccaacacagctctcttctctaaaaggggaaatgcttcaaaaacccaaacgtagcttttcttagacgcgcttcatatacagtctgtcccgtttttacatattcgccccgataaagtttgtccttttactattataactataaacttataattcgtccaatttacacccatatctccacccaaaacaagatttatcatattcagtccactatactgtaatatgaaacaacaatggaaactcttttccataaattgcaatctgttcctcacatttctctagattacaaaatttccccttcacctacattctcgttcttcaacgttagctttcccattaagaagaagagaatctcctgcaacaaatcaaacaagctgagaatggattcgtctcagggaatttcagctactacacaacagaagatagtgattctgaatagcaacaacgagaagctagtgggtctgcttcatgaaactggttcaacagaaattgtggtcttgtgccatggctttcgatcaaccaaggttagtgtgtgatacctaatttggtttgttttgatttaaattccggattacacacattttgtgttttgcaacttacttatatgttcatttctcaatccataacttataaagttgcatacttttagttcaatttgtaatgttagttgattaaaggttttgcctttaaaagctagtcatcttcgttgttttggaacttcctttgtctttgcactatggatgaatctggattgtaatcaatatcaatgttgagggaaaacttcaaatctgttctttgcttattccaactagatagtaagacttcaaggggtttattgttttagtcggtttgattgtttcatatagtaagtgatttggaaggttatacactactgagtaactgaaaatcttaccacagtttcctgttatattctttgattactggtttttgaattcaatagagtaagtgcattgacaattaagctaactagcgatttgtacgctaaaggtggaagcatatattgctaggagttttatgtgcattaaacttttcattggctaatgaaactatgcagaatgaccaagtcatgaaaaatgttgctgctgctatagagaaagaagggatcagcgctttccgttttgatttctctgggaacgggtatgtttctcttgcttgctttatcattgttttgcatcagtgaatgagagaatttggattttgttttgatcttccattgtttcagagagagtaaaggcagtttctattttggtaactacaactatgaagctgatgatctacattctgttatccgatacttcactaacatgaaccgtgtggttcctataattattggccacagtaaaggtaactaggactgtttgattttctgcctcgaacaacggattcacagaaggggtgaaaactgacattgcaagaaactcaacttattttgactttatataggtggtgatgtggtcctcgtctatgcctcgaagtatcaagatattcgcaatgtaatcaatctctcgggacgttatgatctgaagagaggcataggagagcgtcttggggaagattatttggaaagaataaagcaacaaggattcatcgatattaaagaaggtactgccatcgctctttggtcttcctgtactgtcccagatcagtactctagtgtctttttatcaattttctggtcttttacaggaaacgctgggtttcgtgttaccgaggagagcttaatggaaaggttaaacactgatatgcatgaagcttgcctcaagattgacaaagaatgcaggtgagatttgctgagttctctctaactcatatcgcatgtttgggattgaaacaaacgatgattgattgtaatggcagggtcttgacggttcatggctcggctgacgaggtaatacccctggaagatgccaaggagtttgcaaagatcataccgaaccacaagctggagattgtggaaggagctgatcattgttataccaaacatcaaagtcaattaattacaaatgttatggagttcataaagacagtcattgtgaagaacaactagttttttttgtttgttttatctctttgagaaaatgttcatgcttcttaacacattttcaactctcattcctcatttttgccttaagaataatagataccaagataagatcatcggataacacggtaaaccattatactaatacttacagaaatgaaacgtacaattgaaataatcgcataagtcaagtagtagtccttgtttgtcatctaagttaagaagtcctatatgatgacaaacatggcttctacttggcttatgcgattacgtttcattctagaatcatggaacattgtcagaaagcacacaacattagtttgtgatattcagcaaccatgaccagccttttgtttgcttgcaaactttatagagcaaaccgaaaagcaagtgcagcctctgcttgtctatggctcgcatcatatggaatacacgaatactcggtcaaatcgtgacgaaaaagatgctggaacagagacctcgtcttaagagctttgttctctcaatgattcagactactttctgtgtcttttgcaacaagatggctaacacgaatctaagattagtaatatgaatacaaacaaaaaaaattgattctgcgtttaattcgtttactggatgagaaaataatcagcatcaaacacatctccagcagtaggagagaggttgtttctccggagttgggcatgagtctctgcttcgtgttgaaatatcttaaccacgttttgtagctccagctttctagcttctacatgttcttctgtgatgggcttctttggccctaggtatctcagaccaaacgcaatcagaacaattccaatgagaaccaagaatacactgaacaagacaaatgcatacggcgtgtgcttcacacccggaacaccatccaggttgacactgaacagtcctaagattatggttagcacaaggccacatcctccaaagatagccaagttatggctaccattaaggctttgatcctgaaaatatcaataactgattcagccaattcatctatgtgccatatatatattattatgtggggacaaacctgtaaccaagagcggatattgctttgaatgttgtcctgaattgtgaagagacgtccacgcaccgcttcttgttcctccaacatttcccttgtgttattcctcaaaccctctaacaaatgtcggggtatgtttcccctcaaatgctgaagaagctccaagataatctcctctctcgcgtgtagtgaccacttcactcggatggtctgccatatgaaacataaacttcatgttctttgtttccccaacatgtaaacattaagtttcgattaaaaacatcaacaaaggcctttctaacatgagagagcaaaattgaagataagatgacctgtcttgctaattttctgatctcttggttgagaatgatactaaaaagattcaaatcctcatggtttctcctaataagaaaaagcatagtatttgttactaaaacatgtactgttttattagataaaataacgggaatacatacatatttataagaacctgttcataaacttcaattcgatttcatcggcagcaccaaatatggatttacgaaataatctgtcaccaatcaatgaccaacaaaaagattttgttagataccttccacaccggactaaaacaagaactttaatattagtttcgtcccaagtgtcactcgaacaggcgatctctaaacttcgcctagtgtctttatcaattgagttaacgacacttggtctaaaacaagaacatttaatagaatagaactcaagtcactcgtttattaagttagatcagaaaattgtggtcacctatcatcccatcgagaaagacggcaagccaagtgtgctatgacttcatgaattgttcttggtacattatagctccctgcataaagcaactcctatgagggatttttttttaccgctagttagtatccatattgtaggcttgtgttatttaagtatctataaagaatcttatcaagtagagtattttgacactttttgaactaacctctacttcagtgataccgagaacattgctctttgatacatttccttttatgtgcatcacagataccaaaaagttttttgcttgccaagagcggaaaacaacgggtacatcatcctcaccgattactggatcacccattgattgtcctaagagttcaaacaataaacccccatcaaccctcaccggaacctaaaaaataaaccgcaatagaagttagacaacaacatccaagaaaaataaacttaacacacttttcattgataacacgtataattagacgttttctaatgcgattatgcatgaaatttgccaattaagaaaatttgcataattgcattaaaaaacgtaaaaacacaggattgcattttcgcctaattacaagtaaaagttcattatgccaaaaagtggatatatagttgggtttttgcataacaaaatgatattattctacgcatactaaatattagcaattgtaaaagaaaaaatatcattgtttacactaaaattatataattaataatataaaaaaaattcacaactttccaataaattttaattatcaaatattactaaaatatatttaaaacattattttgtttatgaagtatatatataaatatgagattttattttgtcattatgcaaagtgtatccaatcaacatattttaaaaaatagtttcattctttttattctgcaaattttcattctataacttataccattatgctataatgtaattttgccggaggataaatgaagaactttattatgctaagagactacacacatctttaatcatacccaaaacaacgatgaaccatgtggaagtattttggaaatttgaagtaattatcagcaacaatttaaaatgttgttgaatttagatactcagaacaaaggcacatacctcatatagaagatgtctcatccgttcacttattagcttactttcatccctcaatgcaagactaattgcaggatgcaaccacgtagcacttctgagccatccctcaacaaaagagtttccagcagtcaagtgacaccaccatgtagggccacctggtcgttcccaatacggagctgctaaatctgtaacaggaacatcttcttcatcatcaatcaactttagattaggccactccgcgtttacttgaacctgttgaactagtttagttattctagtccaaccaataggtacccaatgacttccctcagatctctcaacatgtcctgatggaaggacatgagcctctttaaaatccaaagaagatacagaccttgaccttaaataatcgactgcaggcgaatcaataaacgggttatgaccagggaaactatgtctgatcggtccatcttcttgcttcaagtaacctttataaagttgctttgaatcaacatgtttttttgggcctcgaataaactcaaaggcacaaataatcccatcagtccaaagatcactcttcggaacacctgaatgatttttactctcttgagagactgaatgattctccccattttcacccatggtcagtcaaatagaaaatctaccagcttcttctacggaacttatcacgtgtgagacagtgagagtcaattcacatcagcttcaatatactttctcgcaaactcaactcttcaagatcaaacaggaagctaacttaaactgatgcacttagaatctgtcacatataacacaaatctataagaaccaaaactcattgtatgtaattaaagcaccaaactaacaccaacacaaaaactgcaaaccaacaaatactagaaaattacatattgttagtattttattttgatgtcatcgtgatttttttgtttagccaaaatccaaaaacaaaaaccaaatctataatctaaaaactacttaaaaccccctataaaattcatggccaaggagagacacaaatcctacttataagatcatacaagtttttgactggtttgtagagaattcgagttaatgtgatctccaaattagtcaaaaatatccaataaaagaaacaaattaatttcgagaaaaaaaagtctcaccttaggagaagtacagtattctctttctccagatggctgatccaacactcgagagttcgcaaattatgaatactttacaagcaaattgtttagctttgactttgagagacgcgcgtaaacgttttcataaatttgctccttattgttttacatttttacatagttaaccgtaaagttatgaaatgtgacatgtaacaccaaagaataaagaaacaagggttcatcgatattaaagaaggtcatcgctctttgttcttcatctactgtcacatatcagtactctagtagtagtgtctttatcaaggtgcgggtcttttacaggaaactccgggtttcgtgttaccgaggagagcttaatggaaaggttaaacactgatatgcatgaagcttgcctcaagattgacaaataatgcaggtgagattcgctgatttccctttaactaactcatatccatgtttgggatacaaacaaaccatgattggttgtaatggcagggtcttgacggttcatggctcgactgacgaggtaataccggtggaagatgccaaggagtttgcaaagctcataccaaaccacaagctggagattatggaaggagctgatcattgttataccaaacatcaaagtcaattagttacaacagttatgtaattcattaagacagtcgttgtgaagaacaactagttttttttttgtcttatctctttgaggaaatgttcatgcttcataacaccttttctacactcattcctcattttggtttaagaataattgtaaccaaaataattcttcgttactcactcttttactatttcagacatgaaatgtacaattggaagaatatggaagacgaataatttggtcgaaattttagcgaaatagatgctggcacataaaaatttaacagagacctcgacttaatagctttgttctctcagtgattcagactacttttatcttttatgcaacaacattgtattgacatctctctgaatttagtagtatcttaacagaaaatagattccaagtttgtttactggatgagaatataatcagcatcaaagacatctccagcagtaggagaaaggttgtttctacggagttgggcatgagtctccgcttcgtgttgaaatatcttaaccacgtcttgtagctccagctttctaacttctacttgttcttctgtaatgggttttttgagccccaagtataccaaaccaaccacaatcagaatagccccaaggagaaccatcagaaaagtgaatagaccaaacgcataaggcgtgttctgcgcccccgggatcccatccacattgatcccaaacagccctacgatgatggtaagtacaagaccacatcctccgaagacggccaagttgtggcttactctcaagcttttgtcctgaaaatgcaaactggggttttagccaaatggatccattatgctagatttatgagatacgattttaattttgttcggtggagtaagaacctgtaaccaagcgcggacactgctttgcatgacatcttgaattgtgaagagacgtccacgaactgcttcttgttcttccaacatttcccttgtgttcttcctcaaaccatctaagagatgtcgagctatgtttcccctcaaatgctggagaagctcaaagataatctcctctctcgcgtgtagtgaccacttcactcggatgacctgccatgaaaaaaaggaagatgtcatgcccatgactatagtccatcccacgcacaaacatcagatctcatttaaaacatatcaagacaggtttgagaatgaagagaaggtgacctgtcttgataattttctgatctcttggttgagaatgatactgaaaagattcaaatcctcatagtttctcctaataacaagaaaggatagtatctttagttaaacatgcattgtgtattatcaaaacaaacggatacatatttttaagaacctgttcataaacttcaattcgatttcatcggctgcaccaaatatggatttacggaataatctatagccaatcaaggacaaccaattagatactttccagacaagagcatggtataaaactcaagtcacttttctggtcagcaaaactaggcaagcgttcattagagtaaaggtaaatcagaaaactgttgtcacctatcatcccatcgagaaagacggcaagccaagtgtgctataacctcatgaaccgttcttggtacattataacctcctgcataaagcagctcctatcaggagaatcataaggaaaattagcgtaggtcagaacccatattatagccttgtgttatttaagcttgaagattcttattaagtagaatattttgacactttttgaactaacctctacttcagttataccaaggacattggtgttcgttacatttccttttatgtgcatcacggaaactaagaagttcttcgcttgccaagagcggaaaacaacgggtacatcatcctcactgattactggatcaccaactgattgtcctaaaagttcaaacaataaaccaccagctactctcactggaacctaaggatatgcaacagaactgaagtaaaaaaacaacatccaagaaaatacactacacgtaaatgtttaaactgtaacgggacatttgatgtaacactaaatgaaagacatactatgctcagagactaacaaatattttttaattatatcaaaaccactatgatccatgtggaagtatttcaatagaacatgtctataaaccaaaattaggtggctgaattttgacactcaacttgaatatgcacatacctcatatagaagatgtctcatccgttcacttattagcttactttcatccctcaatgccagactaattgcaggatgcaaccacgtagcacttctaagccatccctcaacaaaagagtttccagcagtcaagtgacaccaccatgtagggccacctggtcgttcccaatacggagctgctaaatctgtaacagggacatcttcttcatcatcaatcaactctagattaggccactcagcgtttacttgaaccatttgaactagttcagttattctagcccaaccaataggtacccaatgacttccctcatatctctcaacatgccctgatggaagcaaatgagcctctttaaaatccaaagaagataccgaccttgaccttaaatcatcaactggagacgaatcaacaaacgggttatgaccagggaaactatgactgattggtccatcttcttgcttcaaagcacctttctcaagttgttttgaatcaacatgttttttcggacctcgaataaactcaaaggcacaaataatcccatcagtccaaagatcgctcttgggaacacctgaatgatttttactctcaagcttcttggatttactctcttgagagactgaatgattctccccgttctcacccattgttcatcaatagaaaaatctaccagcttctcaagacagataatttaaactctgcaagatcaaacagaaagatgttgatttaacacaactctgtagagaattcaaacataacaaagctcattgtatgagatcaaagcagcaaactaacaacaacaccaaaactgcaaatttgacgcaacaaatacaagaaaataacatgcaagtaacataattaaagtacggaatagcataaattccaaaactttagactcaagaagatgaggtttcaaacaaagtaaccttagagtaggcccagaatttataattagaaatagcaagttcatcagaaagtaattataatccaaagatgaacatgattgaaagaacaagtttattgagataaggagatacacaaattcgactgataagatcatacaaagtttctactggtttctagagaattcaacttaaatgtgatctctaatttagtcaaaaatctccaataaagaaacgtaaaactttcgagaaaccaaaatctcaccatggaagcaggttatctcttttctccagatgcctaatccaacactcagagttcgcaattttgatactttttatatcttttcttctttttgacaccctaattacgaatactttaaaagcaagtagcaagctttaagagacgcgcgtcaacatatttgctccatatgttttagattcttacagatttaaccacaaacttaagaaattttgtcatttaacccctcactttcacgattagtaagtattacaaaactctccccggaaatttctgctccgcaacggcttcggcaccaatgagtcggctcttgctacctaaacttttctcaatctctagaacacaggttaaccaaaatcaccctcttcgtgtatgtttatgtgcatgtatgtatatcagggatttgcgtgtgtgtttacctctcttttttttttgttaggttccagctgcatcattgttcaataatctgtacagacgtcacaaacggtaataatttgaattagatttttgattttggtgaagaatagtagcaaaggacggattttgatacttaggttgtaattataaatctgggtttgatatgtatgtgttcttagttcagattcactgatttgttaatacctacgactattggtttatttgatattattctccatttgtttgagttccatagatgacaactttctctaggatttacacaagtcctggcatgtaaagatgtaatatttatgcaatttccttgcagttttgttcattggacgagtaagatgtcaacagatagtgttagatcatccacaactggtggttctgcttctggagctagaacattttgctccctcgcaggtataaattagtcattccgctgctctaccatttgatatttgaatcaagaattccttgttttgactgaatcatgacatgcttcatttgtttggtacttgtgtttattgaggcagtagccaccctaagctttttctatgacataaaaacagcaaatgatttcactcacctctacaatattagaacaacttctgttggagaccccttagccttttcccatcgtccgtggtgaattaggggcaagatgatgacgagtctgtaagaataagtttcaaacaagtgtcaatcttccattgtgtaatgggaagacaaaagttacaccagatcaattcatgtatcagtatccatcattctcatgtccatactagcttaagtagttttctgctgtcttgtagtaaattccaacttcttttgtcatgtcgtttctaaagttttgaagttttggagaatattgctatgatttccttgtgtcgcccttgtaaactacttcttcagcatttataaccaaaaactctaaaaccatgtaaattggttattaatatggtattcttttcgctctgttttcatatctttgtcctagatttatcaaccaaaaagtgtgtgccatgcaatgcgaaggatctgcgcgccatgaccgaacaaagtgcccaagacctacttcaaaaggtaatacgtttgtacttcttattattgcaggtgaggtctatagtatgtatccctcaattgttccttttacacaggttgctggatgggatttggccaatgacaatgatacattaaagctgcatcggtcatggagggtgaaaagttttacaaaggggctagatttcttccaacgtgtagctgatatcgctgaatcagaaggtaaataaatcatcagcaatacaacacatgtgttctgtgacccttctgagtaagtttttcaaaaaagatagctcaaggaagatctgttattattttgtctcacgcatggaccgatattgatgcaggtcatcacccagatttgcatctggtcggctggaataatgtgaaaattgagatatggacacatgcgataggtgagaatcatggtctctgtgtttttgatatgaatcttatcaaatgcctgaatctcaagaagcccctcatcaagtgctgactaagtgatatcggattcttttgcaacaggtggtttgacagaaaacgacttcattcttgctgctaagatcaacgagctccaagtggaagatcttctgaggaagaagaaagttgctaagtgaaatggaatcaagatgaattctgcaagctaaagaaacatctttaaagactggctcagaggtcaatatgaataagcatcttgaagccataactgggatgtgttggtcttaaaactctttgaagcatgccacacaagctttagatctatgtaagatgagaacaaaatgacagagagagtaatgtttcttttgtgtcttatggttcttgtaaagctgtttctagtcttacaatctcaaaaaaaaaaaatcaaaaaaaaaaaatcaggggatttaagtatgaaacaatttataacttcagataataatgtatgtttatttacaaaccacatactatcaaacctccacaaactatgtacattcaagaattgcatgaatctatacaagatagttgtcaatcattcttccaacgagatgaagcgaatcgaacaagtttagtcttcagacaatggagaaattgccggagaccgaacagtttcactgcacaccaacaagaagttttccaggtcaggaacttttccatcattaaagtcagaattacaaattcccttaaactgtgttaacatcacctccccatcttctgatacagatcgccaagcgcacggtagagtgcagcagcggcaggtggccttggcaaagagccaaggaggatgtcagacgcagctagggactggctcccatagaaccgtgagttctcacttgtacgtgttgtgaaaatgcttccttcaagcgagcatccgacaaatgcacctgttcatataatagtgattacgtaaggattttgcaaccccaaaaaaggagaatatacagactgattatgaggcttagttccaaaaacgattttttaataggaatattataatggttgtagatttagagtggcccatgaaatctcgttttagacatcgaagggaagaagtgtaagaaaccttaaccaaaaaacctactgaaaactattttggctagacacacatgaatctggttacctttgctgcagctgtaggtgtagcaagcagcatatccaccactacctgctcggatatccgcttcaactgctcgtccagtcacaccaactgcagcgcttaaaccagctccaacaacaagatgggtgttactcccaaacgtttggatggcttcacgagttctcagaacgataataaagtctatgaactctcctcctgcctacaggtgagtgatgagaatatagaacaaacactgtttgcaatatctacggattactaaaagagctatgttacctgagcaccccatcccaaaccaaatgaagagatggcagagggtggagaccaggagccatcatctctacgagcaaccacaagtccagtcccgattttatatgtaaccataactccaactctggcaacagtgattactgcaagaccttttgcttgtcttaaaatggcatctgggatggacctctcagttctcgaagaaccaacctgatgagagattttcaaattatcaacacactattagaattctgaatttcacagacagaggcaagtcgcccattgacacagtgacatagctgacatttaacactgctactaacttcacaaaaattaaagaagcttaaagtgaattaaggaccacaaatctcaccttggttatataaccccgaagagtgtttgtcgccttatagatctcatactccatggattgtccccatggaaaattcacccaagacctcaacgtactaagatctgtcaagtcatgggttggcaactgagcagcaggactcacttggtccatcaaataaggctgcacagactccaacctcacaaaacacacatcacaaaccctctggggatctgaaacacgaaactttacaggaaccaagctttttcctttagaacaatccctacagaatattcctccacaatatcgacagtgatgacgggaacacataattggatgaaacctcacactacatagcatacaagcagaagcagcgctatccggtagccacttgggtggctcagtctccagaatctctcttgcattaccaaagttagcctcagtaagagtatgagccatatcttgccaagcttgttcaagaagatgtcccgacaaaaaattaatgccacatctctcaaggttgccagaactaagagcactcgctttaccacgcgctgcaagtaacatatcaactatcacatcccacatagttaactccttatcttcatcaaatatctggtcccatcccatatctccttcagggaagtaaccaccattgaaactaagacctcttgaccattcctcatgatcaggttctaacatgggtgggactgaaacaggtatccaaaccccggtttcctcagaaagcggtgtgtcatagaaaaaatatttaccatgcttttgttgttccggttccagtcttttgctctcttcaacaaagccttcacatgaaccagaatcttcttctctagtattctctatgctttgactaacgacattaccagcattagaatcaccatgagaagcacgaatttctcgatctctttcatcctatgatcaccattcaaggagaaaaagttaaacaaaccatttcaagcttaaagtttagacctttaacttgttatcaagacaatgatatacaaaaattaaaaacaccaaacacatgtgagatgtctattaagctaaggatcatactgatacaaataactttgagactaaattctttttttccataaaaatcagtaattttattattaaattaaaaacatttctccacaatcacgaaagaattttgaataaaagtgataaccctagaaattggtatgatcgcgtagaaattgattttaaagagaagaaaaattgtgagtggaatcaaaatcggtaagcgtaaaactcaccatgttctagagttgttccttgtctcgattgcgaagccaatctttcgatttttacaaatttcagaaactccgaaacacgactatgtcgtctggaaaacgattacaacaactttacaagttaacaccgtcgctaacctttctgagacgcgaccacataatcatcatatttatctttattatactttagtcctcatattatccatctcttatatttttgacaccaaacctttcattttgttcattaaccccatatatattacgtctaagaagtgtgttaaaggcgtcggtaagaagtgagatcaactaatggaagtcacatggatacactcactcataaactagctttgctggatttgaactttgaagattctactatgataattttatggagtttggttaaaggcttgataggttcttattaactggtaagagttctaaaaagaaagcctagcaagatcgcgccttacttctttcggttgtgtggatttgtacacagaaaattaggagagtacgagctcatcttgattgagcatttgctagctcaaagatcttgcatgcaggtgaagcaatacgaagtaagaaagagccagaaaagctataagagtaaaagcaagtcaggctcagattcaggttcaggttcagatttgcgtttagcctcatgccaggtcttgtgggcttggctaaggtttgggaacatataaattatagcgaagaagaagtatttacgttataaacatttcaaacgtcataaaacgaataactttcagaagcttgaactttatcatgaaacttcttaaccattctacaatcagccttccacaaaacttaccatcttaggaataatataaatgcatattatctatgacagaatcaaagtagaagactccataatttatgtataccaccgtttaaccaatctccctctaccaacaatagatcaaccttggcttacaattcccctagttcttctttcgcataaataacatcattgcttgtgtgcttacatctggaaaaaagcaatatctgaaatcgttgaaaaatcttgctttccaaatcttcaacaaaagtaagctgtttgctaacaaagtcgaggaaatagccctgcataacaacccacatctttgaatcaggcgtgaaaccagaaacaagcacaagccaggaactgacagacaaaacgaaagacacaacatccaagtctcctgccactgaactagacgaagaaaagtttcttaagaacagagtaaatgtctaagcgctaatacaaaaccagtcattgagaacttcctattgagacattgcagaaacaagcttcagaacctataacagtgtaatgttttaaactagctacaatgtctttgattgactagaaccaacctacaatttcgcatcttgtttagaagaaacataagaaaacaaaagttccacaaagtccaacataagtagcactgttcaaagcaacaaaaagcacatatctaccattttaaactcaaactacataataagaattgtgaatctctgactaagtccacaaagttgtaccaaaaccaaattcacaatgtacctcagaaagattttatcatcttgcaacaggtttttgaagcaaagccgtcaagaaaacttcaccatgtttcgaatcagctttgttagccaccgcccatttcaccttcttataccccaatttcccgatcatcggtgcataaacattttcaagatcaacttttttactaaagaaccgatccaaccaaagataaccaccaccacgaagaatcctatccaaatcaaagaagaaaaattccataaccgtcaccggaatccaccgattcaccgctcttccacacctaaccaaatccacaacaccatcaaacaccggaagccgttgctgtaacggcacatgaagcggcacaagtcctctcatcgccaccgcttcactatacggcgcattaaaattcatcgtcgtggtcaaaaccgtaacattacgagccttcatcgcagcagcgaaagatccagtaccaccaccgacatcgataccaagacggagaacagaattagcagatttagcgatctggagaagctgcgagatcggaagatcaagctcggatttgtaagcagagaactgagatttggatttctctaaggagagatcaaaccctagatcagagaacttagtaatcaaacaatcaaagctcttgcaagagtagtaagaccagagaacattagattcaggtttcgaatctgaaggatttcgcggcgttcgtgagaagcaacgacggcgaggaagtgggtggcagccacggaggatgagtttctcgacgagatcggtgtcagaaggacaaagagagaaaggagtgtagttcatatactcatgaagaaggtcagggtagttatgacaagctgaagctataggtgagagcttagagtagattaaaagctctttaggcgcggtggaggaggaggaggaggagacggcggcgcgtgaggtcgaggttgaagttgatttgtctggttggtgagttgtgaggtggttaatagcggcgcggatagtgtggagctgacggaggaggtgatcgggaactgtgggaacagaggattgtgaggatttgacggtggattggaagaaatttgtggtggaggagaggtggtagagtgagaggatgtttgtagctaccattgctactagtagaagcaagttcaagctcatggtgaatcccgccatttttcttcttggatatggctcggatccaagttcttgaagtctctcacacagagattcttgagctttaatggtgtctttaaagacgagatttgtgggttacggttttagaatcttggaggtagtgacacttagcgaaataagtgtaagataagctttttcatgtaggagactcgctagtcaaaacagagatctgagtttataaaattactattattacaatgggaaaagagaaacatcgaatccaatgtcattattagttttttttttcccaagtttttgcatggaggagtaataatcctggtgaaaagttgttggaacagtaaagaaaacagttaaatttcttggtttaataagcacaaacaaatttaaacagatctgtaatgtgttcacatgtcttgtcctctttcttcttttttcagactagttgtgtctttattgcaacaagatgggatcattaattcattatgtatctgaaattagtggtatcaattttgttacttgatggagaatataatcagcatcaaacatatctccagcaacataactaactattttatcttcacacattaacatagttcaagtgttttactcttctaatttttaagcacttaccataatatgacatattttaggatcatgatttattacaaattgagattaaactatgaactttgaatctaatcgataacataaatctataagaactttgaaactaatatcttaacatggatcaatttggacaaaatttgtagagctaaaaagttgggaagcttaaagtgaaaaacactgcttcacaaagtaactgccttttgataattgtaaccgctaatatgcgcccacacgagtgaatatattctcacacgtgtgtagatttgtaggctaactcgagaaagatcttgacactcttccccttttctctgagtacacaaaaaaagagacaactttctaaaaatacagactctactgtgtcaatgccggaatctagctcaagcttctcgtctctctttcttctactcatcatcttcttcctccttttactctctccatcgctttcttctcccgaatctgaagttcatgttttggatcgtgagctgttagagatccagacgaatccgaagccgggcaagactaataggaaactcaagtgctgcgagatgcggagcagatctcagtgttcggctttccctagatgcaggtggtgtcgtagtgaagctcttgatgacttgtgcttcagtaaagctgaagccttgcgacttccaagtcaagtcttcctttgtgaattatgaattaacaggtttgatcttaaatagcttgttgtagttcttgcggagtttcgatggagatagagagaaagttgttttctttctaatttttttggcttgtattgaatcgcttgttccgttttgtaatctctgtttggtgttattgttgtaattgtttttgagtgtcacaagttttgaattgtactggatctttttgctcatatctattgaaaggtgcttcattttgtgtttctttcttgttatgttttgattttgagctattcactttagctaccatgctctcaaatgaatcgatcatactgtatgattcttgacttgcaacattgttagagaaatggaaataagtgttgttgatatctagaattttcaattgagctgaatatatcaagtactttacttctctaatttttgtgtgagtagaagactaaagtaatgttggtgtttcatatagatataaacacagtgtttttagattgtaaacgacaaaagaaccgcaaagaaaccatcaagccttcagtggagtcaatagtatttgtgtttaaaatgcagctttttagtatcaagtggttcactgattggtaccttggtatgtgttcgtattagaaatgttatggcttgtctggtttagtggatttatatttgtgttttagaattgttctacccgtcactgccggttttggaagttaggagctgctaaggccagaatgagcaaagatctacttaaaggcgtcttttagtgtaagtactgcttcaataaatttcctaatggctgaagaaatacttgaactcaggaacagaaaccattgtatctgcaatagtagcttcttctttgagggtttttcgcatatcatttcgtgaaaatatcataaggcagtagggaagtttcatactatacaactaaactatgttttattccacatatatatgctttacaaaagtgacgtttttcttgttttcaggaaaagcttatgatctaggtatatgcaacattgaagaaggatgcatcccttttcaacgcaaaaaacggattactatatgtataatcatctttcccttatccccctaaaaaacgtcgaagaaaaggaaaaacagatctggaaataaagacatatgcacattaagccagctagtttgcgagcaaatccgtgactgcatccctcatatcttcatatgcgtaacagctttcgagaaactccacaagattcaacagttcttgatctttcaggtcatccacaaaagcctttataggcactccattctctggctgtaatgagtaagaagatggattgtcatcgacaatcaaagcacttctgaggtctttccccactaccaaagataagtcctttacatatttcccgttcacctccgtgcatgagtctcgatatagccgctgtgagatcacaccgttcttgtctagcttgtccaaaacctgtgaagcatattcttccagaccagctgtgaaaactaccactttgtagttttcaccaagtctttccaagaattcagtcacaccaggacgtttcaccacaaagattggcattatctccctttccattttcaccatcaccatgaaatcatgtttaactcccggaagatgtgttgttgcgtgaaccaacgtttcatcaagatcgaggatgattgtccttttcatgttggtatatcctgtcagagggtcctcgagtttctcaaattttgtatagccatgttttgtggctggatagctgatggtgatgcccgtgaagcacctggaaacacaacgcagaaggcgacaatgaaacttcaagatggacattaatgggtaatttttctgttggtgtttgtggaacttggaattttctggggttttttcgatgattctttcagatgccattgatttctcacggttgcttggttccccaatgaagaaaacaagttttggtgaacaaaataggcttgcagctcttcagacgaaaggcttggtagtggtaagatgtttctgaattcatcttctgctaacttttttgtacgataatatacatttggtttagttttgtttgtttatgggaatttagtggtgaagtagagcagatgcctacttttagaaaaatttagtttggacaattagatcatagttttactgtttcatgtactcatggacaagtgtacacacaacatgaactaacaagagatacattatttagtttagttaagatttagaggtgtggagattttaatgggattacagttgaagtatattgctgctgttgttgttgctacttcacaggtatggctctgtggctttggtgtccctggttaactagttaaactataaaacttgttggaatttgtttctaacttaaaatagttccagttttaacatcgtttttatccaatatgaatcacacttattgaaatttgataagttataattgattaggtttcatttgttgaattcattcttctttacattattcatatgaaaaaaaatatatatcttaaatgagttttatgggtcaagcatgaacaactcatagcttcaagagtgattgctctgtgaaactgtctcaagcatagaaagtttatagcctcagcgttatagttgactggagtcattttcttgcagtaaatcattcgttcattgttgtctttggattttagccaccagaacctctagtaacactaataagtaattaaaagcgttcaatggatgtttcaaaaccattcaaggcaatactattttcttatactcaatacgttgaagatagattctgtggggacttattactggatatcatactagatcaaatcaaactctttagactaagatgttaatatcattgattatttgctagtccaaaacttccttttttgtttccttctttgtgaattttcttggttacattatacactttttaatgttctgaagaaaaacagcttacatttttatgcaggggcatttttgtaggtaaaaacgctgaagaaggataaggagcatcctttttcaacacaaaaataccgtcactctgtaccatccctccccaaagaagatcaagagaaagatagaaagaatcccaaaagattgaaaacaggttctgcaaacaaattccatatatatgtgcatcaaatcagcttgctggatagaagttctgctgctgcatcccttagatcttcgtactgataacatccatcgaagaattctgcaagcttcattagttcttgatcttccatgtcatccataaatggcttaatgggaactccattgtctggctgcaacgagtaggagaaagggttatcgtcaactagcaaaacactcccgaggtcattcttcgccaccaaagataagtctttggcatatcttccattcacttctgtgcatgaatctcgatatagccgctgtgagatcacacgattcttgtcaagtttatccaaaacctgtgaagcatattccggtaacccggctgtgaagattgccactcgatagttcttactgatcctttcaagaaactcagtaactcctggtcgttttaccacaaacattggtataacggctccttcgatctttatcctcaccatgaaatctacattaacccggattggtggttccatcgttgaatgtaccaatgtttcgtcaagatcaagaaagattgtccttttcttgtcattacgtcttatcagaggctcgcgtttatggagttttttgtagccttgtttcatggtgggtcgacgggtaggagttgcgctagatgtggtggcgagacgcaaaaacctggagacgcaacgcaagaggcggttgtggaatgtgaagatagacatgttgagggatgtgaagatggagccagctgctgcaacggctgcagccaaacatctggattgatgattccggtttttccttgcatgtttatgatgacgcccaaatgatttcggcgtcggtttccccagaaatccatgacacgccattatcaagaaatcagagttcaaaacgttgatgagaattccgggttcttttgtgcagctggctcagatggaaacctgtagaaattgtgagatgtttataatgctttaaaggttctaacttccaagctactggctttggaacagaagaggacttgatttggtagagttcagtttattcaggttgtgattagctctgagttatttttagtaaaataacagtttttaagtcattgacacatatttgagctctgattgttttctccatgtattttctcattgtacagcaatatataaatgtgaaaacagaaagttaaggaaaaaatgtttgaaataatagaaaggtttagagaatttcatgggattacagttaaagtaaatgactagctttggactgcttatatacttttggatcttattagacctcttgtacgtacatgtaatattgactaaattaagtactactaatcattatacacactgcttgtgaagagagactgaaattacccattatatcactcatcacactcgttttaaaggacattttaaatccaaaccatatataagattaaacttttattagtaagcatgaatttacaatttaatcaaagaacttttggaactaaagttaacaggaagtgaaaataccattgccgtgttaaaaacatgatgtacagtaactgttgattcataatctacctccagactccagttgggtttgaaggcgatctgtctctaggttgtgttcttgggatgataagaggtctacaacaaaccaacgtgaaaagcaattccgtaatgaacaaactcatgctgatccagacgaacaaagtcttccgccatttccatataatttttctgaagaagggaagaccggattcaaccgatagggatgcatcgtacagctctggaatacctgctccgggtcgaaattctgcccgttgttcgattattatctttaagcaagcagtgggaatgtccttttctacaaagcctttcaacttcaagctcaaggtttggatctcagagacatatcctgtcactaacggaaccactttgaagaatgtctgaacaagacgaataggctcacttctgaatcttaacatgcacggacgccttatactagcaatcgtttgaccatccacagataagaagtccacccgaaccttcaataaacacatgatcccatatcaaaatggatgagcaaaacataagtaaatgtttattggacaaaaacgaatacacatgagaaactatttcaagccagagcaaactgcaatgcttagacttagagtgtaagatatatatctcatgccaatacctgaaacatgccgagatttttattgtacgcagactcaggtaatgtcattgaaagaatgatatctaacttctggtctcgagggataactcgcaaacccctgatcttcgacatttcattactttccttgcaacttccctcacattcaacaccagcacacgaggatatgggcacatatgcttctggactattcttggtgtaatcaaaattcaaggtctccttgacctcaaatggtttatccgctatacggttaatcacataaccaccaatcataagcgacgaaaccaacaagccaaacaacacaatgcctacataaacagcccaaaacataccccaaccaaacttgcacacaatactcaacatttgttttgtatcttttaacctaaaaggattcatataaccaaagatcatatcacttattcctgctactcttgccattaaaaagcgtctgccaaacctaatcgtgctaaagggatcgaaaaagaagagaaaacagttacggagaagccatggaggaaatgtgagtaagcttgtcatgaaactgacttgaaattcgattgctttgatcactagcccaaccaaaaacccaaggagagaccactcagtggaattaggtggctcccgaaactgtggtaccgatccggcgtagtcgtcgtctccttgatcatcgctgctcacggtagtcaccgtggattcttcctgaaacgggtcaacccggttccgacccgaatcaattacatccatatcattcccagacgaactaattacatccaaatcgttctccttttctgaagatagatcaattgagtccttagttgattcaattacgtcgcttgtatcaatatcccctctaagctcagcgttcttttccacatagctggatttctcaccgacatcaaatccatcggaagaagaagatggctccgtttcaatatcggacgaaattaaatcccggcgatgtgccgactttcgccgccgtaagagagacgaaggttgatgggaattggaacgaatcggtaagcaatcgtagtaaaattcgtcaggtgcgtcgaggaatcgatcgaattcgtccgtggtgctagggtttgactcggactcggactcggagtccattgatggtgatgataacccagaagaagaagaagagattgcgtgagtttggggaatttctaaagcatcggtggcgataagcgtgatagctcacaaacggcgtgaccgagttttttttatttaattttaaatttatttatatacgtcactctttggcctttgcagtcaataaccggagcggaccatcaaaccggataattgagaaccgaagataaaaatgaaactaaccctagggaagttactatttttttttttggtcaaacaggaagttactattaatttctactaatgaatacagatacaaggtatctgaatctgagagctgagattagaaagtgattgtttggtgggttagttagatagtcttccacaaagatatgagtgttggactgaaatttatctcactaatcaacttttagtgataaaataataaaatagtttacaacgtttatataaatgtttgttctttacttattttcccattcaatcatagcaatatactttacttattattttttaattaattaattattttacttaactatttatgacaatgttactgttgatagagattgttttgtgttactttatatttaatttcttttcttaaattaaataaaataacagattttttttataggattagtcattaatcgaaacaaatctttgggggatgtattatggcctatattttgcgtgggcgagacggatacctcagttggagttagaggtggattcagagatagtggtgggttttctcaagaccgggataagcaacacacatcccttgtctttcctagtacgtttgtgttatggctttctttcgaaggactagagagtctgaattacacatgtgtatagagaagttaatcatcttgctgatgggttagctaactatgcattttcgctccctttaggtttgcatttttatgatgtatgtcctgacggtttgtcgtcttgtttatctgacgatgctcgagggtctgcgtacccgcgtaaagttcttttgtaatatttttttgttcttttcataaatttgtagggggcattgccccctcaccttaccaaaaaaaaattaatcgaaacaaatagggttggtctagcggttaagcggaaattaatcggactagatgaagattttcaaaaaggagaactatatggtttttaaactatataaaaaaatatgatttacctaaactatgtatcctttaatttatgttacacttgttgacaacaagttcaaagaggaaatatcaaagagcggatatgtatgggttaagcttacttttgctaatgtcaatttgtttttttgttttccagtgtcaatttcattttgaattgtcttttgtcatacacattttgtcttcaattaatgtaagataatctacgttttctttaaagaaatgtcgtaaatcgtaatgaataattgtctacttcaaaaaaaagtttgaaaaattgttctttgactattttgtgcaactattttggtcttcaaaattaacaaagcattcacacaatgaaaaagcgggtaatttctctaaacagatatctactatttttgatttacgtcgctttttacctctaatggattatttgttcaacttttgtagggtttgtggtttttctcattgtgggattgtaccattcttttttttttcagtcaaattcaaaatttgactaataataatatacgctgtatagaaatttttttcactaggaagttaaaaaaagaaataaccagaaaaacgaagggaggaaaaaagcacagttcgtagattctctgtcataattctacgaatccactaaatcatcacacttgcctaaccaacccagaaaaaaaattcagatcttcttcttccctaacgatttatcattttcgatgagacattgttttacagagatatttttgttgcaatgatatctctgtatcaaatattggccgagaagaagaagaagaagaaaaatgatcttaacatctttgcattttctgtttttgccatcatttgcttcaaattttatagtgtaaatgctatcaaattaccgcagcaagaaggttggttttcaagttacttcctttctgtttttgggtaaaaaaatttgaactttatcgtttctctttcctttttggattctgggtttacagattctatgcaaagtttgctcctttttctcattttatttgtaaagtttccttttttgggttttcattatctgttggaaatgggatttcatgattggtagccgcaacaattccggtgacgttggggtttttcatttttttaattgaagttttttgagtccaaaatctgcaggtgttaattgggtgtgattaggtccattagggtttattaaatcattttttgattgattatggtttgaatccccttgaccattgagttaccttgagaaagaacttgtcatatttttgtattaaactcttcattaggccttctttcacatgatgatgatgatgatgaattgatgatcctataaactgttgaagcaatcattcatattttgttgtggttgatgaagagttctagataaattgtttatcctgctttagtttgatgattgttaaggccaagaagagtgtaattcttgttgttgctcaagtaattgaactgatattttatgatgtttgcttctgtgtctgttccttagtcgatgctctgcagcaaatcgctaccacattgggctcgaaattctggaaattcgatgctgaaaattgtaagattgaaatggtggggttaactgaaactcctcctccaacagctaagcaagaaatagaatgtgaatgcagtcccactaacgacactgattgtcatgttgtcaaattgtaagaattctcttgcacccttcattattgaatgtctttcaacttataaggtctcaaaaggcattgtggttatattcgtgtttggttatgcaccgttgattactgatatttgctatgtagaattgagaaattgttgtctctagggtcttcgaaattctttaatcactttctaattgatttttgacttgttctttagtgcattcaaggaccataatcttccaggaactcttcctcaaatagtcaagcttccctaccttcgggagatgtaagtgctcttatacaagtaactcaaccttgctttaaactagctaggcaagttaaaagctgctaatttgatcaatggttcttgctatattttagagacttggcctacaactacatcaatgggaccttacctcgtgaatgggcttcttcaaatttaacttttatgtaagagtgttttcatgttatgttttagttttagtttctaaatgctcttgtacagtaacagaatgtctctgcagttctcttcttgtgaatcggttgtctggagaaattccgaaggagtttggaaactcttctctaacatacttgtaagttttgagcatcggtcaatcttttttgttctggaaatttgtttggtctttatttcaacggaaagttcatgtactaactatccatgagtttagctggtggaaatattacaactttctacctcttgaaacttgcactactaggtcccactattagcctttcctgagggtgaacccgttaaaattatcatgttgtatgctttagctgaaatttgaatacttcagtacacttctcttttggaaagctttagcattctctatgggactgctgttgtaatacttttgctgcttttgtatagggatctcgagtcaaatgcgttttctggaactattcctcaggagcttgggaacttagtccacttgaaaaaactgtgagagtttctgattccctgtccgttcttggtttcttttgttgtgacgatgttttagcgcgtggtgtgtttctgaaggatgagatctttctggtgggtcatttcttcttacaggttgctttcctctaacaaattgaccggaactttgccagcttcactagctagactacagaatatgacagatttgtaatcttttgttatatttccctttaacttaactacttattacggtggaatctgttgttcatctgcttcttggttttaaacaatgcagcaggattaacgatcttcaactcagtggaacgatacctagttacatacaaaattggaagcaactcgagagactgtaaaaatctatttattttataactcttttctgttttgttagcactcagtgatgatattctcttcataccttgtagtgaaatgattgcatctggtctcactggtccaatcccatcggtcatctcagttctgagcaatcttgttaatctgtgagtagacaccactcttttgacgtccattttttcttcataaacttaatttgttttcatttattgcaatggagatcacacttttattataatgccctattgttttcaggaggatcagtgatatacgtggaccagtccaaccattcccttcgttgaagaacgtgacaggtctaactaaaatgtaagttagttctgtcatatgtcttcgtgaagctgtttaatctatctctgattttatatgatttttgtttatttaatctttgtagtatattgaagaactgtaacatttctggacaaattcctacttatctttcacatttgaaggagttggagacactgtaagcatgtcttcctgacattttcatatagtctcagcgaactacattatagattattagttgatataccactaaagaattatgaactgaaagcaagttaaaggaggagtaggtttgtacatgaaacacaacatgactgattaatttttttattgtgttggtgaatagggatttgagttttaacaagttggttgggggaattccgtcgcttgcacaagcagaaaatttacggcttatgtaagtgaaaagattctactgtcatgtatgtttaaaagttctatcttactttgacttaaatttattatttgactgttttcttttgcagaattttggctggaaatatgctcgagggagatgctccagatgaattactaagagatggaatcacagagtatgtatatttctggagcttgcaaattgccttcacattgctttctcacgaaactaggaatccaagtttttttgctgcagtacatcttcattttgatgtcagtttacttgttgatgcagagatctttcatataacaatctcaagtggcagagtcctgaaagtcgtgcttgtcgcccaaatatgtgaggatatcgtcatgttttcttcttttacggttttggtggacataattggcatttagctgacaatttatccgacttctcttgttttaggaatctgaatctaaacttgtttcagagcacttcgacaaaaaaatcgtaaggtcttttcttttgattatctttagcatctagaggctgtgtttgtatcttatgtatacaagctagaaagtgtacttcgaagaaattcggctgaaatgtttgtacttttcggaaaaataatattccacaattgatacggatatgcaattcccaattgatgtttttgtaggagcaaatttctgccgtgtatcaaagatttcaaatgtcctcgatgtaagtacacttatctacataacagtgatttatttgctaacaatcacataggactaataatgatagatcgtttcacaagagtctcgcatttgaaaattgaaaccaaccacctgctaaattgccttctactttagtcccacgtcaatattgttatttcctgtcttgttatcatcataacatagaaatgttgatgtgtaaagatcacttgattattctctctcaatttatgcaatttggtatatctggcagattctagctgcttgcatgtgaactgcggtggaagcgatatgtatgttaaggagaaaaaaacaaaagaattatatgaaggagatggaaatgttgaaggtggtgctgctaagtattttttgaagcctgacgctaattggggatttagcagcacaggggacttcatggacgataacaatttccaaaacactagattcaccatgtttgtcccggcatctaaccagtctgatctctacaaatcggcacgaattgctccagtatctctaacttacttccatgcctgcttggaaaatggaaattacactataaatctagacttcgctgagatacggttcaccaatgatgaaaactataaccggcttggaaggcgtctgtttgacatttacattcaggttagcgtttgccccgctggtgaaataaagcagctgtgaatgcaattagttttatttttcttaagcctcttttcttcaggagaaattagtggcaaaggactttaacatcatggatgaagcaaagggagctcaaacacctataatcaaaccacttactgcctatgtgacaaaccactttttaaccatccggttgagttgggccggtaaaggaactaccaggattcccactagaggggtttatggtcctatcatatcggctatttccatagtttcaggtagctttcttattcttgcagcagccaggtggatgtgtgcatctgattttgtatgcattttgaactcttttctcaccacagtattttttcttaatacttatatcttcaatgtacagattccaagccgtgcgaacgtccgaaaactggaatgagccctggagcatatattgcaattggaattggagcaccatgtcttattatctttatactgggatttctgtggatatgtggctgcctcccaagatgtggtcgacaacgaaaaggtgatcactgctctttttttgcagttctttttacttttgatattgagttgataatagatatacctgagtgctttttatgaagttggaagaaagtgtatttttcttgtttattgattcttagtttgtcccacagatccgtatgaagaagagttgccttctggaacttttacattgaggcaaatcaaattcgctacggatgacttcaatccaactaacaagattggagaaggtggtttcggtgctgtctttaaggtaaagattacgagatgaaataattctttatatacgaagaagttaaagttgtaatgcagttcatgctgacataaaatatcatttgcagggtgtgttagcagatggaagagttgtagcagttaagcaactctcatctaaatcgagacaagggaaccgagaatttctaaacgagataggcgcaatttcttgtcttcaacatccaaatctcgtcaagcttcatggtttctgcgtcgagcgggctcagctattactggcgtacgaatacatggaaaataacagtttatctagcgcgttattcagtgagttttttttcttatttcccaccttttgctaatgaaggctttttgatgcttcggctctaagtaaaatgtgtttttgttgcaatgtttaggtccaaagcataaacagataccaatggactggcctactaggtttaagatttgctgcgggatcgcaaagggtctcgcgtttctccatgaggaatcaccgttgaagtttgtacatagagacatcaaggccacaaatattttattggacaaggacttaactcccaagatatctgatttcggattggctaggcttgacgaagaggagaaaacacacatcagcaccaaagttgctgggactatgtgagccctgagcctgcctttttttttttctgttaatcgtattatttactattatgtttgtttgttcaccagaagaatcatttgaacttctctgcagaggatatatggcaccagaatacgcactgtggggctacctaactttcaaagcagatgtctacagcttcggtgttttggttctagaaatcgtcgccggcataaccaacagtaatttcatgggggcaggagattccgtttgcctcttagaatttgtaactataatctgatcccaagttgcaatttgcttatgaacttttaaaaccaaaaaacggttttcttgataaacctttttgtgatgtatctgcaggctaacgagtgcgtagaatcggggcacttgatgcaagtagtggatgagaggttgaggcctgaagtggatagaaaagaagcagaggcggttataaaagtggctctcgtgtgctcgagcgcttctccaacagatcgtcctttaatgtcagaggtcgttgctatgctagaaggtctatatccagtgccagaatcaacaccaggagtaagcaggaacgcaggggatataaggtttaaggcatttaaagatttaaggagaggcatggagaacaatagtaagacgcagtgttctgttaaaagctatccgtcttcttcttcgacttcttctggggcaggacaagcagttcaagaaagaaagaaagaagagtcaaggccttgaagaggttttgaatccttccctctcttttttttttttttgtaaaatgtctgtctttagtaaaatgtttatgagtttattctgtgattagtcatttactgtaattccccatatctgtatttaggttctgttagttggggattgaatgttgtgaaaactcaaaactcaaatgatatataatcagtgatctttcataggctggatttgtgaaatgatttgtgcacaaaaaaaaaaaaatgtaatcttaaagaataagcttcctattgtcttaaaatagtctgcttcaaaggatgagttgacttaccaagaaaaggaccaaattgactcaagtccgtatagtactttagtacttgttgcataaaactataaactactttgtcagagaatcagtgaaactaaaatggaataatcttaattctaatctcaactagtttttggatccatgtgaaagtataagtcaactatcaagaaggttgattgataattgaataaaataaccaacaagttcaagtgttcaacataagaagtttcatgtaaaattcaatcaaaattattaatacaaaactgatcaacccctccaattttcatttgttgacaaaactagccacatccttcgaattgggactaaacatctaaaattagagttgtttatgaaaggtttttctgaaagtggtgacaataatgatgacttagaatcatgaattctcacaaggtttaacttttaagtatgctcttctagtagtagtactacaagtagaatgcaagctaaaagggtgaataagctcaatttcaaaggttctcctcatactgtaaacaaataaaaacagagaggttgcatgcactgtaacaaaagtgctacatttatccgggtttaacaagcaacagaccccatgtgtaaaactcttaatttaagcttagtcaaacttcatttcaagacacttcacatctttcacaattttctatatatatgattatctaactgtaataaagaagagttttagttattttctttagaaattagtactatatacgtagtgttttcaagtgatgtatagatcacttgcacataatcttcaatgtctgcagcttacaagctcatgatcatgtcgcgaagccgcctttttagctctctactctctgttcttactcttatctacttggtctgtacagtattatctgcttctccttctctgcacccagatgaaggtttagtggttttactgcattatatatttgccaaaacaaaatggcttgtctttatgaatttgagcttaactttattgtgtttctgattgtttgtcttttccagtggaagcgcttaaggatattgcattgacactcggtgtgaaacacttgaacctaagtgaagatccatgtctcacaaagactctggttataactcaagatgttctcaaggaaggacaaaacagcacaatcagatgtgactgtcatttcaacaacaacaatacttgtcatattacacacttgtaagaaactagccctttcttttactgtatatagtatatggttatcggctctatataagtaattttgcttcatgtgtagtgtccttaagacattcagtcttcctggtagacttccaccagaattttcgaagcttcggtatcttgaatttatgtgaggaagttctttttgtgttctgtttcctctgttttcaatgttgttgaggaaacattataaaaaagaactttttttggttgtttgtgtagtgacttgtgccgtaattatctttatggctcaattcctatggaatgggcttcactgccttacctaaaatctatgtaagtctttgttctcaagtttcttgtttgttaaggaagtaaaaaatgcttctgagttaacctgaaatgtatcctgcagctctgtttgcgcgaatcgcttaacaggagacattccaaagggattagggaagtttattaacctcactcaattgtatgtttctaccgttttattagttcatatgatgtgattatagataaagtttcatactcttgaaatttgaaactaagtttttttttgtctgtttgaatgatttcagaggtcttgaagccaatcagttctctggaactatcccaaaggaactagggaacttggttaatctagaaggattgtaagcaaaaatctgttaatcacgctttaaatcaaaactttaagtttataaattaggtgattctattggactatgtattttaatcttgtttttgttttgctgattctctctcagagcattttcttctaaccaactagttggaggtgtacccaagacattagcaagactaaagaagctgactaatctgtatgctcctctttcttttcattacaatatggccagttttttatatgtgttgttatgtataacacttcattcattctattgtttgcagacgattcagcgataatcgccttaatggatccatccctgagtttatagggaacttatcaaaacttcaaagattgtaagccaagaaattctgcattatagttttaatagcttgaagcattacaaagttttctgacttgtgcctatctttgatcagagaactttacgcgagtggcttaaaagaccctattccatactccatatttcgtctagagaatctgattgacctgtaactaatccatttctcaatacattgtaagttacagaagcatgttgctcttcttgaatctaaactgtagccatttctttaaacgcaggagaatcagcgacacagctgcaggattgggacaagttcctcttataactagcaagagcctgaaatttttgtatgtccatacatctaattatgtgtctggaccagagacaagatcctacgttttacataagtgtttaagactcaagattgattctgttaactttccagggttctaagaaacatgaacttaacaggaccaatcccaaccagtctttgggatcttcccaatctcatgactctgtaagtttcatgtatatatgtttatatcactcttcataatgcaaaaaaccaccatcaattattttgactatgatgctttttattttccgggcagcgatctttctttcaatagactgacaggagaagtaccagcagatgcaagcgcgccaaaatatacgtatgtgcaatcgtgttgaaagatgagagcattttgtaatatgaaaaagttttgaattcatttcctggtttcatctttttcagatatttggcaggaaacatgttgtcaggaaaagttgagtcaggaccttccttactgcaagcaccaatatgtatagccaataataacttctctaatactcaaatatgtcaaaaatatttcaatctaatctctattttttcttgcattggataaacatatctgcagtgatctctcttataataacttcacatggtctcaaagctgcaaagagaggaagtatgttcttctattcttttcttaagtacttattttaagactttctgaaagcttaaaatatgtattttttgatgcagtaatataaacacatatgcgagctcgcgttcaacaaacagtctgtaagaacatttttgacaatcttatcaatcacaggtcattgtgtatactgttattaactcattgttcttgatacagaaccagacttcttccgtgttctgccataaacctatgccaaaattgtaaggttttgtttagttgtctcttgttttgccaaatgttcagtttcaagtttttggatatgatcttgaaagaaattcattttttgcagataataggtcgttgcatataaactgtgggggacctgatgtaaccatcgaaaactctagaggaaggtttctatatgagggtgataactatggacttaccggatcagctacgaactattatgggaaaaattggggattcagcaatactggtgactttatggatgatgcaataacagaagatacatacacagtttcatcagaatctgcagtttcagccaaatatccagacctttaccagaatgctcggcgttctcccctgagtttggcttactttgccatctgttttgaaaatggaagctacaatgtgaaactccattttgcagagattcagttctcagatgaggaacctttttctagactagcaaaacgggtttttaacatttacgttcaggtacatatagccttttggtgcagattccttaagacccctttttcagcgtttgtagttgattttttgaagtttgaactttgttatctctttaggggaagttgatttgggaggattttagcatcagggaggaggctaatggaactcacaaagaagttataaaagaagtgaacacaaccgtgactgataacactttagagatacggttgtactgggcggggaaaggcacgacgatcattcctaaaagagggaactatggctctcttatctctgcaatctcagtctgtcccagtaagtaaaatctctgtaaaagaaaacattaagtttcactcagaatcctaattcttttgttgttcttgttttatcaggttcagaatctgaatgtggcggtaagaggaagaattgtctagtcgtttgaatcctcaatttgtctaccttttatatctgaaaatgaatcactccttttcactttctgcttctgtcaattttcagttccggtgcaaattcatccagtcacaaaacaacaacacaaacaaagaaaatatcatctcattctcggcatagcagccttaatagtctctctttctttcttgatattgggcgctttatattggagaatatgcgttagcaatgcagatggagagaaaagaggtaacatcggttaaactttttttgtcggtgtttttggtaaatgaaagctcaaagagatatctatctgataacaggttccttcagtttgaggcaactaaaagttgcaacagatgattttaatccgttaaacaagattggagaaggcggcttcggatctgtttataaggtacaaaagagtctcaagctctagaaaaatcaatgttagtattcttaaaaacaggtaacgttaaaaccaaaactcaacaatgcaggggcgcttaccaaatggaacgttgattgcggtcaagaagctatcttccaaatcatgtcaaggcaataaagagtttataaacgagatcggtataatcgcttgtctgcagcacccgaatcttgtgaagctttatggatgctgtgttgagaaaacccagctgcttcttgtctatgagtacttggagaacaattgtcttgccgatgcattatttggtaaagttctgcttcttcttcacctctgtagatgatcatattgatctgatagagaccaaatccttttactgcagtctcttctatctttgagatgattgtttgcttataactgttgggtgcaggaagaagcggtctgaaactagactggagaacaagacacaaaatatgcttgggaatagcaagagggcttgcctttcttcatgaagattcagcggttaagatcattcacagagacatcaaaggaacaaatatactgctagacaaggatctgaactcaaagatatcagatttcggattggccaggctacacgaagacgatcagagtcacattaccaccagagttgcaggaacaatgtcagtcttacagtcagtcatatacacataatccatacttatgataataatgtctcagtgacagttaatgttgttatggttgcagaggatatatggctcctgaatatgcaatgaggggtcacctaacagaaaaggcagatgtttacagcttcggtgtagtagcaatggagatcgttagcggaaagagcaacgcaaattacacgccagataacgaatgttgcgttggccttctcgattgggtacactaaaaccaatccttttacactcacaagaactcagtttttctctcaactgggtacttataaaggttcttgattttcaaattccaggcatttgtactacaaaagaaaggagcatttgatgagattctggatccgaagcttgaaggagtgtttgatgtgatggaggcagagagaatgataaaggtttcacttttatgctccagcaagtctccaacattacgaccaactatgtcagaagttgtgaagatgcttgaaggagagactgagatagaagagatcatatcagaccctggagcgtacggtgatgaattgaggtttaagaaaacggcggagatagggtcatcgtctttaccttccgattatcttgtgtcgattacttcgtcctgtgaatctgcttacgatttgtacccacttagtcccgagtccgttgttttctctagaccctagatcccattgttaacgacctttacataacaatctctgttacatttttttcacaaatttcattgtcaaagactgaaacttttggtttataagaagaagaaaataacgctttgtagtcattgaccaaaaatcgttaaattggggtatgaaattagggttctttcgttcgcgccgtgggtgtactcgtaagccagctatgtcgacgttatcaccctctccgccggaaagaacatcacgatgatacttcccggtggctccgtcctgagctcgacaatggcgcctacattgcagcacttcttcttccccaacgtgatgactttgaggtctgtgattctgttattttttggctttcaagtatcatcagtggacaaagagaaattcgtcaaattgcagatattaagaattctgatgattgaaatgcagtaggccatagctttttgtctggtagagattgtaacttggtaagcttgaagctgcattttgcgttgacatctatgaagaaagaacacacacagataacgagattaaaactgcataattagactagagctgtagagtgtcatcacttcgtgaattatggtggtcacatctctgttattgatcgggtcatttgctagcttataccgtgcatcaaagctttttcttttgcttagaatctatcatgaactgttgaggacactctttgcagtgattagttttaaatcaggtaacaaagtcttgccttttttctagctacaatgacttcttcatgaaatgttagtcaaatcaagttaaatgttctggttaacacaatttgcaactgaggtatcaaatgccatgttatacaactactaatgtgacatctttggtgtctttaattttttacatcatacttcctcttttagtcttgtatctgtttctctgtgcactggaagactttttattggctgagcatatgtctctagattgtggttttgacgatgattcgggaagaaaccattcccaaaacgtgtgtaatgaagttataagcatgaagtctctagagacaatatgatagggacagcttgatttcttgccctgtaaacgttttacaccattggtaagatgattttcggtgtgcatgatattttggataacaagtatgtcattgtagatttcatggtagtctgatctaaaaatgatgtcttatttgataaggagctagggatagggaattcttgcgtatgagagagtctgagatatatttggttatttggatctctctctctggcagttgcagagcttctgactttattggcctttaacagaggacattcaataagattaatatgagtaaaccaaattttatacccactagctttatagatccaagggaaagtagaagtcaactctcaagaagactgaataaaatatgcaactagtcgaagtcttgtttcatgtactcaaccaaagttatgcatagaaattgtcaatccctccaatttttttatctattaacaaaacaagccatgatcttcaaattatgtgactcaagatctaaaattagaattgtttaggctatattctgttgaaagtgttagcaataatgcttttggaaccataaactcctactgctttttagccttttaggtgttcttctagtagttctgcaagtaaaatggaggcgaaaggctgaagagaattttctaatatttctgctcatattgtaaataaatccagatgagaggctggattgtaattatcccctgaatttggcaagctgcctaatacaagcaatgactaaccccatgtgcttactcttaacctcaacttaggcaaactgcatttcactttttcacaattttctatatatatatatatatgtgcattcgtattgtttcagttatatattatttatgtattgttttaagtcatagatagatcacttgaacacaatcttccatgtctgcagcttacaatctcatgattaagtcgaaaagttgcctttttagctcttctattctctttgttgttacacttatctacttattatgtactgtatctgcttctccttctctgcacccagatgaaggtttagtagtttcaatgcattatatcatatatacatgtgcctctctttgtgaatttgaactaaacttgattttgtttctggtttgctgtcttcgccagtggaagcgctgaaggatatcactgaaacattgggtgtgaagcacttgaacctaagtgaagatccatgtctcacaaagactctagtgatatctcaaggtgttctcaaggaaggacagaacagcacaatcagatgtgactgtcatttcaataactacagcacttgtcatatcaaacacttgtaagaaaaaccattctgaaaaagaagaaactaaccgtttttctgcttatttctcttgtttctgaccaattactatgtacctcatatctagtgtcctccagaaattcaatcttccaggtagacttcctccaatgctgtacaagtttcggcatcttgaatcgatgtgaggagggttttcagtgtttcaactactttcaatatctactgctatcgtagaagaaacataacaatggctggaattcttttgcttgtttttgtagtgacttatacaataattacctttatggctcaattcctatggaatgggcctcactgccttacctcaaatctatgtaagtctttgttctcaagtttgtttattgctaggaaagtaagaaaaggttctgaagttacctgatatatttctccgcagctctgtctgtgcaaaccgcttatcaggagacattcccaaaggattggggaagtttattaacctcacccttttgtatgttcttaacattattttgttgatcttatgagattacatataaagctttttgtcctttttgaaaactaaatctttcgtctttttgtttgattgcagagttcttgaagccaatcagttttcgggaactattcctaaggaactagggaacctagtgaatctacaaggactgtacgtaagacccttttaaaaatcacttttgaagagatcgaaacaaatttatgacccagtgattttctcaaacatgatccatttaattttgttttgctgattccagaggactctcttccaaccaacttgtcggaggcctccccaagacattagcaaaactaacaaagctaactaatctgtaagatcatctttctcatctggattactaacaaaatatcagctttagaatgtgttcatcatgctgaattgtttttcattatattgtttacagccatttaagtgataatcgcctgaacggatcgattccagagtttattgggaagttaccaaaacttcaaagattgtgagtaaagtatctttatttttcattacacttaaatagttagtatttgtacatttcaatgttttctgacttgtgctgataacgttgtatcagagaactctatgcgagtggccttagaggacctattccagactccatttttcatctggagaatttgatcgacgtgtaagttttttatcctctttagatatttgttgaagcaataattttgtaagttgcagaagcctatgttcttttttgaaacgaaattgtggccttttctttctatgcaggagaatcagtgacacggttgcaggattgggacatgttcctcagataactagcacgagcctgaaatatttgtatgtaatagtacatttttatgtctcaggtccagatacgatcatatggtcaattacttgtgtttagactttagactgatgttgatcattttcagggttttgagaaacataaacttatctggaccaattccaaccagtatctgggatctgcccagtttaatgactctgtaagtctcatgttttatcaccacgcatcttgctaaacactgtccagtctcttataagttataacgcctttttttttgacagggatctttcctttaataggctgactggagaaataccagcatatgcaactgccccaaaatacacgtaagtcttaaagtgtcagatgatcaaaaggattaggtatgctattaaaatttactatagctgttgaactcatctcctggtttcatttttcagatatttagctggaaacatgttgtctggaaaggttgaaacaggagctttccttactgcaagcacaaatatgtatgaccattcttattttatagcagtcatatatgtcaagtcatttctcggtattacactaatctctccttttaccaatattcatatgtgcagtgatctttcctataataatttcacgtggtctccaatgtgcaaagagaggaagtatgttttttctgttgttaactaccgcctttcatctgcttaaattttctggatacttttaacataagtttccatgcaggaatataaacacatatgagagctcacactcaaaaaaccgtctgtaagagcattttgtcaatcttattaatcacttgctacttcgtgtactgttattaactcattgttctgtatacagaaccagacttcttccatgttccgccataaagcaatgccaaaattgtaggttcttttgctttttattgatttccaaataccctttttcgagtttctgcatatgaactggaaattgtttactttccacagatagtagatcgctgcatataaactgtgggggacctgatgtaaccatcgaaaactctcgaggaaggtttctgtatgaaggtgataactatggacttaccggatcagctacgaactattataggaaaaattggggatacagcaatactggtgactttatggatgatgcaataacagaagatacatacacagtttcatcagaatctgcagtttcagcaaaatatccagacctttaccagaatgctcggcgctctcccctcagtttggcttactatgcattttgcttcgaaaatggaagctacaatgtgaaactccattttgcagagattcagttctcagatgtggaaccatacactaaactagcgaaacgggtttttaacatttacattcaggtacatatagccttttgccgcagattctttaagaaccccttttcaggggttttagccgattcttgaagtttgaaatttaatatatgttcaggggaagttgatttgggaggatttcagcattagagaggaggctaatggaactcacaaagaagttataagagaagtaaacacgaccgtgactgataacactttagagatacggctttactgggcagggaaaggcacaatgatcattcctcaaagagggtactatggctctcttatctctgcagtctcagtttgtcccagtaagtaaaattctgtggaggtaaacatgaagtttccctcagaaatttttatcctaattgtttacttgtttttgttttaccaggttcagaatctgaatgcggtggtatgaagaagaaaatctcaagtctttgagtccttttgttcctgctaaatcttgaatatggattaatctttttctctttgttttcttttgtccgccttcagttccagtgcaatttcttccggtaaaaaaagatcataaaccaacaaaatatcctctaattcttggcttaacactctctcttgctttcttgctcctggccgcattctgttggagaaagtgtgttagcaatgcaaatgcagcagaacgaggtattgaattcgctacttaaaaaccatgtaaagttctgtttttttttttgaaaataaagagcttaagggacctgatctaagaacaggttccttcagtttgaggcaactaaaagtcgcgaccaacgattttgatcccttaaacaagattggagaaggcggctttggatctgtttataaggtacaaaggagtcttcaagctctagaaatcaatgttagtgttcttaaaaacaggtgacggtaaagccaaaaatttgacaatacaggggcgattaccagatggaacattgattgcggtaaagaagctatcttccaaatcacatcaaggtaacaaagagtttgtaaacgagatcggtatgatcgcttgcctgcagcacccgaaccttgtgaagctttatggatgctgtgttgagaaaaaccagctgcttcttgtctatgagtacttggagaacaattgtctttctgatgcattatttggtaaatttatctgatagatgattggaccaaatcctttgactgcattctcttctgtcttgagattgaatatttgcttgtaaactgtgggagcaggaagaagctgtctcaaactagaatggggaacaagacacaaaatatgcttgggaatcgcgagagggcttgctttcctccatgaagattcagcagttaagatcattcaccgagacattaaagggacaaatgttctacttgacaaggatctgaactcaaagatatcagatttcgggttggccaggctccatgaagacaatcagagtcacattaccaccagagttgcaggaacaatgttagtagtatattcagtcgtacagatgagttcagcataagatgatgtttcaatagcagttattgttatttttgttgcagaggatatatggctcctgaatatgcaatgaggggtcacctaacagaaaaggcagatgtttacagcttcggtgtggtggcaatggagattgttagcggaaagagcaacgcgaaatacacgccagatgacgaatgttgtgttggccttctcgattgggtactgattcagtctttttctccacaagaattctgctttctctcaaataaaaaggttcttagttttcaatttcaggcatttgtgttgcaaaagaaaggggatatcgcggaaattctggatccgaggctggaaggaatgttcgatgtgatggaggcagagagaatgataaaggtttcacttttatgcgccaacaagtcttcgacattacggccaaacatgtcgcaagttgtgaagatgcttgaaggggagactgagatagaacagatcatatcagaccctggagtgtatagtgataacttgcacttcaagccatcgtctttgtcgtctgattatatcttgtcgattccttcatcatctgaatctgcttatgatctgtacccactcagccccgagtccattgtctttactatacagtagcctgaaccctctgattatctctacgctagggttgttgttgtaggctacttcgggctcgagaaaagattgtaattagggctaatatcgctagttgtacttggaaaagaatttattttgttttagaagaaaaaatcatacttaaattgaaattcgttataaaattaaaactatagagaaaattccaaaatgaaatccaaaaggtccttgtcctagcgtttagccgtttactttgactcttcatccaagaaagtaaagacatggctttatatgctttcatttttagtacaaatacgagtggtcagtggtgtgtgtaatctataacgagtggtcaatggtgtgtgtaatctataacgagtgggcagtggtgtgtgtaatcgatgtatattgtctgtgtgattggccgtacggattggccgtagtttagtcaccaagtgttggctttctattagtattaatttgctgataacatggtaaatattttgatttttaaaacatgcacaagagcattttaaagaagtcatacatcataaggttctatacgcgctttgatatatataaataagaacaaagcatagcattttgaggaaattatcccaaggttttatagtatgatgaataacattcaattggagaagttagatgcaagaattgttcaacttcctccacagagtgttaattagttgaggttctaaaattaatcaaccaatacataaggagacatgaaacatcaagcattcattaacctctctattcaccactattaacgtcgacattaatgtttattttggtgaattggtcaatatatacctatactctctactcaccgacaacctaagaaaaccctataaatttgcttgttggtgatgactttgtgatctgccaaacaaattaaatacacatatatacaaagaatcactaaatataccttatatatacatatgtcaatcatcctctggagttttttcctgttctttaccattatcttaagttccctcacaaatataacaacattggcttctttttcatctcttcacgcagatgaatgtatcatttctaaaaattttataaatcataatcagaatccgtatatattttatatacttattttcaatatgtttttttgctatattaatgcagtgaatgcactaaaggagatagctactacacttggtataaagagattgaacctaagggatgaagatccttgcagttcaaaaactctaaagatcatacaagaagttgattttgttccgaatctagatatcaacaacaccattggttgtgattgtagcttcaacaacaacacgatatgtcgtattacagaactgtgagtgttagtttttttgtcttctcttcgtttaatccttttactttctcttcttttctaataatgttttgcattattatatataaatacagagctctcaagaccatgagtcttcgagggaaacttccacctgaattgaccaagcttccatatctcaaatcgatgtaagttctgaattatataattagttggatgtgtgtttttttcaatttgcaagacatggttatacaataagaagacatataggtctattatgctagtatggtcatatgttcgtttggcagccagtggaatggaaaaatattggttagtaatttgctcttctttgcagcgaattatgccggaactacctctcaggaacaattccaatggagtgggctaaaatggcatacctcactagcatgttagctttctctcttctctctttccaataatgttcattgtcatgatttgggagtaacgtacgaaatttttcttgcagctcggtctgcgcgaataatttgtctggaaacttaccagctggattacaaaacttcaagaatctgacattcctgtacgtctcaagttgttttgtatacctgtatatatgttcgttttgatctgacctaatattacagtaatgtgacgaaattttcagaggagttgaaggcaaccagttctctggtcccattcctgatgagcttggtaacttgaccagtctaacaggactgtaagacccttttattgcattttaaccattgttcaaattaaacctcaattatcttctttgattttgtgttttgaatccagttttgatattttgtgaaactggattttgtagggaacttgcgtctaataaatttacaggaatccttcccggcactcttgctagactggtaaaccttgaaagagtgtaagttgttaactctacttagctatgaaagttttcaaataatgatctaaaaactagaagttatctaaaaggttttcaaataatgatcatatacatgtttttgcagggaacttgcgtctaataaaattgtagcagctaggtgtttgttttattggcagagatattgaactgaactagtagtttgttttcataatgcagaaggatatgtgacaataactttactggtatcatcccagcatatattggcaactggactcggcttcaaaagctgtaagcttctccttcttcactaacgataatttatcttatagtttatttctttgtgtgttctaacctgtgttgtgttttgatcaacagacatctttatgcaagtggactgacaggacctatccctgatgcagtggtccgcctagaaaatcttcttgaattgtaatgaactatattcaatagattagcaaaaggatcattgaattgaaactgatgttctaagcattatagatatatgtatgcaggagtcttagtgatacgactgggataaaatcctttccgaatttatctagcaaaggcctcaaacgcctgtatgtatatttcccactgaagctttatgtttctcttcgtgatgcttgatactaactgacaatgtcaaactattgtctctgttcctgcctgttccaggattttgaggaatgtgggtttgtctggtccaattccttcttacatctggaatttgacagacctaaagattctgtaagtgttttaatcatatttactacgactctgtagacatatcaaaactagcttgttctgtatcgtctacattttagtcatttaattacctactgtactatacggttctatgcttaaagttactcaattatatgtagataatcatcgtctcatgcatgggaaagaaaacaaatgtagagaaaataacctgttgtaagaatgatttgcaagtatgagagaatctgtttataaacttttgcagattctatagaagcaaatttatacagtatttacacaattacgtttctatcaaaagaaattcatttattttttcgcattgttttctgcagtgatttgtcatttaacaaattgaatggtatagttcaaggagttcaaaacccaccaaagaatatgtaagtactacaataatcttttaatgtgaactctacatatatatatactctgtataatttgccattcgacatgttcttacagttatttgactggcaatttgctttctggaaacattgaatctggtggtttactcaacagccaatcttatatgtatgtttcagcccttcacaagtttgtatggtttgtgaagtttgctgccatgtcaactaatcttcttgtcggttttctgtattttggcgaatcttcacagtgatctctcttataacaatttttcatggtcgtctagctgtcaaaagggcaggtatgagcataaaaccttggtaggtaggatacgttttctctctatttgcttatgttctcactttctgttgaatcagtaccattaacacataccagagctcatattcgaagaacaatttgtaagtacacactcttgccttatgttgcaacaagaacagactaaataattagcattctcttgcttccgtatattgtaatagatgctatgaccgtcttgttatacagaactgggcttcctccatgcgctgtgccagccaactgcaagaaatgtaagtacatattgagccgttctaacgtatctctaacatgcattagatattttgacgtactcacatttgttcatcctttttttcttaaaaattaataatttcacgtctactttttctactgatggtgatgaattgtagatcagcgatttctacatataaactgtggtggagaagaagtatctattagaaactccttgggtaaaataacgtatcaaactgataacagtcgtcaaaccaacgctgcatcaaatcagcagttcgattattggggagtcagtaacacaggtgactttaccgatgataatagtgatcatgatgagtactacacgtcaactaatttaaccctgtctggagactatcctgatctttataagactgcacgtcgatctgctctatctcttgtttattatgcattctgcttggaaaatggaaactacaatgtgaaactacattttatggagattcagttttctgacaaagaagtatacagccgtcttggcagacgcatatttgatgtctatgttcaggtggttaagcatcacttactacttagtaattgtttctttgattataagttgcatggaagattgacgttcatttgctattcgtcatttctcctgccctgttagggaaaattattcttgagggattttaacatcaacaaggaggctaatggaaatatgaagcctgttattaaagaaataaacgcgactgtgaccaatcatatgttggagattcggttgtattgggcggggaaagggacaaccctcattcctaaaagaggaaattatggtcctcttatctctgctatctccttgtgtcacagtaagtagtacccttaaactctaatttttcttaactatctcaagtctctgcttcaacaaaccttattcatcgtatggctttcatgactttcttaacatcgatttgttttactcataaatggccataacggtcagattattactttttcgtatatccgttgcctttttgtgcttacccttcatcatattgacactcgttcctgctacttaatgataacattcatctttcaaaatttcaggtcaggagccactatgtggaggtacatagattaagaaaattacttcatcgaaaatgatatttctgtacgtacgtagcttgtttcatgtatgatgtaaatgtatatatatattttcacttttagtgtctcatttgtagtggagaaaacaaaacatcacattaagtatcccctaattttgggggcttcgggtgccttggtaacaattgttctattggctgtgggaatatatgctcggggaatatacagaagagacaataataggagagaacgaggtatcatagttcagtgtatgaatccatttctggtacatgaacattctttttaatgattttctcttgtgaacctgatcacatagatttgagagcccagggtctacaaactgtttgcttttcttggaggcaactgcaaacagcaacaaacaattttgatcaggccaacaaacttggagaaggaggcttcggatccgtattcaaagtatgctatataccaacttcttctcaaacgaaatatggcttaagggtttattgatatgagaaacttaatgcagggagagctgtcggatggaactatcatagcagtcaagcagctttcttccaagtcaagtcaaggaaaccgcgagtttgtgaatgagataggcatgatttcaggtctgaaccatcctaaccttgtcaagctttatggatgctgtgtcgagagagatcaattgctgctcgtgtatgagtacatggaaaataactcccttgctcttgctttgtttggtaaattaatgtcattcagctttcccttacgttttcagtccaattcaagtgtaaatatatgttattccattcaacgtgatatcttttctatttggtttacatccattggcaggacaaaactccttgaaattggactgggcagcaagacaaaaaatatgtgttggaatcgcaagagggcttgaattcctccacgatggatcagcgatgagaatggttcaccgtgacataaaaaccactaatgtgcttctagacaccgaccttaatgcaaaaatatctgactttggattagctaggcttcatgaagcagaacacactcacattagcaccaaggttgcaggaaccatgtaagtattgaacataagacaaaaaccacttcatggctgaagaaatatctcattcttggtttctttccaataatgatgcagcggatatatggctccagaatatgcattatggggtcaactgacagagaaagcagatgtgtacagcttcggagttgtggcaatggaaattgttagtggaaagagtaataccaaacagcagggaaatgctgatagcgtctcgcttatcaattgggtaaccatggagcttttctttctctttagttgattttatgtgtaatctgtttccataagtttactgaaaccagtttttacatcaaatctcaggcgctgacgctgcaacagacaggggacatactggagattgtagatcgaatgcttgagggtgagttcaatagaagtgaagccgtgaggatgatcaaagttgctctcgtttgcacaaactcatctccttccttaaggccaacaatgtcagaggctgtgaagatgctagagggagagatcgaaataacacaggttatgtcagatcctggtatatatgggcacgactggagcatctcaaagctgagggacattgatacgcatagtagctcgagcacgtctggtgtgaccgatcagacgacaacaacaatgaaatcctctgtttctggttgtgatctctatccgttataccctgaatccatgatcttaaactccacagtaga

SEQ ID NO: 1152 - DNA, 82053 bp, Arabidopsis thaliana
aagctttcccccgcggcatctgaagtccttggaagcggccgtgtgacaatgaggaagactgttgccaagccaaagggcccatcaggcagcccatggtacggatctgaccgtgtcaagtacttgggtccattctctggcgaatcaccgagctaccttaccggagagttccccggagactacggatgggacaccgccggactttcagctgaccccgagacattcgcaaggaaccgtgaactagaagttatccacagcaggtgggccatgctcggagccctaggctgcgtcttccctgagcttttggctagaaacggagtcaagttcggagaggcggtttggttcaaggccggttcacagatcttcagcgatggagggctcgattacttgggaaaccctagcttggttcacgctcagagcattttggccatttgggccacacaagttattttgatgggagccgttgaaggctacagagtcgcaggaaatgggccattgggagaggccgaggacttgctttaccccggtggcagcttcgacccattgggtttggctaccgacccagaggcattcgctgagttgaaggtgaaggagctcaagaacggaagattggctatgttctctatgtttggattcttcgttcaagccatcgtcactggtaagggaccgatagagaaccttgctgaccatttggccgatccagttaacaacaacgcatgggccttcgccaccaactttgttcccggaaagtgagccaagttttatctgtattttgcttcagtctttgcttcgtgagtgtgagaggagaaagagagcttgtttagatgtaaaatttgcaagactttgtatttttttcattaatcaaataactcgtttttctctcaaattatctggcaattaccaaattggattcgttttatgtccttcggatcactcaattgcagagtttattaccacaattgaacaacttatacatgtcaaagttaagttaatggtattggagaatcaaaaattcattgattttatccgtacaaatcaaacacatttgtttaaaaattcactttgaccaaaaatagatgacgttttccactagaaaatatactaacaaagcaaaaccaaaaactgatgaataatatattcttctacacactagtacattgtaaagatctggttatttttttcttcctctggtgtaaaatcttaatcagttactccttctctatcgcttaactgaagagtcatcttaatattcattgaagccaactctgcagccaagtacctgaacacatagggcattgcaactgtttccatgcctttacttgtcttgcaagaatagcaagttaccttctttggagttctaccaggaggtaactttccaatttcttgaataagcttcttctgttgaacgttcacaacagatgatgtgagcaagcttccacatagcgaacacacatctgcaatgtggtgatctgaagatgtatgaagcctgtcgtgtaatagataggaggctccatgagcaagtagtgagtctcgctccatttcaccaaaccgaatcccaccacctcgttttcttccctttattggctgatgagttagctgatccacttgtcccgtagatctaacctgtaagccagagtattatgattcagatatagcacgaagatgagacaagtgccagttggagactatatgtcaggatgataaaagaaatgaagccagaagggtcgaaaaacctggaatttgtctgagaccatgtgacgcagtctctggtagtaaacaggccccataaatatctcacacttcagttctactcctaaatacccactatacaatgtctcggtaccataatggttgaaccctttttcctttaacatggagccaagatcatcaacaagcaaactggacttgctctcctcttctccgtttgttttttttactgcatcacgaaacggtgttgcatctacaaactttccatgcaaactacctccctgtaaaagccgaggatataagcattacatatactttacttaccagctaaaaataaaaatgggaagggttcaacaacacatgaaaagaagatgcacagcatcagcgtcgatggaacctaagaatcagacaaatttctaaggagaaaaattctgaaggataccttagcagcaatagattccaaaagcatagcaattgtcattcttgatgggaaagcatgcgggttaatgatgagatctggacgcattccagtaactccattaaatggcatgtcaatatcaggccacaattgagaacaaacacccttttgcccatgtctactgctgaacttgtcaccgattatggggtttctggcatgccggaaacgaatattcgcctgccaagaaactcgaaaattagattttaagccaattggaatctgtctatgcgatagttggagttaaacctcaccctttgaggatgtttcttgcttttcatgtcgacagagacaaagtcaactatgacagggtcggtacctttacgcttcatgtgccttgttttgttagttacctcatcatagatactacaatacggctcatctggatataatttctgcgttaaacccaacaaattagtgagtttctatgaaagttgacaaggaaactaaaattaaatatttaacttacagtacatagagaggatagaaagcagttatttacctgtccaacagatggtaacccatcagcatcgatacgaaaatgttctgctttgttagtactcctcctaaaacttttagaaccactatcaaatcggctattctgatctgaaagatcaatattttctgtctgggagatcatataaagacaagggttaggaaattaaaaaaaaataagaaatttgggtgatttgtataatgatactaaatctctcgctgcaactacaagatttttttatggggttcataaaggaacaagtgtaggggacattgacctaggggacattgaccaggattatgataaagctccagacccaaaggaacttattacatcaagcttaagcactatattcagctaatcagcaggactcttaataaagaaatgagaatgggaactcgaacctggtatatttgcccatggcacattccccgctccacagatgatttgttcaaaatcatcgcgtcttccatatcaaatctgtgagacaggtaggtggataaaagaacaagagaagaaacattaacgaaaaaagcttatcactgacaagatcttgtacgcaaaagcagtttcttaccctgtatgtgcgaggacagcaacaattgcattagtccctgtaggattctcatcaatactgtaagtggtgtatgtttttgtgcggaccacaggggattgaggagtctgtagcatacaaaaagaatttaataatgggaccaaaagagacgaaatgatcaactgaaaattgtaccatgtactttcagctttctaagagtaagataggaaatgacctgcaggtggtaaatcttctggtcggcacgaaattggagtgcttgagtagagtacgccatggtttgtttcgccatctgtataactgaaaatttaaaaaacttccagcagcataatcataaaaaatttgcatcgaatttctagtaatacctgacactgatacatgttacggggactttggttatgatctgaccaaggtgtaagattagcaaccacacttatcatcccggttggatgaatttcctcgtgagttgctagggaagagttattccttcctccatttccaccatcaggacagcttatttccataaaaacctggtttggtagaatctttttcttttcatttgattgtataccaggaaaggtggatatgaagataatattgataggatttgctacctgttcaaatggtccaatcagttcaatattatcagaaggtatagatatatttttaacaggcctaatgaatcttgcgggacatgatgccaaatacaatccagggtaagatccacccatgcttgtaggtacgtatcccacttcgaggtcttcaggaatctgtaaagaagcattcgcatatatagttattttctaatgaaataggttgccgtcaacaaatactgttaagaagtaaatacgccttaccactgaaggagcctccactttcagtctccgtatataagagacaactttcgtgactaggttagaagatagcgtgcctacaacttgaccatctaaaagaacatggatgacttttggtggtccagctcgtactagctttggcaatgaaggtaccatacccgccccagtaagaacatcaacaactgactttcttattttcagaaaatctctgatgtttcccttggaatcgaactgagaagtgattcctgaaaacacaatgaccaatcagaacacaataagcaaagttgttactggaaaaaagtgacatattaaatggtattacgagtgtacacaatccccactgtggtacaatatgacaagaactaaacatttaagcatattaatcgcatccacaaatagaaactatagataaatggagaaaaagggaaacgaaataaaatatgctctaatataacaatactatttgaaactccagtctataataagttaccttgagaaatataacacactctaaccaaacgtgattctatctaaatctctctaatattttaaagcttaaataaactatgtaactccaacttggtctaaccaaatgtcaagataacagaataatattgctgaattcaagatgtcgtactgaatagcacaaaatgatgtgtgaagaagagaggtagagaaactcacggctagtacgagtcatatgattcagtaatccacaaggtgttccatcaggagtgtgaacagggcaaagaaaaccccaagatctacaagataacaataaaagaggaaaaatgtgaagactacaattttgggacagcatcagcacatgtagtgtttgacaggtaaaaagtgaaagaacctactcaggaagcagcttcctcacagttgttgtacgaagtccagcaaaagaagcacctcgatgaaccgcccggaaaaatgaaaggaaacggagaaagttcagtctctcagcctgaacagtgtaacctgctctctggtaaagaattgagaaaatatatattagtattgttctatcaaactacatcatacttaatggactttagctactaagattaaaagcttcccaaacaagcgaccaactcttacctgctgtaaatccaaaccagactgtgttttcaacgctcctgtctttaacaatgtttcaattgacgtaccaatactcctgggaggatttttgttaataagcttcttgacatcagcaactgcatataatgaacggatcattaccgagcacatgatattgacttcacaaaatatttgttaaagagaacaagcaaatatcaggcagaaaataaatgtggatataccaaaaaaaatggtttcatacagtttcaacttttaaggaatgcagatgatcagaacattgaacagggaaaacaaaatcaaaagggacttacggctttcaaaggaaaattttgagttcgtgttatccaactcatctttaagaagacttttacacttccgcagccattcttcaagtttttcctagataaacaatgcatgtgacgtcaattaactctttttaatgaaagaaaacctttgtctagtaaacacaagaattcatggttatgcaaaatagaatcctagaatttcagaaacattgataatgacaaaatcacatgctcttatataatgagcctccacatagatgtttctaccatatgggaaaatatttatataccttgaggtaaatagttataacgtgacctgggactaaaatttcctgattttgcaaagaatccggattgtcaggtaaagaagtctgatccaccagagaatagagcttctgaattatgaagctgcgtagccaaaaagaaaaagttgaccataatcacactaaaaaactcaacgtgaaagtcatcacgaggcaaaagtaagacattacatgagcaaattgaacttgtcgtgatcattgtcaaggtgaacaaataaataatccctgagcacagcttcagcaacctaaatatataaaaatgaagaggaacaaaagtaattagaaagaacttactgtcatcagttgtagaaattgtttacaaaatcagaaccaatcagaattttcaagaagctaacagaccaaagccaacctcaaagaagtaagttatatttttccagaaaggttactattatgtaaatgaaaacaaatgcaaagaagatttgcaaacaaaactaatgatcaccacttgtagaaatgaaaccggataaggaggttcagaatgatcaagtaaacttacgatagaaaggctttctttttttaccccatcaagaacaggttgaaaatgctgtcctgttggttttacaagtaaaaaattagcttcttagtttaagagcatgtacttaaacacttagacaagtaatcacctaagtgcttccggcactgttcacgggtaaaaagacccaagtctcgaacttcatcaagaataattttggctctctcacgaacaagttgggttccaatagctccatcccctcttccgtaatgctcactgtagcaacagttcaggctttcgtatatttcctcatcgcaggaattcgttagagcctacgaacatatgaggacagatagcaaaaatggagaattgaatgagaattcaaaaaaaaaagacgaaatttgaataaaagaatctcaaaacatttcgcctttaaaaaattaatgttcttatgctacagaagacagattcatagagtcactaagaccataccttgagaacaaggccgacaggaagcaaatattcccttcccactatcctgtgtccattagaaataaagttaacctgtagctcaaattgtaggaaatgtcatccacattccaacatcaaaagttaacacttaccaaaatccaactctggcacttccattgcgaagataatacagtttaacagtaacagatgactggtcgtccctaacacacctaagaattaagaaaaaagaaccgcatgaagaactctttaagatctattgccactttaggggaagattggcattactatatgcaacacataaggaagagataaacttcaaatacctagtgacaactgccttgctagagtatccttccttacgatcacggaatgagttccgaatcatacttgttggctattataagagattcttagtcagttaaattatgatacaaggaacttcatgggaatacactatacccataaactttataagcaaaacactatactcatgaacttagtcagttaaaaggcgaggtagcttacatggttccgctttggtgcaataacacatcgaaacactctctcaatcccattcaaaataaagtacctatttcaagaaaagctaaaatttatcatgatcgacttatagaagggaagatatatcaagagcaacatgaatgcatagacaaaacagatgtttttaatcacaccccagtttccattgctataaacatagctgtcatgcttcacaaaaatacagtttagaaaaaaaatccacagacacaaaatcacatattaaccacaagcctcacagtggctttatcataaggtataagaggtggaagaacatttaccctcccatttcagaagttgactctttacactttaacagtttccggcaatcagcaccctttaagctacaaagctttgactgcaataaagtacggatatcaatttctattagctcataaacaaagacttgtaatcataagcaaagtcaagaagataaatcattgagctaagctttgttccattatcagttataagaaccaaatgtacaaattaaagcatccagccatagaagtgactctcgctttgggaatagtcatatcttcaggaacagaatcaaagtaaaaataaacaatagcgaaatcaaataaacagatcacactcaccatgagcataataggaaattgcccaaaatcaaacttgtctctaacaacgactccatcattatacttaaagcaaacatcagccataaacgttcctgtgtacgaaatcttcgcttgcctacactgttattcattaaaccaaaaccaaagttactaacacaccaacaaaatatataaacctcggaaacatgttcaaaacaaaaaaacttcacctcaaagggaagcaaaggctctttccttgatgttgatttaaaactctccttctgtggagcaaatactagaggattttctaaccaaagtatcatacttgtcaaggaaatcagacacaacacaaacaaaaattgaacattacaagagccatagagtaaattcaacacaaaaaaaaaaaggatattgctcaattcattctcggtgtttggatcgtaaacagaaacgggtttgattcgattgaacataacatcgagtcctttcagtgtcatgtaatcgaaagactctatatgatgagtaacgagattgtgaagctccttgaagtcttccatcgttggaaccgtcgagtctttcgcgttcacaaccatgatttaaggtttgctctcaagctaggccggttctgaggtttgaggaagctgaaattagggtttcggaggagctttttcttgcctgaggaaattgatggagaggcggagaagtctgagagagaaggcggcgcgagaaaaaagggaaagggttttaggagtttattgagtttgggttttactggttgtcgataactttcaagtttattgcagatataatcctcatctttaaaatgtttatatttcgaacccttaattcttaataatttttcgaacgagattggatacggatttttactattttttggtgaatttctctattgaaccttaacgatatttagtgtttaagctcactaaaacaacgttaatcaagatcgaacaggtataaaataaaaatactattatatcacatttttaaaaagagcaaaattgatttgctactaaagctagttaagtgaaactttcgtgtattgatgatatattggatgatgtgtttgtttgttttgcaagatataagtttaaaagtgtgtatctatacatactgttcgaaactgattttttgggatccaccgagtggttgaattatgccgaagatttttcgtttggggaatgtcgtgtatgttggattatggttatggtcttatggatgagcgcgatcagacaatttgaccgttataaaacaaaattaactaaaactttcgatccgggtcctttttcttagcttctggtttgggagatgcatcaatgaggcaattatatggtttggatgatccttgggaagacaacaatagatttttcctcgaaaaattttcgacgtgcaagtttgaaaaatgttatgtgactagtcggacagtatttacgataggagaagggtaagtatattttgcgtgagtcgtgagttgtgtgttgtgtgtgaagcatagtctcatattcaacgttggatctccatcccattagaaacaacaatgagaggatcaggatatctatataagatctcatattttctacaataatcatacctttacgaatatgataccaacgttgaaatatcacaattccaaaattatgttgtaatccaaatgctaacatgaatctaatgccgattcatagctatccaaaatgatcaaattatgcaataaacataatgatatacacatccaaaccatttaaatgcagtaagactagtatgtaatgttgtaccttgcaatggctcgcataatattgtagaactcataaatactgtactagtttagaaaaacgtatcttactcttgtgaatctattttgtcatgcataagttatagttatccattttgatcataatatatatatatatatatatagttaattaaaatccaatatttttgtctggacatatatataaaagcttctattcctttcttggatctacaaaaaccgttcctcgaaagcattggcttgaacatgtaagatcttagctctgaaacgcattcattctgctgacttacactacgtgagattttgtgtcaccaattagatctctagaagggtataacgcattaacgctggacatcaatgttgtgtatgtgagattttgtgatcaagacgttcaccaacataaactcaagtgtacatgtagctaggctttggtgtgtcaaaacataataatttattattcgaccatatgatttgactgattccgtttgtatttgagagtttatatctttggcttccaactagtaagagtatcagatgatatgatgatcacaaggtagccatcaaaatcacctttatccaactagtgatgtagattttgaaaattcaatcagaactctcaaaaacatcataattgatttcggtcaccggattgaccgattctgattgtatttgaaaaagtttatgcattttatttttaacttctgagaatgtaaggtgatataatagttagaaattagtcatcaagatcaatttcttcagtagcagcaagttttcatattacgagaaataagagcattttccatccatagcactaacaaggccttccgtgaacactaaatgtcttatgtcagcattgaaagattttcttcaacactaatacgcgttttcgttagcacttaaggacattcctcaacactaatggatatttgtcactataaatggtctgttgccaataccaaagatcattcccaaaacactaaagtttcatttcccttacatttcgacactcgacaattgttataagcaaaaggcaaacaaggtaccaacaagaatattgatgactttgtaacacattttttaaaaaccacactcaagcacttggtgtgtaacacattttttttaccttccagtaaaaaaaatttataccttacaaataaacttttgtctcttggtttgttttacaaattacttacaactgttaacaaagttacataacaacactccgttataattgatatttttttattccattcatttgcttttcgtctaaacttttctttgaatcttctcacttggcacttggatattctcataccaaaaatgcttttcgctttagaatattttttccctaaacaaggcagaaaaggaacaggtttgacctccgttgaagtgttgaagaacacttttgccatccataacaatgcttcagaaacggtttggtgtttgtgtacaatattagttgcattgtctcgattcttttaacaagactttttttttccactaagacttggaacaaacatccagtacttcaatcgaatgagttttaacagaaacataatgatggatttagaaagaagcagcatcatgagattaactatttcgcaatgtgtggaatggtttcctttgaaactaatgctgtccataatcatgatttaaattaaacccacacgattcgtatatattatttaattttaaaccttagttacttattgccaaatatctacttttatttttctcaccaaatattcttacttgttgtttgtcgcttaccaatcaaataataaaaaaatattaccaagcatacgcatgccaacataaacttaaaattacagctgaaagtgaagagacaagaatgatgagtttggtttggaaataataagtaatattctttggaacaagtatggggttgggacaagagcccaaagagagagaagagtgtgtcactgtgtcgtctctaaaactacaaataaaaattgtcaaagaagagagagtttggttttttggtgggagctatagaggtccacaaaagcttttcacgcgtgctaaaggagcaaccaaaccaacggtcacgatcaaggccgcattaaacggaaaccatttgtgattgtttcatccaacggctcacactttcccttgtttgactctcttctgtccatcccctcacgcgtgctccctcttcttgtttttttttttccatttaatttccactatttattattttatcataacatctattttatttttatgttttaaaaaacttttcattcaagaaaatccacttacatagtgatatacatgggttaaacactgtaatcatagtgtgttccatctttacagaaatggataacatattttctacatacagtaattcttttttcctaaagagaagttgtttgagtttttactatccacttacatagtgatatacatgagttttttaatagacctaatctaaagcatgacaccggtcaaatagagtgatttagtaaattttactagatacagtaaaaactctataaattaataatggtgagccataaaattttattaatttatagtgatattaatttatcctctaaattaatatatattaatttaccgtataagttaataaatattaatttatagaaatatttacgtaaagtacgatactatattcttttaaaaatatttcttaatgtaattttctatatgctttgttgtttgcatatataattatgttaggtttttattttaatttgacttctttaatttattttcggtaagatttgtatttgtatatctacgacattaacgtgaacgtaaacgtaaacatgaaagttaatccagtttctctttacacaaatcatagtaatgctttctcaaataaaagattttataaaatcaactatgacggatcaaatacgcaaatagttatgtgagtacaacagagatcatatcagttgtattttaaaaagagttgtaattatagcttgaacaaaaatttcatataaaaattagtcttaaaatatatatttaagatctataattattaatttataatattattgggactataattttacataggaattttaaaaaaatgattatcttattattttattgattttggttaatttttatattggcacaacttggaacctacaaaatttattaatttaccgtgtttattaatttatcgagtattaatttatagagtttctactgtaatagtaatatccacttttatagttagatagtgaaatagttaaagaattacttatgccgaaagaaacagattaaagaaactgaacattatgaaaagattaagaaacaaatattttgtttgagaaaaagttaagaaacaatataggtatcacgacactcttatactttgttggatttaaataacactactaataaaaatgtgtcatctttctactccaagatttttttttatctaatctaacaagtaaaaagacatattttgtccaagctttttacctttttatcttggatgaatcaaattaataggagtgcattttttttttttgaaaattccaaaaatttgcggtaaagttaaacatctttttgctccacatttgaaaaaacaaaacaagtagattcacgcacgaaaagcgtgaaacgaaattattaactttaaacaatgtttgtttgtgtagtgactagtgtagtgtgtgtgagtgagtgattaaagaaatgaaaatgggcaaaccaaacgaaaaaaaacaaaccgcaccagaaaaagaaagccacgctcgctcgctctcttctccttatttctctacccttcccttctctctctctttttgccacacacatcattctctctttagatcttcttcttcttctcctctgtaacaacaaaacaaaaaaatcactctttcgaatttgatcagattcttctaaagctttagtttttacgcatcaccgattcatttgatccaaagggtttttgatttcttctacggtatgaatgttttctgcttctttctttctttataccgccgcaatttctgacttattaggacttatatgttttttctttgtcttgtaattagtactttgacggtatctcataaatagctattttatggtttatcagatgattgctgaatttgatttttctattgaatgttctgtcttgtttatgtttgtttgtgttattattaataaactattcatgatcgcgtaaagattctttcttttaacaagtccaattcttttgttgaggttttgtttcctctatgtgttctgttttgaagcagagttgttaagttattttgattttggtttgtgatcatgaaatcgaaaaacatttattctggatccgatgttaatgtctttagtcatgatcctatctttttgtttgttgtacgcagatgcctaaagttgtgcttttttattatctgaatcaggaattagaaatttcccatttttttgtttctctgttttgttttgccagtagttattttaggattctacctcgaagttagtgcctttcaacttcctatactgaaaatatattagtatttgaatagcgttggtcctaatttttgtttgtttgtgcagagtttgtgagaagaggaacggtatttaatacacttacaaatttgatattggaagaaccaaagatgccctggacagcattcttcatgtttttcaacagaacttgcactcgtctggttgtctttttcctcgttattctgtaattttgttcctttcaggtgagccagcctctcatttcacatcttgtgtttttgtcttacattggtaccttgtggaagcaaattttgttgttgccaccttatatacagcttcttgtgttaaaactattggcatctcttccttgttttgcaggtgttgtttccggaattcggaatagttctttgttgttgtgcttattatactggttagtttgtgagaatgtgcattgttggaaacaagaagggaaaccgatcattgaaggaaataggaacttttatgatgactacatgtttcattgctaattaccaatccgttcaagtttgccaggtacatgcctctctttgatttagtatttcctaacacttctatcgcttaggcaacactgatttatgtcattaaaagaactctatcctcttgatgacatgtggatagctatttgttagagtattaaccatagtttttctgatattcaacctttcttataaatcattgcaggctgaatatttcagacagttgcttaagcctgtaacgtagtctagcgtctggagttttcggaaattggggttttgagcggctatctacttttgatttcgaaaaaatttactgtgagttgttaaagagtctggtattctgaagagctgtctgtgggggagcttctggtttggggggtaagggctctggtggaaactcgtgatatctttagtatgatggccataacttgatatagcatttggttccgtgtgtcaacttagtgtagtagtaactgagcagctggaagcttacaaaggcgacaaatcggtagtagaaaatattcaagcagcttgcagtttgaggtgtacaacttgtttttctctttgcgtttccttttttacgtttgcacgggttttctgatgcagaacaatcagtttcctcacttctcagatgaagtgggtgacagaaatatgcacaacccgtatgcatcagggtcatcctatgatgctttgttcccaccatgtgcaaagttgccataccatggtgttgaacttcaaccgtctgcggtctgtccaaagaactttgtcatcttcgatcaaacatatgaccgcagccaagtgatgtaccatcctgagctgactcataagctcatgaataccccttcgttgaacaatttagcttcgacgtttcagaacgagtatgttgggggaagttatggtaactatggtaactatgagcaagaagtatcctcttcttatcaagaagatccaaatgagatcgatgctctcttgagcgcagatgaagattatgaagagaatgatgataatgaaggtgaagaggatggtggtgattcagaagaagtcagcactgctcgtacttcttccagggattatggaaacaccacagcagaatcttgttgttccagttatggttacaacaacaacaacaacaacaactcaaggaagcagagtttatcgggcagtgctagtagtagtaacaatgatgggaaaggacgtaaaaagatgaagaagatgatgggagtattgaggagaattgtccctggaggagaacagatgaatacagcttgcgttcttgatgaagctgttcagtatctcaagtcacttaaaatcgaagctcagaaacttggcgttggacatttctcaaaccaatcttgaatgctaccgatattcggttcttccatcactattgtttctcgggaggtaaatcatcggtctagcgctatctggacctttctctttattttcctccctctatactcacttccttttgttggcaggatggtatctattttatgtttgaatctctctatgtattttgctttttgtgtgttactgcttcgatgaagaagcaaggtttgaacaagtacttgtggatttgatttgagattttaatttgtatggttttactttcactgtaatcatttgactatgaactacaattatcattatgtatttgcttctacatagttttaaacatttggtcttccttctactgaacaatgtaagggccatcattttgaaaagtcacgcttataccataaaacgggtcctatacgtaaccaaaattcaatttctgatggaaattaactgggttattaaataaccgggtttataaattgggttatgattacattttattttacacagtatagctcaacgattcgtctcaaagcttcacactttcgtgaaatctgcagactttgtgtagttctcaaatctcgattcgttggattcagttgaagaaataggcaatggcgactccgtcgtcgtctttctggaacacagcttcacgagaagccatgaaaagcggcgtgttactcgcgaaactctactgctttcttcatgtaacaacaaactatctcggattcatggcttatgtgagtcaatcgaaatctctcttcttttttggtgtaaatcgaattcgttattgaaaatttaccataaagatgtagtctttttgagcaggcttatggtccgagcatgactccgacgcttcatccttcgggaaatgtgttattagcggagagaatctcgaagcggtatcagaaaccgagtcgtggagatatagttgtgatacgatctccagaaaaccctaataagactccaattaaaagagttattggtattgaaggtgattgtataagctttgtgattgattcaaggaagagtgatgaatctcaaaccattgtggtatgttttgttacttaaccttcttccttgttgacttcacttcactttggttttgcttatggatgagatttttgaatgttgtacttagagaactgagtttgaagaaggtagatacattgttgagaaattgagtgatcagagttgaaacaagttgttaattagtattgagctcgatttagctgattgcaattcatggaaaattttgaatcttttagcaacgttagtgttattggtgtatattacaatttcctttggattgtttagtttgttggattaatggcgaattgatctttcgatgtttttttggttttaggttcctaaaggacatgtctttgttcaaggtgactatactcataactcacgagactcaagaaactttggtactgtaccttacggtcttattcaaggcagagtgctttggagggtataaactttttgtcattaacttacaaatatagttagattatctgatttcggaacttcaaatgtgttatttgcatttgttttggtaaatctatttggctaatcttcggtatgtataataatgtgtaggtttggccatttcaagattttggaccgcttggaccaaccccaacttagcatacgagttagcttggtcattaggccaatgagatgaccgaggcagattggtagtatggttaatcgttgttgccgagtgagtctggctcatgactgactatgagatgcaggatcatcataccattcacgaagatgggagaatctaaacgctcaggaaaagtgagtatatggtttagacttgagagcacgtaacattatgtatttttggtctgacgctgtatgtgagagtcgcctctgtatcaaaaagttaaaacaaacatcgaatgttttgtgtgaagccaagattattcatgggaaaatcttataaccatttaaaaatactacttgatcaatagcatttccccacattttaaagattgctctattttcacttaaatcaatcatggtgataccaattggtggtaacgtcaagtttgtcaagccaaactgtagggattttcttaattgtgtgtcaaataatttttaaaacaatcattgtgatttattttctgttttcccacatatttgatagttatttaaaatcgtagtttcgactatcacaatttttaccaattggttataaaaatttatatagtcaaagtccttacaaaaaaagtttttccagtcaaagtctctacatccaacattaacaattgttatcaatcaaccataactatgcggataatcaatattaccaaccttccaaacattaatctaagaattgactaacttttatgcaatttaaattactaccatttttccatctatataaaccctatcttgcacccacaaaaaaaacatattccttggctaaagccaaaaacagcaaacaaatacttagtttaaatttctcttatttttttatagccaataaactcataattttgtttttctccaaaatgaaacccaagaaaaccaaaggaaaacaaaggattaacatcaagaaaattgaaaaagacgaagacagattggtcacattgtctaagcgtcgaaatggtatctacactaaactcagtgagctttccattctctgtggtgctgaagttgcgtttctcgggtattcttgctctggaaaaccatacacattcggcagtccgtccttccaagccgtggcagagcggtttctcaacggcgaggcctcgtcgtcttcttcatcatcgttgcaacgatcggtcatgaatgctcatcagcaagcgaagattcaagagctttgcaaagtatacaatagattggtggaggagataacggtggaagaagtcaaattaaagaagacggctgcattggcggagatgatgcccatgaatgaggatgcgtggtggaaagtggatccaaatgacgtgaaggatcgcgaagaggtgaagaagatgatggagaagcatcaagagctctatgagaaactgtgcgaggaagctgcttcaaggatcaagagaggacatgatgagaataataacaaatgatccataatcaagattttaattagtagatcatttgtgatcatcactagttaattatgagtcttaagaattatgttttttttttgtcttttgttttttatacattatgaattgttattattttctacaacatccagtcatgggttaatgaaaccgaaatattttgtttgaatagatgtcatctttgagtttaacaaaatcttatcaaaacagaaagaaaaaagtattatgtagtactataatactcttcaattttttatttttttttatcaggtgaacgacctgtgtccccatgagaagtttcatatacgctcacaactccacagaattcggacctcgactccaatctacaccaaatgaaagttccaaacctcagttcccctaaatcaaaagttcaaatcctcggtccacaaaattttgaattttgtggtttatcgttggtttattgtacccgtggaactgaggtttggaactttcatttggtgtggactagagtcgaagtctggattctgtagaattatgagcgtatatgaaactttctacggggacacaggtcgttcacccttttttatgaaagataagtcatgaaagattttgtaacatattaaactgtgtgaaaaatgctgctacaagtattaaataagcccatatgcttttggcccatataggtttagttgttttgtaattttttagcctgtcttctgattttgtttagaagagggataaagtcatccaaagattgttcactcactttagccgattagattggttcgtccgggtttggtcctaatgagctagtagtctcatatgagtcgtctaaaccaaagctctagtcttcttcacgttgttcgttcatttcatggtagattctaattacattcttttaagaggatattagtttaagctctaatcgtaccgtattcatggattaagaaaacatctacaatgtccaacaaattttagaacggggatcaacgcagacaattgggaaacctaactaataaaaatgaacaagaaaagccagaatcgaaaccaagagaatgaatcataaaacttcaagattctacccacaaaattttaaaaagccaaaaccagcaacttcgatccctcaacaagtatgaaaagtcaattaccttatgaatttatgatagaaaaatgagagagcttctagttctacataaacaagttaggcttgttggccttgaaggtagtcttgagctttctggtgggaggtctaaccttcctgaagaccaacgggaacttgatcttgctgttgtgaaactgcttcgtgctttccctcttgcagagagaggctgggactgttgctgtcttaataatctgaatgcaagggaaccttactctgtgtcttgacgccatctcagtgtacatttgctccactgctccattcaaagtagtgtcacggtactctttgtacatgttatggtaacctgtacggctctggtatctcaaccagattccaaaattcttgatcgttgttgggttcttctcaaagatctgtcacaccaattagtcattttaagaatcaagcaacacgaacgacaaaatattttacagaatcacaaacactttacacaatcaagttaagaccaaatatctaaaaatgttccataattctgagagactactaccgagaacaaatcaaattcagatcctacagcaagtacctcgttgatggctagcatctgtccattactcttcttcaccttcttttgcctccttaagtagtacctgaattcaaaacacatacatgaagaaacgattcaatatcacaacgattcaaacatcatgaaattggtgagaatttatgataaaattaaactaaccagaacttggatttggcaagaacctcgttcgttgcccatagcttcatcctgtaaatctttggttgctcatctttctccgtcgggagagctcgtcctacgacttggtactggtgcagctgcaattacaaaattccgatcagatttgtcgaaattagaaaacgggaaacatcaatgcgctaaattggaaggaggagaagctaaagctccggctagagttaacgagatgttaccctgataacactcattttcgtcctccgccgatgattgaatcctccgataatcgcaagctctattcttgcggcttttttttatatatgacctagctaaaaagaatgaaaattttaaaccctaatctcaaaaatttaatactagatcctacaggctaaagcccattgggccttttaaatttacaacccactgcctataattctctacagatttttatcaaccatcaattttactgaattcggattttttttcgctatgatctataaataataaagtgtgttgagtagaagaagaaaagcacaaagaaagacatgaaaacgtatttagcttttggggaactttttgtgtagcaatggtcaaaacaaatcacaaaatattttacatatagatagatatgccaccaagggaatcaaccacatatatacaatatttagttatgatataaaattcaacacaaagttacaaatatttcccttctgtaactcactaaaatcagcaataactggtgtaaatgatattgatatatatctacgttttcgagtatatatgtagatatatatacaagattgagtttggttttggctggggagtagtttcaccagatgttaatatccccagtcatcccgagcatgacggcaatcaaatagacaacggactggaagaattcataaaaagaaaaagaaattatgagagacaatgatgaatatagatgagtgaccaatgccgttgttctacgacaatgtaatgagagagaggaactcactgcgattgaacaggcaacgtaaccagctttctcgcggtgatcaacagatgtgactagaacaataaaagcaccgaggtaccaagggatcccaccgaacaagaagcccatgataaacctgggaccatagacaacaaaaactttaattagcaactggaacgagtttcaagtcacaagatgtatgctttcagctttctctcgttaaacgacagaatcatataaggcggattgcacttgtatctccgtgtcagggagttcatcaaagtatatccagattgaatgaccaacaaatccatttatcgaatattagctaatcttgatgctcttgtaaatctaaacattagtggatagagacaagcctcaagaaggttttacacagactttttatattgattccaagaggcaatcagttcatctagaatctcactcgaaacaaagagattccaggaaagaagactctgttacagaatctagagctagttccacaacgaactgtcacttaatactatcaaagaaattggttatgatagcattctaaaacctaaagatcataaaccgagtttccaactaccataaacctaagcttctgtaattttgatcttatacatggaataaaacaaccagaaatcaattgcatttggcaattcaaaacacagagaatgggaattcgtattgcgagacaatgtataacaaggaacttacagaaaccagcccatgcccaagccacaacaaggaagttcatgctctatcattggtctcacctcaaccactgtataatctaaaacaacaataaccagaatcattactctcacatcaacaaaaatctaccctcagtatctgatcaaattgatatagaaaagaaagaagatttttccagaaatgattaccaggaacaacaactgggaatccttgagcataattcacaccaccaccatgacctaacaattccaatcaccaaataatcacaaatcacaaagtaattatccaaaattaacaagagggatagagagattttaaaaccttggagattttggtaagcatgtccaggaaacgtagtaatcggatgctgtggttgcataaattgcggtggtggagtaggagtaggaaaattcgcaacgccttgaaacgttccgtaatagtattgatgttgctgattcacggtggagtctctaggttttgctgcctcttcgtccataattgagatccgattaacctaaattttgcttccacaccggcgtaacgcagatatcagagaattatctagctcctcagctgcgtttaccgatggagaacggcgaatttatcggctaggcagagacgaggagaaaagagacttggcgaagaaagagacgacgatgagggaaggagtcaaaagacacgggatagctgacccggatactatccaatttaaattccgggtcgccccaatttccatatttttatcaaaatgggcttgatgatactttaatatgaccgtagcaaaagcctgttaacacttcaatgaatatgattatggtcaatgttttgcttcctccatcaactgtttatttgtccaagtttgcaactctttatggttattgtgttttttttttttgttttttttgtagctaatcctttgttagatgattggggggtgaatggatcatacaaaacatgaagctatcctaggtcattcttttgcaggcattgtgatgaaatattctttagctatttagtgtaatataatggtttttttctcagtctcatatctctcgtcctcataaattgctattccacgtcctttgatacagatataaaaaatgtgtacaatgtagaccctgcaagctctgtttctccgtcgatagtgtgatgacaacaacagaacaatgctattccaagtagagcagacgatgacttggagaagcagtcctccaaattgatgagtccacacatctttggcctctgcaagctctgtttctccttcaatgacaacacagtaggattctagcacgatggtaatctatattaattatacactcaaaaaacaaattcgaatgcaatttggtttaaactgataggacgacagtttctctttaaccaatgtggcattaggctttcaacttttgctgtaaagagtgtaaatggaatacctatctaactatataaagttatttacgtatactcatcttcctttacaatataccttaaataacatcaaggttaaagaagaagaaaacaccattaacatgaggatgcaaccaacttctgtttttttttcctctatagttcataacacataaagaacaagcattatagctgaatctaatcaatcacacaaccaacaaacattggctgctctataaagttgcagtaagaaaacattcatatatattaacactaaaaaaacaaacctaaactggatgttacatcctcacgaagaagaaaactttttcatttttggagtgaaaactatccgagaaacaaacattgagattgttaaatcaagaagaactagtagatgagtgaatcagaaagaagctgatttgaaaagtcattcagactgagtatccggaagattctggcatagcaaaagataaagctgcaccaagaaacattccaaggataatacagactgctcttaagtacctgctatatgtcatcatcttcatcatctactattcccagaatcaaaacaaacatatgattaactcttatcctattactctaaatcatagatccaaaatatgaaatgttcatggaagcgaataagggaccaaaaaaaaaagagattctataagcttcaacatctatctactcatgatacttccggagataattccggattaaaaaattaagaagttcattatggaaatcggagacgacgacgacggcggtggagagagaagaagcaaagagaagaaatttaagaattctgaatgcgacgacacctttttataaacagtggagcaaaattataaaaacctacttattctttaccaaactaaaccgaaacattttttatctccggtacgtgtgtattcgaattgacgttgatttacccaaaattatctgtatacatacattttctaagatgttatgtttgtggtagatttatccaaatatattcgaacaaaataataaaactatagaaaaaaactctcgattttcgttgggacaagcttttgcataacgataaacaccttcgaatttgctttaacccgatggataaataaaccatacagaattcttcttggtttgcaacaacattttactggtacactagaataaaaccggaacatctaaattttgagttacttaaaccaaaccgacaacgagaagaacaaaaacccaaaacccaaacccagctccgattctcttcgacccggagaaccacactctaacgtcatcgatcacaggtccacacaaggagctcatatcatcagtcctcgtattgtaataaacactgtagaacgcaactctggttcgatcagccttagccgtgaaattcaaaccggccttttcgaaactggagttcgcttgcgccatgtaatgaaagttctgcgcctgatcacctgcgaatgccataatagccaatggttccttgcatttatcacctgcgtggcctagtgagaaagacaatatgtacggcttatctgctttggtctcaaccatttgtgaaataattccttctttgcctgagagtagctcgacggctcgtttgccctttggaacagagaagtgatccgagtcaacaaaccgaaccgctctgttcgattcaacagtccaaccaggaagagacgagatttcttcgtcgaggtttgtcggaagtaaaacaccaagagacgtgttcctaaacatccatggaccatcttcgaaatctccattaatcaccgcattatctacaaaatgtaaccaaaaaaatcagggtgaaataggcacattttagaactttggagtcgaaaatagaaatatagagaaatttatggttacctttgggtttatcaggagtaaagagcttcttaatagcaatgtcatcgatgattggtccacaagtcggatcatcttccatacccggattcttaaaaaccaaccgtacatgatcatcttccgcttcaaacgcccacgcataagggtcccacccttgaacgctataaagcgtttgcaaatcaacgttccgcgacgccagcatatcgtccgcgtctgcgttcacagacgctaccgacacgtttatcgattcgagttgagcgcacgtgcgagcagcgctgaacgtgactgaatagacaaaacctttctcaaccgttagatcttggctgatctctgcgtcgttccctaatcggacggcgtgacggccttgtgggacaatgaggatcattccgccttgtttttgaccggaatttattagctccaccgtaccgttggatttccagcttgggatatcggatggtccgtcagttactccgtcgtcaggaaagccacttgacggtgatgtttcgaagtcgccgttgatcactaaacctgtcataacaaaaaataaaggttacagacaattttaaaataataatgtacattggattatttggttagacaaaatcattggaaacgccaaatgatcacgtttcaagattgttttgaaactagctagcggtgtgaaaagagattgtttttgtctttctcaaataaatagtttgattcgacataacactttaatttactagattgtaaaaacgtgaacgaaaaaaaataataaggagacacgaggcttgaaacgtctaatatggggccagacatacggcccataccttctagctatgacttagtaggaccacaattgtgaagactcgttttgactatttactaatttttatgtttacactctacagttcccaatttacaagttaaaaatgccccttctaataggggaaagcaagagacaattgttgtgttttcggtggaaaaacaaaagaaagcgtgttgaaaaactagagaagtattcagacacttggatgtcgttttatcaagtattctttgtcgttttgtaatactacgaccaaaagaccacctactatttggcgcgaatcctactcaagtggtttttttttttggtaaattttttaatcaaataatttcttagaaagtaaagtacctaaacaactttctttatgaaatcagatctttaaattaatatccacataaaaaaaaaaaaaaagagttctcagggttttgttggtgtgtgtttgttatttgttaattgaagctaaggaagatttaagaagggcttcctttttaattttgccgccgctgaaagcacgaataagatactttatacttaattgacaaatagacccatacaactttcattttcttttctattgtgacggattaaattcagttgacagtttttcccctgactatgagataaccttaactagattagcattactggttcgattaacactgtttacttacttaaactagacattaacataacagatttctaatctttagtaaagaagaaaactcaacttaaaaatcttagcaacagtgaagtgaaattgaggaaaacccccaaaaatctaaacactcaaaatccagataaaaactaaatcaatcatctgaaactaaattattttggtcctctgttcttgaaacagagatgggttggattcaagaaaccaaatcttgataacacaagattcttatttaaatggcatttttgagaaaaaccaatcacgcagagaccagaaaagaacaaagaaatttgatgaaggtaagtgaaaagcgtaccatcctcaaccgccggagacttgtcgtcagcgacggcgactaagacggcaacggagacactgagcagaaacaagaaaatggaactccatttgcatctattgttgctcggaaccatatctctcctctacttcttcttcgtcttcctcaagatatctaaatgctctctttatctctcttctctctctctgtaagtgtgaaatgtgaaagtgtctttctgtatgttcttttcgggcagcgagcaaagacagggaaggttagtgtccttttatccaagattcctcactccttgtctttttttttcttctttttttttaactctcaacatttaatttccactatatttaaagctctttacagacaaaactccatgcacgcataacaaaaaaaaagtaaaagaaatgtttctactgtaacatagtatttaattgttctaattagtagagccacgatggaataagttttagtattgacctaggttctctctttttttttccctctcattggatctgtgctagatgcgagactaaagtggcaactttacttttgatccaactctatttcttttaggctgtggagtgaattattagtttgacaacaacaaaaatgtctttgtaaaatcttcggcttttcactattatagatttgaaaaaatgttgtttaatacgtgaactttcaaaattggccatttaatacgtgaactttatatatggcaaattaatacatacaaaaatcgttgactgacaattttacataaacttaatcgttgatcaagccaaaatctacacgacgttatctgacattaacagaccgataacagtcgttaactaatcttcgttagtttctaatacgacgttgtttcgagtatcgcgaaaacggaaaatgccatttaatactccaattttcaaattgtggtcattttatatatcaacttcacatgtggccattttatatatgaactaaacgttgaccaatagtttaaaatatgagaatgcgttgattagaccaaaaagacataccgctatctagacctagatattcagatttttgtttggattcggtttggatttattcaaatacctaggcctagatagcggtatgtctctttggcctggttaacacattctcattttttaaactgttggtcaacgtttagttcatgtataaaatggccatatgtgaagttgatgtataaaatgaccataatttgaaagttggagtattaaatggcatttttcccgtttttgcgataatcgaaatgacgtcgtattggaaactaacagagattagttaacggctgttatcggtctgttaatgtcagataacgtcgtgtagattttggcctgatcaacgattaagtttgtgtaaaatggccagtcaacgatttttgtatgtattaatttaccatatataaagttcacgtattaaatgaccatttttttaaagttcacgtattaaacgacatttttcccgttatagattgaggtataaagggacgaaaagtaaaaatttgtgtttatgagagttatgttcagtgttgatatgatcagtgaactagaagatattacgtcaccaagtgataaatagtgtttttcttttgtatgtaactaaaactaggcttgataatagaagaaaagcatattgggccgttaaaaagtccaagttaatacggttttgggccttactaaaacacgggggctttaacggagttttgttactgctccttggtggatctgcgagttttcaataaaccaccggagtgaggaagaagcagacgacgacgacgaagatgagttcatcgactgttcgtgatttgcagagagacctagaaaacaaggctaatgatctcggcaaaatccagaaaggcaagtttcgtagattctcgtaacttttctcgatttgattcttttcttgtttctggaggcgggaaaccctacttttctgtgttcatattttcagatatcgggaagaatcatcagctgagaaagaagtatacgatccaactcggtgagaatgagctcgtgcttaaggtatatgttcatgtctcactgtttaatctgagttttgtggctacttcaactgaaaagagaagtttatttcgattgttgattggctttaatctttttatgtgtctgtcttgtatctacaggagttagatttgctggaagaagatgctaacgtctacaaattgattggtccggtgttagtgaagcaggatttggctgaagctaatgcaaatgttcgtaaacgaattgagtacatctctgctgaattgtgagtttcttttcttttaatgtgattgaagcaaatgcagttcgttgagaaacctattttgggattgttattgtaaataaagaacctttctttctttctaggctaatagtgagtgattgctgttcataagtagctaaaatgttttcacttctagctatgtaacaactatgagagatgttgataaagtgtttgagctatagtgttgtgacctcaagaatattgttgtatcctttgcaggaaacggcttgatgcaattcttcaagatatggaagaaaaacaaaacaacaagagagaaacggtaagacatctgcctctcatgcatttatatacttctttgagtgcattgaattagtgatactaggactgctacaccaataatagtccaaacattgatgctcagtatactaagctctaaaaagatactttggtagctattgttgtcagtttaagcctgcccggaaagtaaatacttgaactttgttatctcctctgtctcgttgagtggcctactggccttggcgcaatatgaggatttgctgtttctgcactttcttggcttttaaatggtgataatgatcctatggtttcaatttatggaatcaaaatatttgcagataatgaagttacaacaaaggctacaaactatccaggcaggaaaagcaaaggcttgattgagctactcagttgcaaccacacttgttaaaccctttccactgtgctcggccttgtctcaatggtgtcatattcagttactgagggttcttgtggtttcagtttattgggtgattgatgtctctttgtgtcactaatctttttttgttgacaactagacttaagtgtgtaacttatacatgatcttgtcgccctttatgaagttatgagtttggagatttacaaaaaaatattgtgtgtgtgcgcctaatttggtcttcatacatacttcaagtcgattatgttctatgcaacaccttgcagattacaaagagctaagatgaccaaatgatctcaaatttaaaggtttattagtcatatcagaatgatcttatcttgcagtgtaaatggtatgtataaaaaactaaaaccataattcatctccatgtcaattgtgtctgattacattttgccaagtgagagcttaacgaaaagagagaatattagtctcaagaaacctactactacaagcaaaaacttttacgagttaagttataatttggatgcagaagcttatcttacattgaaagttatgactttttttcctcaacgaactaacttcttctccaattggcagtgtactatacatcactttctccataccctctcttaagtttgtgtatgtgtgtgtgtgtgtgtattgtctggagtagtcttcaaaactaagccttcaggtgtttcttcttattggtaatggatgagcttcagtgttgaaaacaaacttatccaatggtatcactgagtcatctccaaagagcaagtataagtacttcaatgtttcaccaaggaaaaatgtctccatcttatctcttctatgaggaggcacttctgttacatcatccaatgatgtgtatccacctgatttcacctttgtgtacttttcaaaagcttcaaaaatttgccaaccttgatctcggtatctgcaattttagaaatgtgttagctttaagagtagaatagtccccaagaacttagattagtgagggaaaatcggatgaatagttttcatactttgtatcttttgtgatacgatagaggacaaagagtgattcaacagtttcagggcgcagtagattatgtcgatcagcgggcttaatgattatgtcatttgcatacatagaactcttattcccaccatcaagaccatcctcagtgtaatcctgctttattaaaatccaagacttaacaaaaaacaagaagagcaaggatgacaataacgttttggaaaaaagtacacacaaaacttacctttgtgtgaaagtaagcaatttctggagcaaggccagtggcagttacttcatacatctcaaagcatgttttcgctaaatcttctgcaagtttcagattttctaggtcctcaaaggacaaaagattttccttcagggcttgttcctttgtgaggcccttggtagcaccgagagcaagagtaccaggcaagaagcatacctagcaagaaaaagcaattgaatgaatcacaagtcaagaacaacaaaactcgtgaaatctctcagcgaatgacaatagcgtaatactatgaaatgattgctattttcagtaccaagtagctagtgacacttaccaaatgatccatttttggactgaattctcccttagacccgtaaggtaactcccctacaaagaccagaccttttggaattgaattttgcacaagcaaatgcctgactcctttcattgcctcaatgtacatatcatgcaaatatgtgaaattactattcaacttagctccttgctgaagccacaccttaattaaatactcatagtagctatcaccacgagatcccaacctgatattctcaccaacaaagtcacctgtttgagggctgcaccaggtagaaacaacaagtcagatcaaaagagcccgggaaagcaagggaaagcaaattactagcatggtatttatagttgaaagagcaaacacgaattacctgatatagattggaacaagaccttctgtctttggaagtgtttttatatgagctaagaccttcatggcctctgtactatactttggatcaccagaaatagaactgaggtagttaaattcaagctgtacagaggcaacttctgctgtactgctcgctcctcctggagctggatgagcagtcgattcatgcaatatgacatcacaaaagggaactggagtagggctggaggtaaaagccgaaagtagacggtcagccaaatccttagcaatatttagatagatgactggtttcggtccaacatgggtcatgttcaccgtaccctgctctcctccactcaaatggtatgcacttagaagcccacctaagacacgtattgtagtttcaaacaaattaacttgacctttttgactgattctctccaagagatgagtctcaacccatgatcctgcttcagagacgatattatcaagacccattatcatggctgtatcaagagcatccacaacagtggcacctaatcctcctaaaccatccacacctttctggctaataggcattagctcgtcataacccatggcgtactttctatagccagaccatgcatggtcaaaagcctcttttacactttgctgcctagctgcccattttgggtcagaatttgaaatagttgagccattagtggaacttcctcttaattgtccttcgtcaggtgataaacgaggtggaagcctaggtggctttctcaaaagtccccctagcctaagtcccccaacaaaagtgacctttcctttctcattaagaccagattcatttggactcttactcatcagcattagacatgctactccaaagaacagtattaatataaggaacttccccgtgctacagctagcgtagttgcgttttgtactaagagtaagcaagctttgagaaaaaacctataacacaagacattgcaaaagaatgatgtcaaaaaagaagagcaaactaaatcaactttcatacacgtacgaccaaaagcttcaagtcatccattactagattcatagcaccttctacatgtccaattcttactccttctaagcaaacatttctattgctcagattataacttcattttaggagtctcacagtaagaagcctaaaactttaatctgaagctagagactatataagatgggaattctatatcttaacctgaaagcatacaacttctatctaaaaactgaagctttagcggcagtttatcaatctagctttctataactcagcattacctcacaaaaacgtaatttcgtgaatccaaggtcaatttggacacaaagcaattcatctaaaaccaaagaagatgaaccagatacaagaaccagtgacatcaaatccataataaaggagaaaacttgggcataacccatatcagagatcaagatataacctttaaaggagatcgatgtctgaacttggcattgtcgtaatgaatatctttaactgaatatggtagagatttcgacatgctcagatccccccgttctaattgaagatcggctttggggttcgtgttctgtctgccgccgatctaataatgaccggagaataagatgagatttcttcgggaccagatgagatttttttttttcagaagaataaaaaaagtgtttcgcagagacaacgcagagaagtcttcttctctgaaatattacggcagcttctttacaagcattgaccaaccaaactcaagcttccgatttctttctttttcctcttgtttttttttttcttcgtcaaacattattaattcgtttcttctaattacgaattaccacataattttgttttcatccatttcctaagtaaattttaaatctttcgctttcacgacattttttttgtttttttttttctataaagtaatgacatttcaataaacaaatagagaattttgaatgaatgtagtggaaaagtggattaaactgctaaccgactacactaaactatttttggagcggataataaaccgtcacgtaccaaatttttttacgttaaaaagtttataattaatccaccgcggaattgttctattttttttttcagtccgtactactgattatagtttatgaatggttaacgaaaagcggtccgtcctaatcgccgcaaccatttgaatcctttgttagtactaaaagtttgtgattatgactaaaaaaaggtctagtttgaaaaatggttaatacttttaggcttatctaggtgaattagtgaattttaaaaaccttaagctcgactcataataataacaaaatactggggctgaattagaaaccgtcattatacaaaaactttcaattattattcacgcgtcctccttgtactcgtccaatgtaagagaatgaaaagactgacatatccattgagttctctgaggaatatcgtcgaacactttcactgcaacaccttccacaaaccaatctcttctctttcaatctccccaactctcaaatccgaatcacgagaaccttcttcgacccaagacccgtattcactactcaaacaagatccagtcgatatatgtctctcactctgggtcaaatcattctcttctcctccttctgctactttctcgaacctcactggctttctctccaaattcgatttatgggtcttagcttatcaacgaacttgtgctcatgtcaccggaactttcccaccgcgcaatgctattcatgccaatgccctccgttcgcttctctccctccaaaacgccgttacacgttccggtggcaaatttcggtggaacgataagatgaatcagtacgtaaggagcccaaaggataaaatctcaatgaatggtggagagggtatgtcgaaagggaaggtaaggaggatcattgagtctgaagaaccgatttttcaggatcgggtggttcatgaggttctgttgatgattcttgaacctttctttgaagctaggttttcgagtaagtctcatgggtttagaccaggtaggaatccacatactgtgattagaactatcagaagtaatttcgctgggtacttgtggtttatgaaaggtgatgttagtgaaatgttggatcatgttgatgttgatgtagtgatgaattgtcttcaaaaggttgtcaaggataggaaagttcttggcttgattgaatcttctttgaaattttctgataagagagtgttaaaaagggttgttgagaaacatggcaatgacaatggattggggacgaaaaggaggattgaacgtgaaaagagaaacaagacgaagaagaagattttgagtgatgatgagccgaaaccggatccttattggttgaggactttctatagttttgctcctaaggaagctgcaaaggtgccttcttatggctactgtggcgtattgagtcctttgcttgctaatgtatgtcttaatgagttggatcgatttatggaaacgaagatagttgagtattttagtccttgtaaagatgattcaatatggaaggagtctattgaagatggttgtcataatccagcctggccagagtttgttccatctagtgggaaggagaaaactaggaaaatggattacattaggtatgggggccattttctgattggcattagagggcctagagaggatgcagtaaagatgcggaaggaaataattgatttttgcgatagagtttttggtgtgagattggataattcaaagttagagattgaacatataagtagaggtattcagtttcttgaccacataatttgccgaagagttatttaccctactctccgttatacaggaagtggaggcagcattgtgagcaaaaagggtgtgggaactttgctatctgtgtctgctagtttagaacaatgtatccgccaatttaggcggcttgcttttgttaaaggtgacaaagatcccgagcctttaccttgcaacccaatgctttattcaagccagtctcatagtaactctcagatgaataagtttcttgaaacaatggctgattggtacaaatatgcagacaatcgcaagaaggctgttggattctgtgcttatgtaattagaagctctttggctaaattgtacgctgcaaggtatagacttaaatctcgtgccaaagtgtacagcattgcctcacgggatcttagccatccattaagcgagagtagcaataattctgcacctgaatactctgatcttctgagaatgggactcgttgatgctatagaaggagttcaattctctcgcatgtctttgattccgtcttgtgattatactccattcccaaggaactggatcccaaatcatgagcaagttttgcaggagtacatcaggctacaagaccctaaattcttctgtgggttgcataggtcaataaaacgcgagggtctaaccttgccccaggatgagatctcagaggctgtgtgggatttcaagactcttggtgcttggagatcaaagtatgaaaataaaagagaagcagatgatgggttgcagaaattagactcacaaacatgattgtctaccattacctcctttatttggtgtatctggtacaaggatcatgataaaccagagactgagagttatagcggagaatttcatcgctattcttttttaatccccttcttcgcaagagaccctgattctggatctggcttccttacccaacaaatcattgaacttggtaatctaactctatacattgtctcacttcatagatgttttcccagatgtgagtattttactgacgtaggttatgttaaaaacttaggaaaatgtgcataagcattatgtcttccttcaccagatttccaagttttaactttagctagaatcctaggatgtgtaagctgtttgaagtgaatcgtttctgttgtttgtttgatccatctgattgtttagatttagtcgtgtcatacatcaaggcatgaattgcagaacctgtttatttactgtgatgatccataagcaattcattgtaagaaaggcgtgtccttatgatatttaatgaaactatctcttattgagtatgaaacaacttctgttctttattggttgcttacatcaaggaagtctggttactcctcttttcttttaatttatcaaccctcacattgaaatgctgaaactttaaatgttcgtgacaggccggtggtattagcaaaggtgatcttctcaggatctttctctttatgaagatatcattcacaggaacccagatcatgagctctttgcttttgactccggtaagtctcctcatacggcggtcctcaacaaacgcagttatctccgtgtcatataaaactctgcgacctatctcacggaatgtatgctcaatcttgcttctcatcctcatccacacaaacccttttgttttgttgtacccaacttccgtcatatccttcaatggcaacaatcccgtgggtagtttgatgagagcaagaagctccttggctttatcaagacaaagagattgatcactgtagctctctatgtcatcactctcatctattatcatctctcttaacgccataataaatcactttgttttattgtcgaatgcgacttttggttactttgctatatagtaaagtttctatgggtctaatcatgtgtttgggtacgtaaaatggaacacgaaaggtgtgtgtgagcattttcaggcctcatatttggctgcatcataactctgtgactaatttactgaggcagaatcaagctattacataatttaagaacgaacttgttaaatgattcgaggtcttgactcttgcttgtcagattcacttaaatgggaaataaatcaataatggattgcagtttcagagaatctcatttcttctaagcacttgtacattttggcaaagatcatatagtccatgagctcatccatcatggcccaatttaacccagattattcagttaatgggctttattttttttaaggttttggagtcaatttatttctgatgggtttatcaataacgtctcttttttttttgtttccattaatgtagtagtttatcaataacgttatgatgaagttgttgttttgatttttgtgacgaagctttaccagaactgaacgtcaccaattgatgctgatatccgctaattataaatctgataaactcacaaaaattgcattgactcgtacagtcgtactttggtattattgaaaattcagaaaataatatatataagtatattatttgtgattttctaaatattgatgaatacgtaaatgtgatatatattcgtttatttcatcattatcaatctatcactctataattaatgttagacatcatattttaaaaacatagactaattattttatcttatgttaacaatatatttagatatacaataatatacataaatttccaatttattgatttgtggtcaactcaagtcaatctggtatctatgtttaaaaatatagactttacgactttatatacgaatgttaaactgtcaaagcaaaaccacggttgtgttatgatttaaatacatgtgtatgctggattttaagctctagtttgttattagttgaagaaattcctttgaattttatttctttaatgatagatattagattctctagacatcgctctgccatccacaaatgatactttgccgagagatattttccggccaaataaagcatattccatattaaattaacgtaatatatgtaagatgcctccaaaaaatccgacacaaatctagggtttctttcacgaatctaacacggccaacactaataaaagacaaggcaaataagaaaaacgaacatgcatatccatttgcatacgaatgcacacgtaacgcttatcatgtgcccgttaagatcttataccgacgtgtaaatatatagtaggttgcatgaaaatcacgtgaaatttataaaatgggacagtgtgtccgatgactcagcttctgcaggtagcaagcatgaaaggctgcttattaaaaaaaattggatttgtagtcataactccaatcatcaacgatcaaaacgttgatgttcattttttaaatcaaaatcttaattaattaatctcataacatgcacttgaaatatgaatcccatatgtgctaaccttccgcattttgtgaccgctctagtatcctttcgtctttaattgcaaatatatatcaggattccatgaaagaaaaagtattattatttcctctgtaagagagactggctatatgaatatgatctttattgtgtaaataaaacatatgtttacgtttgcgttcatatcaattttgtattaagattcaaaaatatgttttgcaaagttgaaaagagttctcattattatcagtatattaacgcagagacataattaaccaggtctatatatatatcctgcagtaacgagattgagattgacacagtgcaaacttatgtatggaaaagtagggtattgaatgtagattttgaataaccaattgagttttttttttttttttctgttaaaaggattttcaccaattaagtttttagagaattgattttctaagatttaggaaaccttttttgtttgtttagttgtccattcaagtttttaatattttcagttctcatacaaattataaactagctatagggaatctctttcttttctcattagtcattacgttgtttccctccaaaaaacaaaatctaattaatttggattttaaaacaagtaattaatttggattttaaaacaaaaagccaaaatctaaaaaaaaaaaaaaaaaacttcatatattcattcatggcctaatcttatatatgacctccagctgacttttccgaactcctaggtttcctccgttctaagtcaagtcagttgacagtagctcagatagttttcatgaacaagattgtttatatacaaataattaatatgcaaaaaactaaaaaatgaagtagtcgtcaaaattccgtgcggcatatggggcgtagtttgattatgcttttgaatgaggtcatgggccacgtgaaggtctatggggttaggtttgggtcgcacatgatacaaccaaggattctacagaatgttatatgtaatttataataaatatatgtaattcttatttcataaaactgagagcgtttagaatggagttcttaattaattagacacgcatcttctaaactaacttgtttctaggtttacgctatataatgcattcggtccagctgtgttcaaaccatttttcaagtaaattaaaaccattcttcatattgtaatcaaattagtcttatcaggggttaagagaactgatgaagaaacccttatatcaattatttcagtgtacatatgtatttatatgtcaatgatgagaagattatctatctgtaattctcaatatgactcactatactgctctgtctcaagtttgtagagtactgaaatcttgtattctactatggataatgacgaatagatactcacaagtagttacacacacaaaaaaaaagaaaaaaaaaagattcttacaagtacaggtaaaacgtacacatgctaaaaatagatttcagacacccatatgtctgtctaaaccaaagtacagtccatcattttttcaaagaaattaaaaatattagaactttttttatacaaaagttctacaagttttagtatatatatacagtaaaatcactacaaactggtattttagcaaaagtttaaacattttcttaaactttatttggctttttaaagatttttttggtagtagtttgggaaaaaaagaaacatatttagagaagttatttagtttttttttcctagttttaattaactatatatgtaacatatagagaagtgatttagtttttatagtagtaattaaccttctatatatgtattattaatctctattttgcattattggattacataaagcttcatagaattaaaatacaaaaaaatatttatttctattgactagtagtagtcaaaaaaccaaaaagtagttttagtacagacaattttaatttaatatgtacacgcaattttaatttaagttttggactaaaggtaaagagccttgcattttactcgaacaaaaagaaactagggtcgatttcctacatgcgaagaaaacataacaaagtccggtaaccatttggccaaagaacttttgacatttgaaaatttccttgaaccgaagaccataataagataaatagagttccttctttactgtcattattcgaactgaaactttcaaaaaaatttcttttttttgagtgctcaaaattcaacgattgagctactccattcggatagcatccattttctgaatctaatatattcgagatagtgatcaaattcggctgttaagatgcaatatgattttactaatcatatatataaacagatttaaagtttttttctatatgtatatctaaatcttattgggaaaaaatgagaagttgaatagtgttacgtgtttgtgtaggcgcattggaaatttggaatagaaatgggcacggaatctttggtgagtagattttggaaatggggagagcgacaaaaatctctgtcaagaaacaatcctgttttgtccaaaaaggagaggatatatgaaaaaccacgtaatcccattttacttcacgcaccctagctctccacgtacgtctatcatttaattttcatcagcctattttctcatttatgcagaaaaattcgaaaactgatttgataagtcgaagattgcttctgttaaagaaactatttatgggtcatagtactgtttcactcatcttataaaaaaattatgattcgattataacttataaggtaaattaaagaataaatccaagtttaccaaaacaaaaaaaaatccaagttataaacgtttttgaagatgatttgttttaaaaaggtaacattcgaatatatagttaaaaaataatagacatacataatttggataatactatttcatagttagaaagttctgaatctttgacacatagtttatttatgatcatgaatttaaataaatctttgtaaattgtataccgggtagattggaacaattaaaagcattgctagaagtctttgaattattgtaaactcgacatgtctaggacctgatgttatcttatcattttgcaactagtcaagagattaacctcaactccaatttattttaggattgattttcctgaaactgttttcttaatactttgctaaaaacaataagatttttaattatgttataggcaatttaattaggtgtagttttcgtgcgtgaattgcttttagctgaaagctgaccggtcacatgtcaaccttttgtgcaagttgggtgattcttccagtttgactcatcaattctacgaaaccccttttttataagcgccccacacgaataacggtccatcgaatggtctattttcagaaggtaataatattaaagtttacatattcatgcacatgctttaccagtcctctctgctcttccaacattatcacttccttttcgcattcatatgcattttcatttatgcgaatatactataagcatatgtggcgtatgtaattaatttacatacgagccatcatgagattaagattctttatgattggagagatatgtatataaagtattttatatcatcatttcatccgtattttggttctttatttgcatttttgtgactttacgatagtgaaatttaagtttgtgacaaaaagttaagagaccaatgcttaaggtttttaaaagacacgttaaactcgatcgtttcagactcatataagttggaaaaaaactacagttttataatagtatagaagaaaaaaagtttcttgctggccacatacatttctaattcttgatataataaaactttgaacaaaaaatcaagtcatgcaaaaacaattattttgttcaaatgagattaaagaagctaagttggtggtcttaagcagtactaggactatatttcggtttaaatatatattcgatgactgaggcctaattatatctaatggtcaaaaacgagcaaagattgtcagtggtctgagttcttttgcttcacgtttcaatcgacaattggcaagttccagcggtacgggacacttaaggagtaaggaccattagacgcacaaattcttgagttgtcgacattccaacctttttgaataaatgatttatatttttttattttaaaagtagattgaaaagtaaccggtcaaaagcttatggatcatggtaccgatttaactgagtttattacctttttgtaaaacaatttaatcgtcataacaaaaattcttgctttatttaataagaagatgaaagtacacttatacacaaggaatatctacttaattagtagtaatttaacaagatatatatacagtatctagtattaaaaataaacttaaactataattccgacattcttctttaagctggtacatttaaatccgccacgacaaatttatatagtaaccaatcaaattgtggacgatcaagtgcattggttagaatgtcagcaatgttattggttgtgtatgtctgtatatgctaaatgaagaatgtggatgaccaagtgtctttgtaagaatgtcaacgtacaatatctttccaaatcataaatatgttaggtccttttgtgaaagattgaatagagcggtaatatgaagtgtcgctatgcaatcgcaatgtagaagagtcttcttgaggcatccaagatccataatggcaaaaacaaattcttaacccatttaatttcacatgctgctatcgcgttgggccaatacttagtttctatgaggattaagacactataagttgcttcttagttttccaaaatataggagagtcaccaaatcaaacatgaccacatgcgagcttagtaatctttatgttaacaaacacgttacctaatcagaatcacaatataaatatccttaagttgcaatcagatttaagcaaaatgtcttgactcatgctctatttcaaaatcgcaccacactaaataccacttcctagtgagcacttcttgaaaaaactgagacagaacattttctatgtaatattatacttagattaagcgccgaacaagtcgtccttgttattgggtttcttgtatagcagatttacgactgagcagattatcctactactattaagagcatgtttatttttgtctcttgactggtgaagacataacctagactacaaaatatattttgtgtcatacatttctttgatagaataaacaatttcatacgacttttgttcttttaagagtttagactctaaatggtacttgtttggtccatatttttttatttgttttttcttcttttatgagataattataatggtatatctcatgtaatcagaatttgttttcttaatttaagcaaatagtctaatacgatatataaacaacgataggttaggaagttgtcatgctcacaattaatgttcaacgaatagatgatacagtatcattctatattttgggtgagccaattattatgcatttattatatcctcctctatagagatattattgtggattatttttaaaatcaaattactaccgagtaatactttaaaacgtctgatcaagtggattgcgtcaggttgattggagttgttacttcgattacatagatgcgttgctgatcaccacaatatattttatctagatattgaatatgctcgaaaaaaaaaaacgattactattgagtttgattacaaaaacaaaatattacaagttgtacagtttttatttttaccaatcacaaaaacgttaccaaaaatattactcttaacatttttgtacaactttgcattgtaacagtttaccgttctatataacagcttaccgctccaactaacagttaaaattttctgttagcaatcagacccattgtgttagttttttttgttgtggttatggttaaaaacaaaaatagtgttgtctacaatgaggagatttaaaactgagcttcatagcatttatatataaataaatattaaattttagggattttcatatcaaaaccaattaataaaagtagattgattcatatattttatatattattataatttatatctcacttttggtgtgagattcatagtatatttagtattgagttgagataatgacctttcccttataatggctttggaaggtggcgagtgagcactatgcaaccttttgttacattgtttccaactcatatttactatcgcctggaaaacaagctaaattacgaagagatataagcattttgagacgtggacgaacccattgcataatggagtcgaaggaagacaaaagttgagccaaaactttcgcataaaaatatgaccaaactttaccaaaataagggcattcaaataacaagttttagttggattcccaaaaattttgaaaaaaaaaaagtgagttcgatttgcaattaggtcatcgattgaatattttgggacctatgagtagattatagaattccatagatgggatattctttgttacacacaatagtagttatcttttcattaatgcaacttttgagtcttttacgcatttgaagaaacttgattaagacaagatgagaaagacaatcacaaagaacgaaggagaatattaagtcgagatcaattaaactttatcatctatgccactaaactataacgcccaatgatctataacgtcttgaacttttatgagtgcccatatctttcaaaatcctttaaagatgccctcttttgttatgttcttttttccttaacatagacgacttggctgttttttttttcgaacagaaggaaaatgtgatagtatgtctacttgtatatttctgattcagtaacgcttcaagtcattagattatacatgggataaaacatcatatcttatataataagagaaggtttttcctaactttgcttactaatgcgacatttgacactctactttgatgacacatgtacttatcattaattgtagtttgactaaaataatttattaatagatatattaaatatttagaaaaatagtcattaaactttgaaattactacatattaaactacaattttgaaatgaattttcttctagcataattgcaactcccttaactaattacaaaatcaaatctttagaattttgacatgatattatgttttatagttcactactatatataatcctccaattttataagaaatttttccatctttagtttttttttcaaaaccttaattaattaaaataattttgtatcaatattatatgattaaaaaattaaaaatatgttaaaatttgatatcttacttttgctcatattttaacagtttttctttttctatgttatttatgcatgtatatattaataaacatatcatatcttatttttacaaaataattgtatgataaagtaaattaaaaaataatttgttgatataaactcatacataatagttccaattcattttattttgtaagtgacaaactaatttgtcttcttataaaatcatatgaattttaatataaaagttttttttttttaaatcccaaggacaacttctatcttttaaatttattgtgttttacccatataacaacataagatatatatacatgaatatagtgcaaaatgatgagagaatgattatttataagatggtaatgaaaaattgataatcgagatgtatttaaacaaaaaagaataacagtgtaaggttcataatctaaaattaaaatttagaattaagtgtttacaataattttttttaaactcataacaacaacaagaaaaaaacttaaaactaaacaaaacaatatttaagatacggtggaaggggatgaagaaatgagagaatgaaagaatgtatatatttataggatgagaagtgatggaagttacaatttaaaaataaattgtgggagttaatttttaatttattttgtgttgaataaaatggtgtagagaaatataattaatttatatatatttatgatttcaggtttgtaaataaattgtgggagttaatttttaattacttgtgtgttgaataaagtagagtggaaaaatatagttgatacatattttttttttttcagttttctattaaactgtgtgttaaataagttatttattatttatataaatttaaaaaaaaaacttatattgccaagtggaccattaaggaaagagtgaaaccttacttttatatatatgattcctaagtttttagtttcatttattgttgccattacatcacatataaataataataattgttatataatattaaattaattatataaaaatattatggtttcaatttataaaagcttataacatttataggggtgtcaaaatgggtcaaaattcatgggtcaactcaactcaactcaatccatgaaccctaatgagttaaagtttttgactcaaatgagttgatgggtcaaatgggttattgggtcaattggtttgatgagtcaaatgagttgggttgtaatggttaatggtttcaatggtttacccaattaacccatcaagttttgtaaaattgaattaaaccaagtaaaatctctaaaccaatgccaatttaagcttaaccaacacatctaaaccaatttaataaaatcaatatttttccaaatttcttaaatatacaagcgatgaaattgagaaaaagtaaactcgtaatttttctaccaaaaaacataaacccgtgattttcccgccaaaaacgtaaacccgtgattttcccgccaaaaacgtaaatccgtaattttcccgccaaaaacgtaaacctgtaatttttttgccaaaaacgtaaacccatgattttcccgccgaaaacgtaaacccgtaattttccgccaaaaacgtaaaccgtaattttcccgccaaaaacgtacacccgtgattttcccgccaaaaacgtaaatctgtaattttccctccaaaaatgtaaacccgtgatttttccggtaaaaacgtaaatccgtgattttcccgccaaaaaagtaaacctgtaattttcctgccaaaaacgtaaacccgtgattttcccgccaaaaacgtaaattcgtaattttcccgccaaaaacgtaaatccgtaaaaagtggaagccgtaaatattctaagtttgatgataatgaattaataatttattaataatgataattatttattattatgaaataataataattaattaaattattacttagatgggttaacccaattaacaactcaacccatcaaattaaatgagttatgggttgacccaacccatttaacaaaatgagttgggtcaacccataactcatttaaccctaaactcatttgattatgagttgagttgagttgggttacccattttgacatccctaaacatttaacttagagacatattttccctactttttcccatcatttgaagttaaacataaataaaactatatttatgctaaataataaaataaaaacaattagaattttatttcaccggcttatctgtttggaaatctaataataacaattgtttgacatttcatttattataatgaaaaataaaaatatttatttctattcaacccatattgaaactcatgtgtaatggattcatggaaatatctaataaaagataaatatacatttttcacgaaaaaacatgcatttttcacaaaaaaacccgaaaaataaactatagtgcattgaaaactcttaaaaactaaattatcttttttaaagacatcacaatttgtaaacatcaaaattaatatttttaattactttcgagttttctattaataattatagataaattttatatatagtttgttttttgaaaaattctttctaatgcccttttcatgatgccctttttcaactctacccttttgttttatctatttttatttctaccctctctaaatttttaatgagcattttacccttatttggaaattattttaagttaacaaaataaaatattaatatttttttgcttaaaatattccaaaataaatttctcgccaataatttcctgccaaaaaatttcgaaaaaaaatttcctgccaaattttgttttcaaaaatatttttcccgccaattttttttttttggcgggaaatagatttacaagggattttaaaagagttttaaaagatttacaagagattttaaatgggttttataagatttacaagggattttaaaaacgtgatttacaagggattttaaaaggtttttaaaagatttataagggattttaaaaaggttttaaaagatttacaagagattttaaagggatttaaaagagttacaaaggtcttttaaagatttttaaagggtttaaaattgttttaaaaagattttaaaatatttacaagagattttaaaagggttttacaatatttacaaaagattttaaagggatttaaaagatttacaaaagatttgtaaagatttttaaagggtttaaaagtgttctgaaagatttataagggattttaaaaccttttaaaattacttgtaaattttttaaaagccttttaaaatcccttataaatcttttaaaactcttttaaaatctcttataaatcttttaaaaccctcttaaaatcccttttaaatctatttaccactaaaaaatatttacaaggatttttaaaatcatttttttgactgaggaaaaatttgttatgaaaaaaattttggcggaaattttttttttggcgggaaaaaagtttggctgatacttttttttagacgggaaaaaaaaattttggcgccaaaaaattggcgggtttagttcagtttccaattacatgtttctattagatgagggtaatttggtcattttgtttaagagaaagggtattttttaaaaatggacaacataaaagggtattgttgcaaaagggtagtgaaaaaagggtagttttgcaaatctcccttgtttttttagtacacttatcatattttatatgacttttgttttcctcaaaattgacattcttagatctttagttaagttggtagattttcctttgaaacttaacttaaattataggctttaaatttttaaacgtgaagaaggttcatctattttttgactttcaagacaattgataatacatgcatattcattttcacaaaaaaaaaaaatacattcttgaatattttaagtttttatatagtaaaatataccgttttcacaaaaaaaaaaaacagttttagtgcattgaacatttttaatcaactaaagtgtctttttaacacatcataataatttgtaaacatcaaaattgaaattttatttaattttgagcgatatattaacaattttaaaataaattatatatataatttaacgtcttttaatatatttatcagattttatatgacttattttttttgagccgacatataagatctttagtcaagttagaaggtttttcattgaaagttatcttaaatcataggctttaaatttttaaatgtgaagaaggttcatctatcgttttgactttcaagaaaattggtaatacatgcatttacatttttacaaaaacaaatactgaataatttatgtttatttttttggaagaaaaacttactgtttcacaaaaaaataatttaaaattgaatgcataacttttaatcaactaaaatgtctttgtaaaaaacatcttgtaaacatcaaaattgctataattaattattttgagcgatatattaataattataaataaattttatatataattcaatataaatattattttatattcaaaattaaaatcgaatatataatccacgcatcgcgtggacaacttctagtataatatatgtttgagataaaagcttaaaacatcagtttaatcactttttatatataaacaatttaatcatatgttgcgacgcgattgatcattattgacgtaacacattttatatatatttttgttagtttaatatttaactaatttgattaaatgaatatgaaaatgtcaagtgatacttatttcaatcatttgtaccattggttgaccaaaaagaattatttgtaccgtttgcttattaatacgtttatgattttagaaacttgattggatcagatctaaagacgacccaacccctttaatttttctttttgtctcaaccaacccatttaatttagggacctcgattagttattgtcacttattgtttgcaaatatatacatgttggcacgtttatatatatagtaactatagtgtaattatcacgtgcctggtcggctgattttccatattcggttcaaatgatgattgtgaaaatggctaccatcaaataaaaggatcatctataaattgttagttgagtctatttgatattattatttaaatgtgtatgtccgattctttgtttgacatcatgtattcatgtgctagtttaaatttcaaaaccctttgaaaagcactattaaatttttactcagaatgccgtcaaaaaaaaaaaaaaattttactcagaaatgaggaaggtatggagcataacttactgactttaaaagtaagaaaatagaaagatctcaaaaaggaacacagttcagttagtgaaagaagatagatttcattgtccaaataatccctcatgctcgtccggtttgaactgtgctctcctaagcttcggcttttgatattgagtgtaatatatagtgttcgtcggtgaacatattaattgacgctaaaatattaattgatgctcgatcgcctaaacatttttattttcgctttccatatgtaccacatataatccatacaaaaatacttatgtgatttgcttctactacgctccccttcctcttaactattgatgtttttattatgtgctgaataggtatccactataaatgataatgtcgtacaaatctataatttctttagcataaactatttatagttatagcggggttccaataatgatatatacaagcaatgtcttaacatttattgccacaaaagaattacatcgacaaactaactatacgaacggcggcgatgtaattggacaatatataatcattgtgaccaaaataagaactgatgattttttctccgttccatcattgaaaattcagaggaaatatctgaagtcaaaagcaaactagattggacgacaaggatttttttttattaaaaaacatatgcaaactgaagggaaaaaagaaagagaaactatgaggtctgtgtatatcaacttcctcataatcatctgatttgctacatctaagacatgaaagaattgattagaggtcatgatcatcgaataatatatgattatggttcaattattcagccgttttttttaatttgttctctctttttgtcatcacagccaacttaattttgtccgattctttcccttccaaaacaaatgggtttccctttaaacttttcataattttctatcaagacaaataacaagaataaataccctcataaataaccttaaatgccaccaatgatttgctacatcagctttatgataaagaaaagtccaaataaatatgaaagaaaataatttctattactttttgtcaataaagaattttctaataaattagtaacttggaacaagagttcgaggaccagaatactctctttggctttagaatcagccacggtatgaaagaaccaagcttgatatgatatttctttcagaattatgaattatgatttatttaaaagttttgttgtatcagaattttttaaaatttctgtctaatgatgcacttggtgtaaaaacaatttttttttggaaattaatttaatattattttcaaaaagaaaattatgatttatgagtacgttaatgactttgagtctttgaactagcatgtcttcatgatttgaattataattgtgtttataattaaaaatcaaactttctttatacaattttttttttttttaactatgctttgtttcatatccaatatcaaaaataagatgcatttaaagtaatataaaaaaaattgttaaagtgacaattaaggatgaggagggaatgatttatcggggtgacaaagagatagggttcatgctcaggagttctttacaaaggtttatgagagcaatggtcgtcctgtttcaatcattgattttgcggatttcaaacctacagtgacagagcaaataaatgacgatctcacaaaggacttcagtgatttggaaatttataacgacatttgtcatataggagatgacaaagcaccgggtcctgatggtctaacagctcgtttctataagttttgttgggagatagttggtccggatgtgataaaagaggttaaaatttttttcaggacatcatacatgaaacaatcaataaatcacacaaatatatgtatgatacctaaaattacaaaccctgaaacattttctgactatcgccccattgcattatgtaatgttctctacaagattatttctaaatgtcttgtagaacgactaaaaggccatctagatgcaattgtttcagactctcaggctgcctttatcccgggaaggttagttaatgataacgtcatgatcgcacacgaaatgatgcactctctgaaaacaaggaaacgagtctctcaatcctatatggcggttaagacagatgtgagcaaggcgtatgatagagtggagtagaattttttggagacaacgatgagactatttggttttagcgagacatggatcaaatggataatgggagcagtgaaatcagtcaactactcagttttagtgaatagcatacctcatggcacaattcaaccacaacgtggaataagacaaggagatcccttatctccatatctcttcattctatgtgttgatatactaagccatcttattaaaaacagagtagcggaaggggatattcgaggtatccgaattggtaatggtgttcctggtgttactcatctacaatttgcggacgactctctttttttctgccaatctaatgtccgaaactgccaagctttaaaggatgtctttgatgtttataagtactattcgggccaaaaaattaatatgtccaaatcaatgataacgtttggttcacgagtacatggcaccactcaaaatcgtctcaaaaacattcttggtattcaaagtcatggtggaggtggaaaatatcttaggctcccggagcaatttgggcggaaaaaacgagacatgttcaactatatcattgaaagagtaaagaaacgaacatccagttggagtgcgaaatatttatcaccggcaggaaaagaaattatgttaaaatcagtggcggtgtatgcaatgtcttgcttcaaattaccattgaatatcgtttcggagattgaagctctcttaatgaatttttggtgggaaaagaatgcaaaaaaaaaggggaataccatggatagcttggaagagattacaatactcgaaaaaggaaggtggtttagggtttagagatttggctaaattcaatgatgctttacttgcaaaacaagtatggcggatcattaacaacccaaattctttatttgcccgaataatgaaagcaagatactttagagaagactattcttgacgctaaaaggcagagatatcaatcttacggatggacttctatgcttgcgggtttagatgtaattaaaaaaggaagcagattcattgtcggagatggcaaaaccattcgaatcagtcaagataattttgttgcatcgcaccctccacgacctcttaacgtcgtcactcctacgttggataccacggtggatacgttaatctcaactcatggttcgcataggtattggaacgtacatctcatttctcagcttgttaatcccgacgaccaccgttttgttatgaaccatcatctttccaggacagtgcatcaagataagctagtttggaactactctccttctggggattatacagttaagttcgggtactggtttctctttaatgacccaacgaatattcaagttagaccagcggtgccttatggttcagtggaaattaagaacaagctttggaaactccctattattccaaaaatcaagtacatgctttggcgtacaatttcaaaagcattaccaacacgctcacgacttctcactcgaggaatggacatcgatccacactgccccagatgcccaactgaagaagagacgataaaccatgtattatttacgtgtccttatgctgcgtcgatttggagcctatcaaacttcccttggttaccgggtcatactttctctcaagacacagaggagaaaatttctttccttatcaattcgttttcaagcaatactcttaatacagagcaaaggttagccccattttggctcatatggaggttatggaaagcacgcaataatcttgtgtttaataagttcaatgaaagttgctcaagggttgtgacacaaactgaagcaaaagtcaatgaatggttacaaaatgtgaaccgaagagaggaagcttccgatttaacacgatcatcgcacagggcaaacgtgcggtggaagaaaccggtgtttcctttagtaaagtgcaacttcaatgcgggtttcacgggtaataatactcagagaacaggagggtggatcatacgtgatcatgcgggattagcgaaggcttgaggatcatcaatagtccaaaacgttaccactgctttggaagctgagacaaaagcgctattaatcgcaatgcaacaagcatgggtacgagggtataagtgtgttcaattcgaaggtgattgtgagatccttattaaagcaatcaatggtgcaacttctagatgtgaaataaccagtcttctccgaaatgtggatttttgggcatcaagattttctaatgtggttttcactttcacaaatagactctgtaataatactgctcacctcttagcttctccacttaattcgtgttacatgtttcaatcgaattctggttatcagccactttggctcaagaactctctttgtaaagatttactcatataaataaattctgtttgttggaaaaaacaaaaaaaattgttaaagttaatacacttgcaattcaaaaataaagtggcagtaactaaaatgactcatcttctttacatattaagttatctcccatcttattcccaacttaggatttagtactaaattgtttcccccgaatcatttgccgaactcaaagaatcctatatagtctagccaaaaatattgagaaacaatgtaatgcaatcttcaaaaagcttatgatcagtattcagtagattaaagattcatatgattgcaatatcaaaatcatatgatttatacataggtaatgtagctaagttaggaggaggacgggcattggtgatttatttttaatagaaaggagagtgatgagaaattaattatgtcctaatgattgtaaaagatgggtgcaccaattatttgcgaatgctgcgagaacgtggaaatgaacagggtgaggataaggatgtttctatttctgtattatttatttttatgaaaagtaaaataaaataaacgtgtaagaaagctggccttgggcctctttgatgggtaggctttattcttcaacatcaccatcctcactcctacggtttccttgtgcataggggattcatttttttttactcatttctaaaaccatgaaaaaaataaagtggtgcagatttatttggtggtctttagacaagagatccaatcattttcctccatagatctctactataaggttttttttaccggtgattattagttaggcgttcaaattggcaaaatgtttttcagtgtttacaaaacttgaagaataatttaggtttccatttaaaattcttccaattatccaaacaaaccaaaaagataaagagtacagaaagtattcacaagatcttgattcacaaaatctcaagatcttaattagctttttgacccaaaaatataatctttttatagggtcattgtgatcctaagtatatgataattctttacatacatatgtgcataggggccgcgtgggttacttgaaccaacaaattagctctcttgtatttgtataaaccaagcaatttttaaattctaaaattatattttgaaaagtgaaagaagatacactttttaccaaccgaacaagtctaactgaaccaaaccaaaacttgaagatgcgtatcctacatttgaatattatataagagaaattggtggaaaattatacgaaatttaaatttattgtaagtactattattatttggtaatcggaagttctgatccataggcatcatgtaaatactacaatagttaaatacgaccacatcaaaaccaaatcctaggaaacacatgaggttatgattttaaccaccatactcttactggtaataattcaccaccgagaaaccggagagaacctacaaccagaaagcacctacatcgaattttggaagcaataaagattacattatgtatcagaaataatcgttaatacatgtaacaatgaattatttgtttcgagtgcaaggtttatttatcatgattcacagtatatctaaaataataatttttttgtttagatatattaagagctccctctggcagtttgatttaaacctagaatttgtaatttgtatacttctgatttcaaattcatccctaaaacggtaaaaatatatatttcaacccgaatgttcaaaataaaattatatatgtatatatattcccaaccctacatgcacttagatattattgaacaaataaattaaatagagtaaacaaaagttaattactgcgcgtcggagagaagccttggcgtccaagtcttaccaccgaaaatatgtcgacttcccatttgctttaacttaatttgataatattataaatatactaacattttactgactcgaatacaataatagtgattccagtaaattattaactaataaagaatggcaatgcttttttttttttaagaatgacaatatttcataagattggcaagatgcaattgttttttctatcgtgtgaatctgagaatctcactcaccgcccaatctataaccctgttcaagtttaactatttctagtagcacgttagaaaagagctaaatatagaagactttatcgatgggttttatcttcaacaatatctacgtaggaatatatttcctgtaaaagcatttagtcacgttccttattattaatatctttttaatttcagtgacctaaatattagattgtgggcttgacaatatccctaatactaaatagtagtgttttctctacatatattttgtattttcattttaacgaaaaaagaaatttcatcaaaagactatagctttttcttacataaagcataactttatcttgtacattataatcgtgaaattgttgaaacatttcgagtcaagaattaattaagtaaaactacgacccgtgattcttttcttcctttgtcgacaatccatacgcgtgaatacgtgattagtcaaatgtaaaatgcaaaaagaaaaaacataaaacaggaccataccaataccatattctcactataccaacttcgatttcataaacccaaataagaaaataaaaacaaaaactccacgctgtatttccatgtgtgcgagatacaagaatagactcgacatgcaaaataaaaataaatatgaccaaataatcatataatatcttagaataaataaattaaaaaatcatagtaaccattttataaatttcgtaaccttttctccgtcatcccccacataccactccctataaatgccaagcaaaatagctttcctcgatagttcctaaatcataactacaaaaacttttccttcttcttcctcaacctttgcttcaatcttcaacaactttctttttataaagattttgcaagttaagtgtaaacctacaaaaaccaaacatggtggttttgccacagccagtcactttagataaccacatctccctaatccccacatacaaaccggttccggttctcacttcccattcaatccccgtcgtcaacctagccgatccggaagcgaaaacccgaatcgtaaaagcctgcgaggagttcgggttcttcaaggtcgtaaaccacggagtccgacccgaactcatgactcggttagagcaggaggctattggcttcttcggcttgcctcagtctcttaaaaaccgggccggtccacctgaaccgtacggttatggtaataaacggattggaccaaacggtgacgttggttggattgagtatctcctcctcaatgctaatcctcagctctcctctcctaaaacctccgccgttttccgtcaaacccctcaaattttccggtaatctcaaaaaacaacgttacatcacttattttcacttaagatactgttaaaaacaaatctttgttctaaataaatcatcactccttttctttatacatttcaagaaacagagcactctgttttgtttttttcatcttctagctagtactacttttttcttcattgaaacaatctgacagttgtgagtaaacaaatataaacagtgagtcggtggaggagtacatgaaggagattaaggaagtgtcgtacaaggtgttggagatggttgccgaagaactagggatagagccaagggacactctgagtaaaatgctgagagatgagaagagtgactcgtgcctgagactaaaccattatccggcggcggaggaagaggcggagaagatggtgaaggtggggtttggggaacacacagacccacagataatctcagtgctaagatctaataacacggcgggtcttcaaatctgtgtgaaagatggaagttgggtcgctgtccctcctgatcactcttctttcttcattaatgttggagatgctcttcaggtcccttttcctctcttttttctttttttttatatatatttaaaaatctaaaattagtttgataattttatgtatttaagatttgatgtttgtgtttgtgacattctctgcggtttgtttggttggtcaaattcaaaactagaaaaaccgtatatactttttttatcttaagataaagttattaaattaggtaagtgatttttttctttggttgctaaattgggatattcaagagagtgactgagatcggtgtggagggtcgacaaaaattctcacatgcgatttcttctcgtctcttctctttttccatttttataaaaagagaatgggttttaaagttcctttttcttgtgtgtacgtctagaaaatctatgtagacactgagactcacgtgacaattactattacactatggacatgtacgcagtactactattcttttataagtgacatttcaaaaacagaccaaaaaagtattagagaatgtcttttatcttaattttgactcctacaagattttcaaaggctaataagacgcatgtattaacaatatatacccggtgattacaggttatgactaacgggaggttcaagagtgttaaacacagggtcttagccgatacaaggagatcgaggatttcaatgatatatttcggcggaccgccattgagccagaagatcgcaccattgccatgccttgtccctgagcaagatgattggctttacaaagaattcacttggtctcaatacaaatcttctgcttacaagtctaagcttggtgattatagacttggtctctttgagaaacaacctcttctcaatcataaaacccttgtatgagagtagtcatgatgatctttatcatcctttgtacgatagaaagtcataatcacaaaaagaaggaaatggatagtgttttggattagcttttttatgtttggtatgtttttcattaggtacaaaagctttaggctttgcttagagtttgacccaaccaaacctaacttttgtatcttctcgtcttcttcttctttttgccataatttgtttatctttcttgtaacaattagctagtgtttattttctctttatgtttcatttaacagttaatttttttacttttttttgccatttccctcatcaatttcttttatctattattctattactatcactttggttataaaatataatatatgtaaatatatagatatgcgttgtacgtgttaaaactagtgttacaccaaatttacgttctaatagaaacaaaagaaaagtcttccactttatgtatgccctcattgtgtcatcatgcaaacaaataatgatatttctctttccttctcctattgttatggactcttggccgttaaacatatggaatttgagctatgtgctaaaccagtctcttactatctcacaatagctatatgatgacgcaagggtcgagaagtatgtagaccgcagaagaaaaacgaaaactgttgaattatcaatgagactccaaatcgaaaccgaaccgtacaatatcataaaattctaatagtaacaaaaacacatatatgtggatatacatattcttgttactattaaaaccgtaccacattttattttcagttgaattgcacatctccactattttttattgtattatcaaattgttagcgcgtaaatttggttttaacaattttatggttagtattcgccgaaccttagataactaagactaaactctaaatatatagaactagaccggacaaaaaaactcctatttaacatccctagtcctcggagtcttaagtccattaagactcgaaaatgattacgtgggtatgatgatttgatacattgatgaataacttaaagtcgcatcattaaactatttttttcttgaaatttgttattttagttttatttggaacttgaatattaaaaactaaccaaatgttattgtgggaaagcagtctacaaaagaagtggaatagttttctcctaaactaccaatgacattaaaaaaaaaacaaatatattttcattttaaagtaagtaatgtgagggatagctgactggagattataagagtgaacgttgattttttgagacattttaaagagatagaaagaagattaaggttaacagtttaaaaaaataaatataaacaacgtttgaaacttgacaaaacaacagaagaagaaagaacaagagttgttttaaaaatcaagaaaaaagcattggagaaaataaaagtggagaccacagagaaaaagaagagaccggtgctacgtgctagggttcttacagcttttagaactgtacgaaacggaacagagaactgtacagttactgtcgtaatgtcgttggtttatgactttttcatttattatttatatattttattggttatcacttaatagactccgactcaccaatttaatacccatttttcacaaattacacatgtaatacatccgtaaaaactcatcaacgtttagaaaatttcgtagctaatttcaactttagtttattgtttaaagaagtttgggttgaacaagttttctaaaccattgaatagataatttgttgaattcacacaagaatattgtaactaactagatggagcagtaaatatagtgtgacaacagttttggtcgtctcttgtcagactttcaggtagtgtatatattaaatatctagcgcgacacattcatatataggagtagtatttgtttttgttttgtttttacttttattactctaatagacaatggtcttgatatgaggaaaagaaaaaagaaaaaagacaatagttttaatagactccgactcaccaaccatagataatataggtaaattagttacattatggtatattaattgatatagttacattactccaataccagactttctcattttcaacaaagttgtggttgtacaattggaagattgataggtcgactttttcgaatatatccatgatagttagctgttgtactaccatttgacaactatagatggtcacgaaactggatattttgttaaaaaaaaactggatatcttttaagtgtttggatatcataaaaacttgtgtgtgtccgtaaaaaaaataaaaatagtaaaaaagaatgtttcaaaataccaaaaacgaattatttcaaactataccgatgctaattagaacaatcataatcttgatttattttattaattttctgtagaagttgagagatgagacctacacttaataatagataaaatcgtaaattaatatatttattttttaactagtttgaatacgtaaaacattaactaaccatttaaaatcgtatcgtttcaattaatagtaactgcatggaaatcatacgacacagttactgctgagtcgctgacatatcagtttataggaatttgttgatgattcgtatcaaataaggatgtcgtgtaattggctaaatcaaatcataaaattgatttctccactgaaatatttataaaacagaaattttacccaaatattccatgtgaaattattttcattaaatggaaaagagcacgatgtgactcaatgcggctttttagtgcatctacgggtccaaagccagctcatgttgggcccttttgtatgtaagtttgcatttttttcaatatagataaggaaataactacgctaaaaataatttttttttacaaaagaagatatggaaagagtggcattccttatataatatgtacgaaattgtttatatgtttttgaattgtgattgtcacgtacaaatgatggtcatataaaaataaattaaaaactaaatctctttaattaaagtaaattattgcattcgaaaacttcaaattcaagtctaaactggccaacctataccctaagcaaccactcctcgagtcaaatggaaaaaggttagattgaagctttttgacattcttgcgtaatgtttttccattttatcgaaaccttttgacattctttgcatagaaagctacgaactttctgagtttaaaatacttctcccagatcaatcttcttgtgggttccaagtcatcatctcttgaatttgcaacccatatagtcttaaatttatagtgcttttaagtttttaaataaattctagactatcaaagtcaaaagttttgaacaaaatattttaattataaaccaaaattacattgattcttctggcacattcagtcttggtgagccgttggcccattattattatagcccattaaacagcccaattacatacacatttaggagtcaagtcaacccatttacttagaaggttgatggttttcttttctgattaatatatcaacttattaaagaacgtgaattacgtaaaaccagaggatcatagattgtagaatttgtgataaacaaatttcttaatatcaacaaaaacaaaagccagagaaagaatcaaaagaacaaaaatggcgtatcggagaagacaagggatcacaagagcttcaacattcaaagaagacatctatcatcaaccaccagatcccgatcacggtgatctcaaaggtcactccaatggcggatccttcagatcttctcaatctttctcttctcattcctcccttgccgctcaagcaatccgtgcctcctctcaggtctgatctctctttttctctcttcataagattactttccctgcaagaaacctaaaattcaaccaatctcaggctcaaggattcaccgcttacgaggataagagcgagagtcgtggattctggggaatcttagctcagaaagctaaatcaatccttgaagacgaagaagagcaacaacaacaacaacaacaacaaaacgacgtcattttcgagccctcgaatccaaccatacgcaaaagcatagacaagatcacaacgtctctgaatcatatcggagatagtttcgagaaagcgttcgaggaaggtcgtacgatcgtagcttcacaaatcagacgaaaaggatctgatctaatcgattcagacaacaacaattatcaccaatcctctggatcaagcagtccatggcaaccactaacacaaccaaacccacgtgagtctcaactcaaagcgtcacgtgatgtagccatggctacagcagctaaagccaagcttctcctccgtgaattgaaaacggttaaagccgatttagctttcgctaaagaacgttgttctcaattggaagaagaaaacaaacggttaagagataaccgggataaaggtaacaacaatccagctgatgatgacctaattaggcttcagctagagacattgcttgcagagaaagcgagattagcacacgaaaactctatttacgctagagaaaaccgattcttgagagaaatcgtcgaatatcatcagttaacaatgcaagatgttgtttatatcgatgaaggtattgaagaagttgctgaagtgaatccttctatcactagaacgctttctatggcttcgtattcggcttctgaattgccttcgatctcgccttcgccttcttcccctgcttcgccttctcggctttcggtttctacagacatttatccgattttggttcagcagagttcgactaacgatattacggttgagagtcctaaaccggttcgaccaccttctttgggatacacagatgatggtaagagaccatcatcacagctaccatcgtcacagctctctgtttagaattgatgacttttactatcactttgattatgtctgtttcgaaatttttgttgttaatttttgatcttgattaataacttgacttcacctttggcgtaatctacttgtaatagtggtttgattgatgaacatttttgcctctaccttcttcatgttaatcgttttattgactttttcttttgtttggaactttggaattgaaaatgttgtaaattagtttttggtactaggaaatgaggtgacttatgctcgaactttgaggcgtaacaaactctatttgtatcaacttacaagtaaccacgtctaacgttttttaaatttgttaaatcggtcaactattagtatacgggcctggtgcaggctgtttagcccatctcaatgcgtgccgggcccagctatctcaaaggctatgatgccaaaatgtgaaacacaatcccgtgagctgaaccatctcagagcaagcaaggtttgagcatatatgcaattcttatgacttatgaccaaataatatccaaaacagcaaatgcaacattcgactaaactaaaaaaatagatgttatgctttttgctaagttctttcacagatagagtgactagaacataacaaaagcatacttgctccgttacaaaaggcggactagtgaacggttatactgatcacaggagcttcattgtccttttaaaggatctgctgctttgcctgacctagcatccgtccacgctttggctattgtcttcttcatttcttcatctccatctacaggttcctcttgatctgcatcacaaatttgctgattctctcccatcctagtgacatttccctcaccactttcaaggccttaagataaacagatataacaacacaacggtaaatcaactgatactcttcaataacatcggcagatctgctatatactattcaataacagagaaaaaaaacagaggttaccttttgcttttgatgaggagggtttctttctacttttgttgtcactttctgatttactttttctcatttccttctcctcgacacgtacgaggtggacagatagaaaccagtccttgttactgaggccttgaagagcggttttcaaaatcatacaatccgacaagtgataatcattaccacccaagttaacctaccaaccaaaaaccagtactccttccttaagttgttgtttccaaaacaaaaacgttttgttagagaaagtgttgttaccttcaaggcagaaatagtgatgttgccaacacttgggaaacactgttcatgttctttgcagattttgtctgtataataaacaaacaacaataaacattagctgttacgtttagttactacaaaaagttaccaaagtacaaaaaaggaggagattatgaagagtcacctttgaaagcagatacactatcatcactgtcaaggagaagccccatacgagtatcaatactagtcttcacaaagacgcattgagattcgttgattcgggacatagcttgaagaaatagggatttgaagaagtgtagaggaaatgagacttgcctctccgattgagattgatttatttataagcgagtttctttcttagagaagaaatatgaaaagtcattttcattgggaaaccaaaacacttaattaggaaaactgaacatattcaatagtatcattctctctttacctcatcctttcgtcttctctctttttgagtttaaatgcagtgcagttagaatttcttgctataagagttatccaatgaatctccacgaggactcatcgcacaaccttttacgattcttttcatcggtaaatctctaagaatatatctcatatactatatgtttttttattaaaaaaactcatatatattatatttacgttagtttctcacaccatatcaattatatcttttgttagttataaaatttgagctttactcaaaatattctaggagagatgtcaagttttataaagttgaaattaatttgtttttgttgttatgtgtagctattttcgaattaaatagtctgtagtatagataaacactatgtcgtgatcgtatatatattgttgatgcaacaaagaaagaaacacatcaaatgttctaaatggctggattctaactctaatcacttcaaaatttgtgatgaattaaaaatttgcacaaaaacaaaagaaaaagtgatgaattttaaaattaattaatgatttaaaagacttctaaagtcaatgcaagtgcgccaacatttgactaaactcaaaaaatatatgttttggtttttgtcaagttctttcatagatagagtcactagaacataatagaagcatacttgctcggttacaaaagacggactagtgattgattatactgatcacatgagcttcatagtccttttaaaggatctgctgctttgcctgacctagcatctgtccaggctttagctattgtcttcttcatttcttcatctccatcctcatacaagttctgcagtgtcaagacaaaagaaaagacaccataagcaaccaatgcgaaatgcactaacatgtttctcagactcaagaattaagagatccttttaccttcatcatccccataattccagccattgggtctttctctttctccaaactcggtttaatctgaacaaacaacaaacagtacttgatcattagctataagttcaccagacaaaagctaaagcatggtgttcttgagttttagttttttaccttgtcttctttgtggtgaatgtcaagccagtttcctctggaagacttgaccatagtgataactatcctcttaggctttacaagcactttacatttctcaggcataatctccttacacaacttcgggatggcacatcggtaattttttccttgtacatcatggatcttgatgtctaaagacattggcttgaactcagcttgaaccttgtcctcatcaacaccttccaaggatatgtacatctgataaacaaaaaaataatgcatcaataagaaaacaccattacataaccacacgcaagcatatggttattaacataattgagtattgattgaggaaaactctgaatggtttaccttgactttgtcattgtcttgatcccagctgaatgttccgagagttacatagttcaatgccgaagaagaaaccggcttacccgaagaagaaaccggtgcaggaactgtaactggtacctttggtttcgcatttgaactgactgcagagtctctcagctacagcaagaagattcatgctaattaaaaatcaaaagtagtcctttttaacctcaatccaagagataagtttataataatttcagtcacagaactcaaagttatcatttttttgccttataatcatccaatgaagactaaatcaaagctccagaaactgagacacacacacaaacatacacagaacgaaatagttcttctggaaactaaaaactaatgttccatttcagataagagcaactactacttatagcctaaccattgtaaggaaacgattatggcgagaaaagggtaaaagggggatttggtaccttctccaagtttgaaatctcggaattgatgagattgagaacacgaggtctcttggcgatgttctggagttgcctgagttcttccaaatcaagcccaacttcttccgccatggatataatcttagagcagccttttttcagagaaaacgaaacgtagaatctggacagacgaaggttgcgaaattgtgtttatattacaagcacaaagcgaagggaacgagagagtcttgtggaaactagaaagtactagaagacctcatattgagctttttgatgctttagcttcttgggctttcttctttcatacagagccaagcccatttagtaaaacatttggttatcaaacaatttttttattttcagcagaaactttcactctatattaaagttactggaaaataatctaaaactttggtcctacatatttttctgtccacttaattatgtactctaaaaaaaagggaaaaattatcagtcacatctttaaattgatattctataggaaaataaattttattctagattctactattttattttacgaagcaataaaaaaaaagttttagattctattatttttttccatttaaaaggatcttcgagttacgtcctactttaccaaaatataaagcaattttctcatttttatatgcttaagtataactttggataaatgtggatagtgataatcaacaatttcaactcattcctcgagccccgaaaaaaaggagagacaattgtcgccatttttggcttgatgcccgataaagagggagataaaaacacaattgccggactagaaaatcaaaacgtgtttcagttatcatccacatttactagatttagctttgttgcaagtagaagattcagtgttatatatatatatatatgaattagaaatctaacgatttttattcttgcattataaagtcatgataattgatattatatctgagccaaaggtatccatgtgctaacatggagttgagtttgattgacatctttgtataactaacatgaccttaacttgtctctcttacgaataattcattcaatcatgtatacatcaacaaaaattctcacttttctcttttgatatattaattatagttaatgaaattcttttgaattggacgttaccaaatgcacatatctggcgtgacttagtaagtaatcacaatatcagtgattcagtatgaagaaaaatgagacaaaataaactgagcactctctttttcatatgatggtgtggtctaaataattattgattggggggagggggaacgttaagttaattttcatctgtagaaaagagtcaactgagttatatggtgtcaagtagaatgattctagtattagccattaaaactctatgtacataaaagaaaaaacttcgatttcataatgagctctaaatccaaacaaaagtaacaaaacaaattcagatccaaatggtggcgttatttaaatgtaacatccaaaacgttactttttaagaaacttttttttatgatactgtaaataaaattgatgttcgaatactcctaattatttttaatgaatgttaaacttacttatcaaaaagccgttgttatatcaagcgcattgttatcggatgagagtttgagttttatgaattttacaacttaaatgcaagaagaaaaccataattttacaaaatcctcgtatttttttgttccctgaattttgaagaagatcgacttactcctaaattctaatgagtataacattaaaaatgtaatcgagtgagtattactttagatatgaacaatactatcatttatttagcattctatatatatatgaacagtgtaatctttcgtcgctaaatttactggagctatatacaaagattgttattggagatttccagattgaagctcaatatagcttgtggcatttttaagttaaaccgtgatggattatacaaaaccagaaaggtgtaagaaaagcgatgaagatatttattatagtgtaaacatgttgtattaaacaaataagtaacaattgaatccagagaaaaaagtagaaaaatagaaaatttataaaaagagagaaagctcctttgaaaagggacggccaatgactattgtcaaaatgctgacgacttaaaacatggtcgtggaataaagttggaaccgtccatatcaatttatatgcttcctcctaataaataaactttagttttgttttgataatttttaacttcttctttctctcccgttagaaaaatggagcattcctcttttacatcaattggtgaattaatgagtatccaccacacatatgacatatacacatattcatacatgtaagatgtgtcatgtatgcatgtatgagtagtgtcatgtgtgtgcacgtacgaagccataccacatatacatgcagatataatgcatgcatgtgtaagagcagacaatatattaaaatatcgaatgttgacggtgagatggaaaaggaaggtatcgtatgtctaaggtttatggattccacgtccaaaagataaaaggtaaaagataaaagagccttcaccttcggtgtgaccaatcaataaatttctatataaaatatatgatatcatctttctttttttctgtttctgttaaacgatatctgatgataacattatatatcatgtactttaaagtaatatttggagcgttgaaaatgacaatattttctgcttagtaataattattattatattctatgcttctcgtaaaagtagtactatatggggtcttctttatatctagagtaatttctttagctttctgaaatatgattcatatgtagtacataatgtgaaatcaaacattttaaatgaaattatgcaatgaatgtggttactaaaatgcctcaaatgaaattgtatcctttggatttaaacaataaacacgatcgttcttatatgattcatgaatcattattgtatacgaatcattattgtataccttatcagttgatgattaattttagtcactttttatttagacaacgaaagtaattaacacgttagtaagacaaatacaaataaagttctataatatgaatcgtcagttttttatacataggattcgctttgcagtactgcattcccttctcaatttttctgagtgtttttttccccttttaaagaatcatctgagacactttcgagaataatttaattcttctcgttgaaaaattggaccgcattagtggactctctatttacacttagaagctctctcaatttgtttttgcttctagtacgatcttctaattagcatgtgaatggccaacaaataaacgcatgtccaatacatcaaccgttgctttcccttctttaaagcctgtttaaattaaaatatcataataagcaataattaagaccgcaaatttttaattaactaatatgtatctaaaaatcagatggtgaggataatcataaatatcatgtactaatcatatcgctccaaaaaaaatgtatactttatcgctattaatcaagaaatatgttaaaataaatatgtttggtaagaatatgttctagaaaagccgaacttttcaagtataaaacgtcacaattagaagaaagaaacgtcacaattctcttcttttttagacaacaggtcagaatttgttttaaaaatgtttctcaatcaaagcttttttcaagggatttaatgtgctatataaagattaaaaagaaagaaatatggaagtaagagatctagtagaaacagagcaagtaaagttaaatgttgatacataccgtggaggcagaggaagtgagggaaataatagaagttgaagaagtagttgatgttgatgttaatgatgacgacgataataaacctacattgtaagtcatggtctcatcaggctgatacaatccataattcctctcagaggttggtcctggtttaaggtcttcattgaaaagagcaaatagataaacatcaaaactcaagtttggtctcaatggcgttccttcattttgaagttgtctccttagaatatttttgttataaacggctgcgttggccacagtggctccaacctcatctccatcgcctttagacggccatccagtctccgagaccccaacttcgatgtctttgaagccaagcctcgccatggcaaagatcacagcgtctacttgagcgtagagcatgttgtcatagcggtacttggtataggggtcaaccattccagggttagggttgaagaggacgtagtctaatgggatctttgttggggaatccttgtaagcgaagtaagggtaagcgttgatccagaagggggaattcgtgttacgcaagaaacctagtagctgtgtcattacgccagctacttccggcctaaaacatccggcggatggagggtaagattcttgaaggacggatagtgagttcggagtcgatacttgaatgtacttgtctagtccggtttggaccaaagccccatgaatgctcatcattgcaggcataagatacctgcgaatcatagcaataacgaggttgaatactttcttctttttttgaactagaggatctcaggatgatacccacatgactaccatgatttggttagtagggcatatttgtaatggaccaagatttgaaaaggataacaatttataggaatgaggggatgtatgtaacaaaccctataaggcttgagtcatcgtcagtgtatagttcgttgccgacggcgataccaccgatcttggtggccggaaagtagggtttgatacgggtagtgacccattggagagcttgttgagggtctactaagctgggaagcatttcattttcgacggtgacaaagagctcgatattggaattggcaaatgaggttaacactcgagggtttgtgtcatagattcttgtcttattgatatggagtgaactcaagagttgtagaactttgtccggtggaggaagattgtcgccgacttgaccatagttgatgccaagagaggagaccctttgaaacaacaatccatgttctgtgaaaaaaatgtaagagaaatttaaataattaaagtgtaatgacaaactgaaattgagataatgaattttgtttgttggtagacagaaataagcaattattcaaaaacgatacctaagaaagtcaaggaaaatagaagaagaacgatagagttggtcatggcaattctgctaaacatgttagacatggagaagagagaaagagggagataaagactgagggagaaagtgcttgtaagagaatcaatgcaatgaaatgtggggatagatatagagatgaagaattgagaaatgggaccaagtaggcgacgaataattattaatttataatttagagataatactttactttgcctgcctttgttttatggtgagacatagggtttctacaataaaagtgacaatatgattaattccaaaaataattcaataagttatttaaatttatactcgttagttttgtaatgggagtaggtttggcaataggtttatcttatggaagtctattgtaaaaatagatagtgtttgccaaaaacattctttgtgaggcaacatgggtttcataaaacattttggacccaagaagaaaaaaatatgacatcttagattgtctctttccaacacattgccaactatgtcagtccaaaaaaaaaaaaaaatgaaaaagtggcctaaaagaagacactttcttcagacaaaggcaaaggtgggaaaaattgaattgcccactataataggtttttaatcttaacaatatgtctattaaacacaaagaaaaaaaaaacattatgtctttggcatagaatttggaggatcccaaatttggtagttgggtgaaccaaaaaaatggaacgtaaagagtagaaatcacaccatcataatgataagaaggatagtgcgcttatcttcagtttattatatttatatagtattgcaatttgcatcttgtgaaataaaagctcttttaaaaaacattgtaacgattgttagaattgtatttcacgtgaaattatagtatgaccctcagttaatcctatatttgatattcaacggagtttagtcgcatatttaaaactgatcctacgtttcaattcagaatttatataccgttagcttacatgtaaaagtaaatatttctaaattcaacctaactcatctagtcaacccgctcgatcacaaaaaaaattaggttgcacaacggttcattatttatgttttagatgaaataaaataaattaattactcgattaatcaatcaatggaaaaaaacggttttaaacaagtttacaaaaagaaaagttaatcaaagttgatatgtaaatttacagcctaattggccctagccaataatttagttgtctgaaacaattttttttttctttcagtttgatattaaaacaataaaagctctaactatacaccaggtgataattgtaattcaacttcattttgtacagatttttggaagtttgggttgttacttttcttatagaacggacttcttactacagtataacctctataaattaataacctttataaattaataaattcttccggtcccgagttgggactagtgtaaaaaatgacacaaatcgataaattaataagataataattttttggaaagttctatgtaaatatatggtctcatcgatatcataaattaataattgtataaatatatcaactatatatatatattatatgtaaaaaatttctttaaaatatatttataataattttttgtttaaattcatatttgttatttgtttgattatagttttcatattttactataccaaaacttttgttatttgtttaataatgttttctagacattattattatgttttatttgtaactggttctagaaatatattttttataatgaaaaaaatcttataaatttttttaaaaagttaccaaattaagaaaatctctctataaattaataaatattaatttatcaataaattaatacctctctaaattaataaaattttgcagtcccaaatagaggttatactgtatatcggatattgattaatttctgaaaatttcaaatatattaaatggaatagagatctgaaaacatatgtaaagtagcctgctttatgaaatgatgcaacaaaagtgacccaattttatttttttcgtaaccaacccaagaatctagtaacttttttgtttttgctaaacaagaatctagtaacttttggaagatgaatttcactataacgatacttgtttatttgttacatcctacatatatacattaatatacaacatatgaatatgcctgtgtatacttacttgttttggaataagacaaatgagctgatgcatgtggtgcgctttatgacatcttagattcctccgatctgattcaacaatcttaactcgagattctaatgtaataaaggttataaattaaaattaacatatattgttaaatctcgtgttttaaaaagaaaaatgttgttatatctcgtggctaatcgaatatttaggcgtgaactaagcaatttgttagctgtgtctgaaattttggatcccgatgcttatagcttattcttaatgttataacagtaagagaattgcttgattaacaacgaggatcgcttagaatttaccatgatcaatagttatatccaagccgagtttttcttttcaattagtcaaaaaaatttttccttaaatatagatttcatgcaacaaatttgaacatatataacttttaaagtctcttacaatgattttacttctcttatgtaagcagaaaaatcttatattgatttatttctcttaagtaagaagaaaactcatctattttttcttgcaaaattgaacgtaggttttctactttgacaactagaaacgaaacttctttaaccattgtttttcaaactttatccaccaatatatatctagtttggtaagaaagataaagactgaccaatttattttattttgttggaaaataaaaataacgaacattgctattaatggggatagatgtgatggatgactaatgaattagtgaggttggtggttacgacttatgaaaaattcgacgtaaaagagagagagataaagagcaaaaagattggtccgtccatgttaaagcaaagagaaggcacatgtttaattactcaacaaaataattgataattatgtcactaacaatccactaattaaacctttcgagttaagtaatatggttaggaatcaatctctggctccttttcaatttatttgatatttcatatgaaaatcggaaacccttctcttagaaaccgaaaattaataacaattctatgttattgaattgaaacagccaacacgcatagaagcaaatgctctaaccaaaacaaatacatcgttaatctcatatgtaaacgtgtagatcatatacgtctaacatgtaagaaaaaagtgactgtttaaaatggttgcagtttttttttttttttttttttggttcttagattttgagaataaaattagctagatcttagctttttaaataaaagagaaaatcttaagacaagaagtaggaaaacttttttttttggaattttgattggagactaaatggggttttgtttctttttctctgaaaacaaaacttaaaacttaagactcacgcaaaactactatcgtttggccgggagttgatggcctagtggtcttaaactctccatgtcttttccagcttgactagtttcgaactcccacagtaggagttaaagatagtgatcacgtatactagcctagacatttttattaaaacaaaactactatcattcaaagggccctaagttcagccaaatgtgtaatgttgtcaatgtgcttgatctcaacatatattcaccaaactgaccaaagtgtgccatcgatcggattgaatctacttatgctagtaagattaactctgtgatagaaaaaaaaagatatcgcgcttgaggtataggggaaatgatttcatgtaaagctctgttctatcgtcaattactccctagctattaacagtcattataaccggtttgaccatgcctagtggttatgacagatttgattcagtgctttttcgaagttgtttgaactacgaaaatcttaaactgtacccctttgtttctgtttaatgtttacgtttttcagcgatcgagtaaatactataatatgaaaacacctacgaaacaaaaaattagaacttagatactccagaaccccaataatggatcgagagagtaatactagattcaccaacctctacgtacgtggttttagataacttctaccgactagaaattctgttgaaatccataatttctttacacaaaaaccaaattcgttaaactaggttccctaacccaaaataaatattgttttaaacaaagtcatgtaattactattatatgcatgtcatcagcatgtgatctgatttgtaaaagaagttttgaaaaacgaaagcttgaaaaagtaaagaaaatagctttaatgtttaaacaagaaaagttacaatatgtactagagagaaaacaggaatatgataaatatcaacgtattaaaacattaattgtatctagaatactatttttccaaaaatgataatgggaaatatcattaaaaatgaatgaaaataataagcaaaaagaaaggaagaaaagagaagaaagcatatgcttgtgtatcttccattgctttaattccagcaatgaatctacaaaatgtaaagagtgacgaccaatgtggtcaatccatcatattctatctttcccatgttcgaatcaagttcgcatgttgataaagatcacaatctactacatatactctttcattcttcaatattataatgctatctaaaactaaaagttgggagacaccatagttaaaataatagcttttgtgtgctcaaaataaaagacatattcatttagatgctatacacaacctaatcttatacataattcaaacactgttaaaactaaaatagatgctagatcgtggtttacatatgtatattgtattaaataaacttagtgatgaagatcaccatttgggaacatactttagtgaaagtacaatagcaaaaagaagataacaaagataaagatggtttttagaaaaataaattgaaatgtctaaatacaatagacgaaagactaagttgggggagaagatgggaggtagcatgtgcctgtgcgtgtagtgtttttctaaagacaagttcctttttcagttggctcttttaaatcttagttccatctttaagaacttggtagattgaactattgaaaaatccaatacaaagcccaagcttcttcttttccttgaaatttgaacttcattgttcatatctaagcaaaaaataattagtaattaagaaaatatcacaccgacaacgtcttagttgaaagtttgatttattaaacagtatattctacgtaaaaatgtttatagatagctggttttgtttgtatattaaatccatcgatcgataactcaattttttagcattttgcataaaagaaataagaagcaaaagcatatgtcaatatgtgtatactttgtattgtgatcgaggctaagtatgataagataactagataagctagcaagaaaaaaaatgaaaagtgagaatgcttattggtttgattagaagctcgataagattggatttcacattcgacgcttttcaattaatttaagtttcttttaggctgttatccatttcgaaaacagtattggcccaacttgatcatccctctatattataagaaaagcaaaattatttttcgagactcgttacttctatattatacaccaattaatgttaaaatacacttataattggaagtctgcaaaaaaaaaagaaaaaaaaaaagacagtaattgttgaacgagattgccattggtatttggtcatatgagtcatatacaaaactatttatagaaaatattgtaatttcttgttggtgaataattgcaaaattagaagaggaggaacacaattttgttctagaaacaaactcttgatgttctagatagcacataagtagttcaaactaatttaaaaaaaaaaaaatgtaatacatttttctatctcaagatatatctaagtatcgaatataatactgacaataaaatccatcaaacacacaatttctcatagtccttagtgaatttattttcactatctttagtagatttctttaccacctagttagattgatgaattttgagcacttgacattgccttcttcttccaatacaatgtttttttaatcatattaagtgtcattttggacttcagattttgtttcataacaattgtgttttatatttacaaatgtaaatttttgattatatttccaatttcttcctctttttaatgttttgaccaatgaaaatagtgtataaattagggaagaaatttttttaaatgtattcttaatatgtgtgaaaaaactttaaactatacatatactgtatattgaaatgaaagtattatttagaaaacaataagagaacagtaaataataataaatgtttttgaaaattgtgtgaacaagcctagaacaacaatccagtccatgtaatatttaacagtttcggacttaaagttatacacgcacatgagtatatatgatacaagagttcaaacatcatgatgatgttactaagacaagtttttacttattcatacaatatggttcacagacatttggaaaccataccaaacagactgatcaaatctcttttaagcaaaaagaatctgagaattcgatggagttatatctgcataacgctccggcgactcaacaacctcccacctcacagcaaacttattctccgactgccaaatattcccaaccgcgagatgaagattcctaccaaccacatatactctgttcccataacagttaaccgcaaacggtctacaaatctgctcaggcaattccggtccgttaatcgtctcccacgaatctgtaaccggatcataaaccttcatcttcattctctctaactccgaaactataaacaaccgatcataaatcacgacactcgtcccggtccatccttctcttagccccattgacattgtttcccattgatccgtcctcgggtcataaacttgacctctcggggatacaaagaacggccataaccatccttccgttaccaaaagctt

SEQ ID NO: 1153 - DNA, 82281 bp, Arabidopsis thaliana
aagctttttaattttaggggccaaaaggtaaaataatggagtaaaactaaatcctgccacgtggaaaattactcagtacgatgagaaaaaaactccgttgccgggactcgaacccgggtctctcgggtgagagccgagtatcctgaccagctagactacaacggattcttgtctatatttcgttaagattttatttatcactaagactatgatagtaacacaacctttttatattttgcagatagtttaatggagtcttgtacatatgaacagattaagtgatactagaagctcttgcattgtttatcactctattctacacaccagaaaaaagggatcattacagaacattttgaaacaatcaaatatattgttagccattcctactgccaagaatgtcatatgtacacaagagtgctattggtcatgactcatgactgcagatttttcagcataagaagactaacaccttgttactttgggactctggttaatggtaaattggtaacaatgcaaattccgtcatcaagcaaacttaaaaactcattcttggaaggcaggtgtccatttctatccaccttgactcattccattccctctcctttcaaagaccaagttggaaaggtactgaccattttctggtccagtgctatgaaccatcttaaagaaagcacttgtatctcttgatagcaattcttgtggactatcatactccaaaacctaacaaaattgacgtagttttatgtcagtcacagaaggacgttactattctgtaccagaatcttcttaagcgagttctatgaacaataatcctggccttacctgaccagaactaagcacaaggatcttgtcgcagtcgatgatggtattcaatctgtgagcgataataagcattgtacaagacttgaattcctcacgtatggtcctctgtatcagagaatctgttctgacatcaacagatgcagttgcttcatcaagaaaaaggatcttagatcttcttagcaatgcacgcgctagactcagcagttgtctttgccccacactgaagttctcacctccctcagagacctttacagattaaagtaacactttgatcagccatctccataagaaatcaaagaattcttctaactaatatatgtcactaaagataaactatacctctgcatctaggccaaaaggattcctatcgatgacatcttttatatgcgccctttctagagcctcccagaggtcagcatcattgtgttcactaaatggatcgatattgaatctcaccgtccctaacaagaagaactgtttctcagaattcaggatcatacttacaatatcgtcttaaactacacacaaacctgaaaaaagaactggtgactggggtatgatacttaggaccctacgcaaatctgtcagtccaaacttagccacatcataatcatcaatcaggattcttcctttttccaattccacaatccggtataatgcattcagcatggaagactttcctgccccagttcttcccaccactcctactttctcactcggataaacaaaaaaggacagtccatgcaatactggaggaagcccgggtctataacgcaggtgaacgtcttcaaattgaattgatcctcttgaaggccagccagatactggacgattgttctcgattatagctgtagcctcagaaggaagatcaatatagttgccaacacgctcaacagagtttaagctgttctctgctttgctagcttgccttagaacaccacttaacagagtagtgatattcagagtgtaactaagaaggagacccatcgtagatgcaaaaacagcttggttctctgcattcccatatcgcagaaccgcaaaagttgcagttaaccaaatcatgacacccccaagactctcagatcttatagtgagccaacgatttgagctagtactagcgagagtaaaccttatgttgttgtccatggattttccatttatctttgccatccggtcataggctttataggctcggatgcttgacaaaccattcaaagcttctccaaatagagcatagataggtgatctagtaacggaatccaaacgtctaacttcacgggatgtgctctacaaattacaaaagtgagattcattccaagtggatcacatagattaataacaattaaagagaagcggacaatgacatgaagtagaatttacctgatagtagatatatgttgcataaaacagtattaggagtggcattattgcccacaatgaaattgtactgacaatacctataagtgcaaatgtcgagaggagttgccatagctggttcatgaacatgttcattaggttggccacgtttctatctatatcaccaatatccttagaaaacctgtttattacacgtccggttgggtttgtttcgaagaagagcataggagcacgtaggatagaattcagcattgcgtcatggagtcttttagcggcatgtaaacttgacgagatcaaccaaaaagagttggtaaacgtgacagccacctgaaacaatgaccatataaacgtcaacttcgtgtaatatgtcagaaacacagatctaagtcttttacagaaacaaacctgaccaaatccgagaagagcatatacgacaatgtagaaaccgggactataactctttggcgtgctttgatcagtccaaatacttaaccatgtgctacttaaaactcggagaacttcagttgttaaatagcatactaagagaatcataactacccataagccgcctactgctttattatacctggaaatttggaaagtaccttaatcatctgtttgtattaaaacataaagcaatgttcatctaagcaattggaagtcagatttcgttcaaagatttaaagaaaatgcgttttttgtgtttgtccatatgttttaaatgatcaaagttgataatttacttgctgtagaaagatgttgagctaagtacctcatcacaacatcccagctaatgatgccagtttcccgctcttcttgctttacaagcatggatcttccccatttcccttgctggatactgccaagacttctttcactcacatcaatcgtgacagtaggacccagcttcgaaatgttctcgtcatttgtattgacttcttgggttgcatccatttttccagcattctccattagttttttgaacaaagtcccactttttgacagctctgcgaagtttccctcctctttgatcattccttcggagactaaaattattctatccatcaaaggaagaaaatgtagctgatttgttacaagaaccctggttttccccttcagctcatgcttcacgcagctatcaaagacctaacttgattcagagaagtctgtcattagatgagaaatgaaatcatgaaaatggctaaacacacattagttatcaatgcgatttatgtcagccttgagatattatcagttatgttatggatcaaccataagaatacctggtgagcaacatgagcatctaaagcactgaaaggatcatcaaatatgtaaatatctgaatttgagtagactgccctagccattgaaactctctgcttctgccctccactaatattcaccccacgttctccaatctcagtacgatcacggccctgaataagcaaattcaggaagttagtaagaaatgtcatgtaccgggttgtgtatgcctgtcattttacttaactggaaacaaatcaagatcgtgttgtaaggcagtcacatcaatagccctccaatatctttcagactcaaaatctgacccaaataaaatgttttcacgcagctgcaatgcatagacacttgtattaggacgcttcctgcctaactaattgaccgaattaaaaaaaagctaccaaaaagttataatacagttaatgttttcagagccagcaagaagtaaaggggactcacagtggcattaaagatccatgaaacttgaggtacataagctacagatcctctgatatcaacgcttgaggtttcagcatgagataactcccccagcattgccgaaataagtgacgtcttaccttctccagttccacctacaatggcaaccaagctgcccaccggtatctccaaattgatatccgataatgtgggtttggatgtctggaaaatattcgagcaaacaccatgatcagaatgtcatgtgtacaattgcataaactaatattgcgtctcaacataatctaagcaagagggatattttgaggattcacctttgaatcccatgaaaaatatccattcttaatggaaatggctggagctcctggttggagaggtgggttttgtgctagaattctctcttcacttaaaagtagttcctcaatgcgttgcagtgaaacatttgcgttgacagcctaagtagagaaatagcaaagagacgataactaatgatgaccagtgaatctattgacacatgaatgatcaaatataactgaaaaggggatgattgttaaaataacctgacttataagatttggtagcgtgctgagaggagatcttagaactgcaaatagagaaagagatgtgaatgcccttgctggtgtcaaatctcctccaagcagaacataaaccccaaatgaaaccaaggtcacaacaactggggtgctgttcagtataaaactattaaactgcaagaggaataaatagttaaacgtggaagacaggttactatgagtttaccctagcgtaagtcatatacaaaactaagtgcatacaagaaatgacaggcaattcaaattcaaagataaggagtcatacagctgatagtaactgcgctttacgaaaccatgagagctcttcgtttctaattccttgaatccgggactcgaagctcttctcccatgcatagcatctaacaaagttggaaaattccaagagaaaatagtagtattattggattaagaatgtaccattcataaaagctaaaaagaaacaattaggaatatcaatcatactttacaatatccatggatgccaaaatctcatatatgataccgactcttttgtcagtccactggagtccttctttagtaagtttccgcatttttcttacaatcagagtctaatttataagaaacagaataggcgggcttgtatgtaagcagatgtgattaccacaacctgtacaatttaaaaatagataaaacaacagagcgaagctaaatacctggaaaggaataaggagaaataaaatcagtgaaccgaaaattgaagcaactcctagttgttgatagagaagaaccatagacacaatgatgcgaaagggagctgaccataaaccatggagctgttctgctattagctgaaaaactccggagactatgttagcagttacaattccatagttgtgcaaatagaatgtgaaccaaactgagaaagaagatggaatttcactgaacttaagtatacctgaagtgcattagcatcagtagttatcatgtttgtgactttcccagatgcaaaatttttgcgagctttattggttagtcttaaagatttgtggaatatagctgcaacctatgaggaaattagcataattagttggagaacaaacatgactaaagagatcatacaagtcagagagaaatggaagtttcacaaattttaccaaagttgacctcaaccgaaatcccactcgcccaacatgttgaaagtactgagattgacaaagcactccaaatgtctgaaacaaaatcagaagagcttttcagaagtttcaacaagaaaaacaataagacgagaactaaaattgtgaagattttttgtgtattcactgaggaagagtagaaaatgaaacacgacagtttagagaaaaagtaagtgacccaatagtattttagagatcagagacgaattttgtgatacataccaccccaaagaaaattaagaaagcatagacatagccaacccaagctggatcaccttctatcattgactacattaaatgatcaaagacatgtttaagttagatcaatatatattgcctgcgtataaggtcagcaagatccctgatatagagcaaacaaaatgctcataaattatcagtcttaaaactgtgagataatctgcatagccaaaatataatgaacattgagtacgtggaaaacataaattatgggccataaagaaagcttgcctgcaggatatggctcagtataactggtccaacaaattgagatagatcatgcccaacctgtaacacgctaaaacatgatgtataaattgcttgagagttgtcaaagacagaactgaacattactgtggatgcagatcagacctgatgcacaagaaaataacaataagagagtttttaggatctatcttaaccaaccgagagacaacaagttcaagcaaacacgatttaaagagcacaaccacagtatccttaccttgaaaataccacccaaccagaacctacaaagacgggaaagaaaaaattaatgccagtatatataatgtgtggctttacggacaactacagtggaatagacggtttttagaaaaattgtcagctttttaccttcgaccaaggctattatttagtgctcggagtagccatggcttaggcctccgtgattcttcagtccagcacctttggaatctgtcaaataacttatccaatgaataagaatgttacttgattctaacgaaacctttaacatagatataaaagaagtaatactgcagaaggcagaagcaaagcagcactactgctatacctttttatcagagtttctgtttggtcccattggtctaattgccaaacatccctctcagtaataggctttctgtagcctaactgcataagcggcgtcatccaactaaagtatattccttacatttttcaataagtaaataagaaatccaaatcagtggaacaaaaagaaatcatggctattgtatattatttgcctaacatgggaaacattttgtttatcaattcaggggctatgtaccagaaaatatgctggcatatcgctcgggacatatgttcactcccccaggcagtgcatcatattcaacattgtctaacgattcattgtttagaatatggtaatctggataaagatccagttcaggaatgtaaacaagtagaaggattccaaaaagagcctgcgacagaaaacaaatgaaaacgtaaaccattataaagtctgaagcttttgttcctagaacaatgaattgcaagcttatacgtatccatgttctgacaaacctggcaacatcttgaactgatacagagatatagggcagttctgctagggcaaatagaggaaaaattaatatggaatttaaagctacagctaccaatgcccaaaactttttcccactttcaaaagattgtaagaaatataaattaacttttgaaagttttaatatcaaatcactcaaatagaataactaacctattgattgagttcttgagaggcaacacaaggtccagcagcaccgcatcagcaaccaaaacatatacaacaccaaatctcacgtaccatcggaactctttgacatattgtttggtttcaagtccaatcaaaacaagcatggcgaaccaagcaaatgcctcaaccattaaggatgcaacctgccattgaataacaccagcatcatacttgatttcagaatttaaacaagaagggcatatgaacttaatctccatacggccatatcagattaagaaccagagttattctttcgaattcacctcaaagggaggaagatcagtttcatcacccatgtcaaaaagcgaaatccccataactaatctcagtacaggctcaacaacacagcaacaagccaatatccatagcacacagtgatagtacatcttcctcaaaacataaatctgagctttggcattgtacaaggtgatccatatccggtagaaacacaaacccagaagtacagagttagaaacaatcatcactagtgagtcaatggcacacggcgtgtaggcaccaaacgcaccatccggtgttttttcccaaaatccttctgcaattggcttgcagtaccaattcaatgcctcaaaacccatcctttttcaatcaaacctcgaatacccaaactggaaaacaaaaggcatttgcttaaatactttttaaaaggctatgcaacatacagtttcatgccccacatctataaccctaacaaaggcaaccatggtgagcagaaaattcacaacttttacaaattgtacaagcaaaaaatttgcatatacttgataatccactcaacgtagtcaaagagattctaaggttccaaaagcattgaactcatttccccaaagctaaaacctttactaaagtacattaacaacaatttggtttagtgatcctaaaagactcaaatcgttgaccaaccaagaaaaaatgaacttgtacagagaaaaggagagatcggcttttaggggaagaagcaaaccattacccttttgattagcgattgttcctaaaaattgaatctttgccagtgatctctataatgcataaatgcgacgtcattctcttgttatataaatgtggaaagagagcctccattttagctttttcaaagtttcaaactttcttcgtgggttcctcttcaatgtaactgtattgctagtcaattttgtttactaaaaattaatatatttttgattacttacaaaaatcatttatatagatgaaaaaacaaactaatcttctgtaagcaaatttatttatacatatcattcttattgaagtttatatccattagtctctggtaaatgatatagattaatgtatttagttcttaacaataaaaaaacttgagttaatttttctttcacttttaaatgtgtttcatataaaatttatgacaacaaatatttaggtaatcctatagaatgttattaattaaatgttggataacaaaacttaatctttagtaatatttaaaaatctaattttggttaatttctgtaatttatggtcatttggcatcatctatcttaaacgatgaatcttgggtgtgggataaatgactgaaacacatgacatatttgattgattacaaactaaaaaatatatgtgtaatctataaattgatgtgtaaaatagttaataaatctagttgtatgatttgagaaattaataacgagtaccttgattctaaagttttatacttttttttcttgtaatttttttctattgactagaagatatgttgtgtcattcaatctacgttagaagacattattgtatccctacataatctagaaacagacatagatgtatacaaattaaattaacaagttaatatgtaattcatggaggctttttgagcagaaattatatcatgaatatatatatattaatcaagaaaaacaactttatttgttgcagatcattagttttatggtctgtgtacatatgaacacatgaaatcatacttcatttgaagctcttgtatgttatgacgctatgctacaaatcgaaaacggaatcatatatacgtttctcaaagatttcttcaatgtcccaaactcccaatcttcagcctttaacttcaccattgtagcaaaaccttaaaagaacataataacatttgaaaacaatcagcatctgcctcaaaagttgttggccaaatttccaactgtcaagaagatcttatgcacactgtacacaagattggcatttttttaggtttacctttaattgttcagcttaagactatcaccttgtaactttggcactctcgtaaatggtaatcatgcaaattacatcatcgtgaaatgtgaatagcaacttgcattatctttcttgttgtcacaaaccaaactttgactcattttggaaggctagtgaccatttttatccacccacactcattccattctctctcctttcaaagaccaaattggaaaggtactgagcatttgctggtccggtgctatgaaccatcctaaagaaggcgcttgtatctcttgatagcaattcttgtggactatcatactccaaaacctaacaaaattggcatttccaatagttttatgtaagccacacaagaatcccttttatccatttctgaagagaatatataataagtcagttccatgaataagtaatcctggcattacctgaccagaactaagcacaagaatcttgtcacagtcgatgatggtattcaacctgtgagcaataacaagcattgtgcaagacttgaattcctcgcgaatggtcctctgtatcagagaatctgttctgacatcaacagatgccgttgcttcatcgagaacaaggatcttagatcttcttagcaatgcacgcgctagactcagcagttgcctttgccccacgctgaaattctcacctccctcacagaccttcacagactcaaagtgggtgagagtttaatcaataatctcaatcataaaaaaaaagattgagattatctaaaagtggattatttttatgcgtataactgaaagaatctgattaaactatgtcttttaagataaactacacctctgcatctaggccaaaaggattcctgctgatgacatcttttatatgcgctctgtgaagagcctcccagaggccagcatcattgtgctcactaaatggatcaatgttgaatctcaccgtccctaacaaaaaaaaaaattgattctcacaatgagcaacataatgcaagaacagacttacaatgttgtcttaaatacacacacgaacctgagaaaagaactggagattgtggtatgatacttagaaccctgcgtacatctgtcagtccgaacttagccacatcacaatcatcaatcataattcttcccttttccacttccacgatccgaaataatgcattcagcattgaagattttcctgccccagttcttcccacaactcctactttctcactgggagaaacaaaaaaggtcagtccatgcaacactggaggaagcccgggtcgataacgcaggtggacgtcttcaaacttaattgatcctcctgaaggccagccacatacaggacgattgttctcaattatatctgtagcctcagaaggaagatcaatatagttaccaacacgctcaacagaattcaagctgttctccgctctgctagcttgccttagaacaccacttaacagactagtgatattcagagtgtaactaagaaggagacccatcgtagatgcaaaaccagcttggttatttgtattaccattttgcagaaccgcaaacgttgcagttaaccaaatcatgacacccccaagagtctccaatcttatagtgagccaacgattggaactagtatttgcaagagtgaaccttatgttattgtccatggattttccattaatcttggccatccggtcataggctttataggctcggatgcttgacaaaccatttaaagcttctccaaactgagcataaataggcgatcttgtaacggaatccaaacgtctaacttcacgagatgtgctctacaaatcacagaagtgatattaattccaagtggaccatatatcttaaaatcaattgtgcatgtatctgacattgccccgaattagaaaattacctgatagtagagatatgctgcataaaacagtattaggagtggcattattgcccacaacgaaattgtactgacagtacctataagagcaaatgttgagaggagttgccatagctggttcatgaacatattcattaggttggcaacgtttctatctatatcaccaatatccttagaaaatctgtttattacacgtccagttgggtttgtgtggaagaagagcataggagctcgaagaatagaactcagcatcgcatcatggagtcttctggcggcatgcaaacttgatgtgatcagccaaaaagagttggtgaacgtgacagccacctaaaacaatgaccacaaaaattgtcaacttcttgcaattttaataaattacatatctcagtctgttacagaaacaaacctgaccaaatccgagaagagcatatacaacaatgtagaaaccgggactataattctttgacgtactttgatcagtccaaatacttaaccatgtgctacttgaaactcggagaacttcagttgctaaatagcatgccagtagaatcataactacccataagccgcctactgcttctttatacctgaaaattggaaaccacattaagcactgttcatctgcatcttttgttttttatataaatataaagcaatgttcttttgttaaactatgttagctcaactatttttcatttcggttgaacgatcaaagttgatctctttgtagccataaaaaaatggtgaggtaaagtacctcatcagaacattccaactaatgatgccagtttcccgttcttcttgctttatgagcactgatcttctccgtttcccttgcttggtactgccaagatttctttcactcacatcaaccgtgacagtaggacccagcttcaaaatgttctcatcatttgtattgacctcttgggttgcatccatttttccagcattctccattagtttcttgaacaaaatcccactttttgacagctctacaaaggttccctcctctttaatcattccttcggagactaaaattattttatccatcaaaggaagaaaatgtagctgatttgttacaagaacccttgttttcccccttagctcatccttcatgcagctatcaaagacctgttacttgtgattcagagaagtctgtcgtcagatgtacctaaaaaaattactgagaactaaaattctaatacagtggatgatcatgcggattcctcatagatgaaatggctgaacaaacattaatatcagcattaagaggttatcatttatgtaataaatcaaccattagaatacctggtgagcaacatgagcatctaatgcactcaaaggatcatcgaatatgtaaacatctgaatttgagtagactgccctagccattgagactctctgcttctgccctccgctaatattcaccccacgttctccaatctcagtaagatcacggccctgaataagcaaattcaggaagttagtaagaaaaatcatatcaattactgagttgtgtaaacctttcattccacttaactggaagcaaatcaagatcgtgttgtaaggcagtcgcatcaatagccctccaatatctttcagactcaaaatctgacccaaataaaatgttttcacgcacctgcaatacataggcacttgtattgggacacttccagcctaagtgcctaactaattgaccaaatgaaaataaaggtacttaaagctataaaatagtttttgttttcagagcaagcaggaagtataggcgactcacagtggcattgaagatccacgaaacttgaggaacataagctacagagcctctaataacaacgcttgtggtttcagcatgagataactcccccagcattgccgaaataagtgacgtcttaccttctccagttccacctacaatggcaaccaaggtgcccacgggtatctccaaattgatatcggataatgtgggcttggtagtctgggaaatattcgagcaaacactgtgatcagaatgtcatgtatacttagcattgcagaagctaatattgcattccaacataatgtaaacaagaggaaatattttgaggattcacctttgaatcccatgaaaagtatccattcttaattgaaatggctggagttcctggttgaagaggtgggttttgtgctagaattctctcttcacttagaagtagttcctcaatgcgttgtagtgaaacatttgcgttgacaacctaagtagagaagtagcaaaagaggataactaaatatgaagagtaaattcattggcacatgatggatcaaatgcagaccagtaagatgattgttaaaataacctggcttagtagatttggtagcatgttaagaggaaatcttagaactgcgaagagagaaagagatgtgaatgctcttgctggtgtcaaatctcctccaagcagaacgaaaaccccaaatgaaaccacagtcacaactaccgggatgctattcagtataaaactattaaactgcaagaggaataaatcgttaaaagtggaagaaaggtaaatctgagtttacctaagtcatatacaaaactaagtgcttacaagaaatgacaggcaatacaaattcaaatataaggagacatacagctgatagtaactgtgctttacgaaaccatgagagctcttcgtttctaattccttgaatccgggactcgaagctcttctcccatgcatagcatctaacaacgttgcaaaaattccaaaaaagttatagaataacttctttaagaatgcgccattcagaaaagctgaaaagtgaatacttttaaaaatatcaatcatacttcacagtatccatggatgacaaaatctcattcgtaataccgactcttttgtcagtccactggagtccttctttagtcagtttccgcattttgcttataatcagagtctgtttttcaagaaagatatgcatttaacacaacttgtacaatttcaaaatagataaaacaacagaatgaagccaaataaatacctggagaggaattaggagaaacagaatcaatgaaccaaaaagcgaagcaactcctagttgctgatagagcagaatcatagacacaatgatgcgaaagggagctgaccataagccatggagctgttgtgatatttgctgtaaaaaataaggagactattttagcagttacaaatccatagttatgcaaaaccagtttaactgaacctaagtatacctgaagtgcattagcatctgtagttatcatgtttgtgacctttccagatgcaaaattcttgcgagcttcatgagttagtcttaaagatttgtggaatatagctgcaacctacagggaaattagtatacttagtagaagaataaacatgactaaatgattataatagtcggagagaaatgtaagtttcacagaattttaccaaagttgatctcaaccgaaatcccacccgccaaacattctgaaaatactgggcttcacaaagcactccaagtgtctgtagcaaaatcgaaatggaaaagcttttcaatggttttgacaagaaaatcaacaatatgagaaataaaatgatgagaaaattatacatgatagttagagatcagagacaaattttgtcatacataccacaccaacgaatataatgaaagcatagacatagccaacccaagctggatcaccttcttgcattgactacataacatgatttgttaaagttagattcaataaaccagagtagcacgggatcaggtcagagaaatcatgggccataaaaatgtagatgcaacaaaaaaccaaagtatatgctacaaaatgctcacaaattttcagtcattgaaaatgtgagataagaatcactcatgtatctcagttttaaaagctataatgtatatataaaacctcaaaaaatgtgtaatgacagttgagtacgtgtgaaacataagtcacgggccaaagacaactatgcaatatattttttagcaaggaatgagcagagagagagagcttacccgtaataaatggctcagtataaccggtccaacaaattgagaaagatcatttccaatctacaaaacgctaaaacatgatgtataaattgcttaagagttgtcaaatacagaactgaacttactgtgaatgcaggtcagacctgatgcacgggagaataacaatcaagagcttttttgggttctaattaaccaaccgagagaaacacgagttaccttgaaaataccagccaaccagaatctacaaagacagaaaagagaaaattagtgccactaattatattgtctgggtttaaagaaaactagtacagtggaatagacaaattatagacaaaaacattagcttttaccttccaccaaggctattatttagtgctcggagaagccatggcttaggtctccgtgattcttcagtccagcacctttggaatctgtcaaataacttatccagtgaataagaatgttcttgattctaaacaaaacattcaccacaaaaaaagaagaagctaaactaacttagcactacttctgtaccttttgatcagagtttctgtttggtcccatttgtctaattgccaaacatccttctctgttatgggttttctgtagcctaactgcataagcggcgtgatccaaccaaagtatattcctaagacaagaaatccaaatcagtggaacaataagaaatcatggaacattggagctaatatactctacagtcttcatggctattatatatattgccaaacaaaaatcatttgccaatagactgagcattcgatgaattttgtttattaatacaggggctacctactggaaaatatgctggcatgtcgctcgggacatatgtgctctccccctcgaagtgcatcatattcaacattgtctaacggttcattgtttacaatatggtaacctggataaggatccagttccggtatgtaaataagaagaagaattccgaaaagagcctgcaacagaaaacaaatgaaatacttaagcagtgaggcctgtaagtttgaagcttttggatgcaagttctcagaacaataaattgcaagcttataggtaaggaggacgttgttctaacaaacctgggaacatcttgaactgataaagagatatagggcagttctgcaatagaaatagaggaaactttattatgaacttcacagctaaagctaccaaccaatgcccaaaaaaatttccctagtcaagaatatgttagaactcctgagattcaacgtcaaatcaccccaattgatttcatttatctgaaatatacaataacaaacctattgattgagttcttgagaggcaacacaagatccagcagcacagcatcagcaaccaaaacatataaaacaccaaatctcacgtaccaccggaactctttgacatattgtttggtttcgagtccgatcaaaacaagcatggagaaccaagcgaatgcctcaaccatcaaagatgcaacctgtcaatgaataacaccataatcgtactttacttctgattcttgagctttcattttaacaagaagggcatgtgagtttaatctccagacgaccatatatgattaagaatcagagctactcttccgaaatcacctcaaaaggaggaaaatcagtttcttcatccatgtcaaagagtgaaatccccatgaccaatctcagtacaggctcaacaacacagtaacaagccaataaccctagcacacagttatagtacttcttcctcaaaacatatatctgagctttggtattgtgaaagatgatccatatccggtagaaacacaaacccagaagcacaaagtgagaaacaagcatcactagtgagtcaatggcacaaggcgtgtaggctccaaacgcaccatccactgccttttcccaaaatccgtctgcaactggcttgcagtaccaattcaaggcttcaaaacccatctctttttcactcaaaccttgaattctcaaactggaaaaaaacaacaaagaagcatttacttaaatacttttgaaaagtctatgcaacacacactttcatgcccaaattcaaaacattaaccaaggcaacaattatcagcagaatagcaagaattgaccagtagaataaaaaaaggggcctattttttttataagccactcaaagtaagtgagattttataaggttccaaaaagctaaaacctttactaaagttcaattacgctttagtgatcctaaaagacccaaagcaacagagaagaggagagagatgaattagggggggaagaagaaagaaaaggattacacttttgcttcgtgattgttccaaaaagacccaaaaattggagctttggcaaagtaaactcaatcactgagaaatgtataagggagacttttgggtaggagaagccaactcgagaaagcactcaagcagcgtaacgacgaaccagtcactgttgctgctgctggcttcatctctctatcaaaaccaaatcaaaagttaaaagattctctttggtgacaattgcaaattccaatctccacatatgtgtatattcacgtgtgtctgtgattatgagataacatttttttttctattaatccactgacgtttatcagacaaaatctatttaattaccaaacaatgtgcataatattagatttaattaacaaagcttttattttattttatttttggaaatgattaacaaaataactaggaaatagacattaatactctatccgtttataaataagtgtgtttatttaaagttgtgacacacatattaaaaaaaaaaaaaaaaactgttctacatttaattaatatactctataaattttcttactggtcaatgcatttaatccagttttattattagtgagaataaaaatgtaacatttattattaaaaaaattgcatgaaatgtaaaaagacacctatttgaagacaaattttaaattttaaaacgaaatttaatttaaaatgaagatagtgtcattttcttttaatttgaataaaaaatcttaatagaattggatttattgtttgtcatcagctttatttggcatataataaaaacaaagtatgatcggtcatggcttacgtgacacattaccaatcaacttctattgtttcttttggcttcatgtatatgtagttactaggtaagtatcccatgcgcggggatattactttctccccctaaaaaaaagaaaatttgtattgcaatttatattttaagttgtttttttcacaattgttcaaattcttttatagatatatgtttaataggacatttttgtgcaaaatgtcaatgacaaaacatggtcctgtgagagaaattatgtccaatggttgtccatgtccagaagttgaaaccatgttggcatgttgcactcatttgacttttttttttctcccaaattttgctgcaaatttgaattccaattgtgttatcatcacatcctctgtaatcaaactctctttttcccaaaagaagcatagcctatatagttacaccacgattaatgggcattttgttacgtgtatcccaagcaatacaaataaaagttccatcaaaatgggagttttaggtctattagtgtaagcctttcatcgtttacatctcgacattgtcccagtcaaacgatttcccttctaaattgtaatccgggtgttgcattctgttcctcgccaatctgctcatcacggcaagccctgagagtatatacacaaattattagatcaagaaacttcaacaattctttatgtcgtatactcgtatcagaaatcttaagaataacgttaccttcgaccattttgtaaagagatggccaccaacgctctctagagatgtcactttggtttagagagtcttcaatctctttatcatgtttcccttcaaggacactgcgtagagtgacgacggcgtcctttgttttcttcaaaatactgttatcatcttcgatttcaaggctttggaggtcgttgtgagatgaagtgaggctcacagccaatgcaaattgagcagctgcagcccaacgagaagaagcttgccatttcctttgaccttctaaaggttgtgaatcatcaccgttagcttctctggtacgtttgttctctagtgttatactacgtaagtactccgcgtttgcagttcctgtactttgaaccatcttcgagaaagaactttctccatttgaaagaagattctccggtgaactgaattcctgaacctgaggtgttgggaatctcaatatatgttagctcaaaagtgattaaattgatgcaagtagtggtcgaatattttgtatacgtacttttccagaatcaaggacaagaactttgtcacagtcgatgatagtattgagacgatgagcgatgattagcattgtgcatgacttgaattcttctcggatggtcttttggatgagaacatcagttcttacgtcaactgcagcagttgcttcatcaagaacaagtatcttagatcttcgtaacaatgcacgtgcaagactcaacaactgtctctgtccaacactgaaattctctcctgcctcagttacctgaccaaaaagactgagttattattactgaatacatgagactttcccaaatggaaatatttaattaagtacctcagcatcaagaccaagaggatttctgcggatagtatctttcaagtgtgccctctcaagagattcccagagatcggcgtcgttgtgttcactaaatgggtcaagattgaatctcacggtaccttaatataagttattggcatagtatacattattttgactttaagaaagataaataccagaagcaggaaaataaatataagcaccagaagaaatgcaagacatacctgagaaaagaactggcgcttgcggtataattccgagcactttacgtaggtccatcagtccaaatcttccaatgtcgcattcatcaattaaaatccttcctttttccagctccacaatcctgaataaggcatttaagaggcttgatttcccagcgcctgtcctcccaacaattcccaccttatccattggagaaatcaagaacgaaactccatgaagaacaggaggtaactcagggcggtaacgaagaacaacatcctcaaattttatggatccagatgatggccatccgggaggtggacggttgttttcaatgaccaatggagcctctgatggtatctcgatataatttccaacacgctcaaccgagtttaaactattctcagctagactcgcgagtctcagtacagctgttaaagagctggtaatgcttaacgcataactgagaagcaaacccatcgtagatgcatatgcttgttggttcgctgcctttccgttctgcatgacggctaatgacgcagtcaaccaaaccatgagacctcccaaaacttccaaacggattcccagccaccgatttgcagccatgtttacaagtgtgaatctgatgttattgtccattgaccttccattaatttcagccatcctgtcatatgctttataagcacggatactagatagtccattcaatgcctcaccaaattgagcataaactggcgatcttgtagtggaatccatacgtttaatttcccgagatgtgttctacaataaggaaaaatcaggttatgacacaacagatatgacacaatcagtgttccttttggtctcagttttccatgtctcgatctgtagtcatgaatgtagatagcattgcgtttaaaaagtatgtaggttacctggtaatacagataagctccatagaacacgaccaacaggggcatgatggcccacagggacagagtgctgacaatgccaatcaagataacagttgaaagaagctgtgcgattgaacccataaacatgtttacaaagactgccacagttcgatcaatatctcccatatcttttgcaaatcgattgattatccgtcctaatggattggtttgaaagaacaccattggagcccttagtatggaaccaagcatagcatcatgcatctttttagctgcatatagactggacataatcaaccaatatgaattgatcaatgtcacagagacctgaaaaaccaagaagaaatacgtcttagcataaacgttttgctctctgtatccttttattttccattttgtttgctcgatactttggcgcagaagaaacatggtgtatattcttaactgatcagcctttaatgttcagttatatattgttatccgatcatgaagataccgactcaaacatttgccaaatgcaactcatacctgtccaaacgaaagaagcgcatagacaatattatagaataggggtccatgagtctttggggttcctgaatcagtccactcactcaaccaagtgctgcttgaaacccgaaatacttgagtcaagacgtagcatataacgagcatcatcactacccatgcacctccaagtgcattctggtacctggaacatggtgacacctcacaagttattacaatggctttacaatacgaaccttaatacggaaaatatatatacattttgtatgaatatgaatagagcgagtcaaacaatatatatccattttgtagtaaagaaacaccacagataaattgacatattgctctaaaccaaagaatatgtcttatttacggatatttccactgtcgatagaaaggaatactgcaacaacacaacaagaaagagcaaaaatccgaatgccaacttacctctccaggactttccaactcacaactccagtttcacgttcttctcgcttgacaagaacagagtttccttctttggaattctttgtctcgattccatccttctgcagattattagcgttcccattttcaactggttttacagatgtttgatctacttcagcttctccattttcttctgaataatcttcaaccttccctgcattttccattaacctctggaacaacgggccactatggcataattcttcatatgttccttcctcttttactgttccctcatggacaagtaggattttatccacttgtgataggaagtggagctgatttgtaacaagtactctcgttgtctgccctagttccctttttatgcatttttcaaaaacctatatataacagccagtttcgaacatcagataacaatgtttgcttaaaagtagtatatggcagagatccgtggcaaacaagaagtagaatatccatgcagattgaaaaacaaaacgttatagagttcacgatttgcaaaattgaaagaaaaacaaagtattgttctatccaaaagagcctatggctagtttacctgctgaccaacatgcgcatcaagggcactcaatgggtcatctaagatgcacacgtctgaatttgagtaaacggccctagccatagaaaccctctgcttttgtcccccactgatgttaacacccctttctccgatctccgtgaggtcacctccctatcaatcaagagaaagaagaggaaacaagcttagatacctgagcactagaaaatagaagtacatgctatcaacagaactgatgcaattcagttttttcgatttacatcgcaccaacagatttcaaggttcgtttcacctcaggaaattttcaatgcacatggctaagtaactctccacaaaacttacaggcagtaactcaaggtcatgctggagtgctgtcacatcaatcaccctttcatatttttcttggtcaaaaggagccccaaacaatatattgtcacgtacctacgcgatgttaattacaaccatcagcatgtggacgtatctaaaagcacacatcatcatatacaaaacataaaatacatacaaaataagtaacaatccaagaggagaatttgacattttcgcattgagaaccatactataaactgagtagcatatataaacttactgttgcgttaaagatccatgaaacttgtggaacataagcgactgatcctctaagagtaacagtcgcatcagatcttgcaggaagttccccaagcatagcagatatcagggaggtttttccttctcctgtgctgccaactaccgcaactaggctgccaagaggtatgtccaggttgatgtttgacaatgttggcctatccgcctgcatatgtatacttctagctcactttttgtacttcattgacaatatgtaatgatagaaactaatagaagtaagaacatgtgataaaatagacaaagaagacctttgaatcccaggagaagtatccatttcttattgagatagctggctgtccaggttcaatgggaggattcggtaagagaactctctcttcggttgacagtacctcctccaaacggtttaaggatacattagcatttaccatctacaaaagtaaagcctggtcagcatctgcaaaaacattatgacaacgactggtctagaaaaagaggtagagatggaaaattaaaagagcaatcagaagcaatcattactactgatgccacattattcagtactggacatgaaaacatggttcaagaaacattttaaggaaatcacctgagttataatgtttggaagcatgaataaagggaagcgaagcacagaaaatagagagagtgacgtaaacgctcttgcaggtgtcagatctcctccaagcaatgagaacacaccaaatgaaacaacagtcacgaggacaggaatgctgtttagtatgaacatattgaactgcagagcaaatagaagaccaagaatgagtcagaaacattaatgcaatatatgttaaagatcatgcatgaatgctgctacacatgcccgaaacaactgaatcaatgttcaatgaactagaaaatagtacagaaaatgcctaaacacatattgatggataccattctcaaaatggtcaaaggcatttaaaaagacgagcaacttggatttgtccttgtatacaatcataccgttaggagagcgacaagtaaatgaccaagacaactatgcacatcatgcatacggtctataaaatcaattaatataacagtcactgcactcaagccataccgctgacaggagttgtgctttccggaaccaagataattcatcatcacgtacagtttgaaccttggactgaaaactgttttcccaagcgtaacacctacagtattttggtttagtgagatagttaaacactgccacaaacttccaactatgcaagaaaataaatattaggtttcagtcttccaaagtatcgtacttcactgtatccattgccgctaaaacctcattcattaggccaattctcttgtcagtacgctgcaacccttcttttgttaacttctgcgttttgcttataataacagtctgtttcaacaaaataaacgaagaaaatgaatcattttcattggtgtgaaaagcaaatgagaaataagcactcaaaagaaaaaaaaaaccgacagcgcaaagagaatggggaattattaagatatacgaacctgtatggggaacataaggacaagaaacaatgcaccaatgatcgaggcaacacccaattgttgatagaggagaaccagtgctacaattatacgaaatggcgccgaccacatggtatgaagtgattggcagatttgctgtcacacacaagagaaacgttaggaaaaagaacagctatcagctagataaacactttgatttcaagcaagagcttagataaaagcactgttcaaaggtaacttttttctacaaatcaagcgaattaaaggtttattggctaataaaggaaaatcaaatcctacaacggcaacaaaagaacaagggtgttgaaaatgtaatcacaactcttagatttctagaatcttagaataagcttcagattcagtcgtcagttgcaggaaaaagactatcttggtaaattgcatctaagactcatattttgaggtagatatacaactatgcagtgtaaatttatatcaagaaacagacaaggctaaagagagtaaaggtaacaaagatacacctgcagcgactcagcatcagtagtcattaagtttgttatttttcctgtttgaaacttcttccgcccctcattagttagcctcaaagattttcggaacacagcagcaatctattaagggagaattcatcagcagaatgaagcaatctataagcatctgctatagctttcaacagacataacagtacaggtattgcatcaaaacatgagaagcagagcaaaaagaaaaactaagtagcaaaagataattcatgtgaaactttttcttaccagtgcagacctaagccggtaaccaacacgcatcacattttggaaatactgagcttcacataaaacccccaatacctgaaaatgtcaacatcaacatcaagcgatcaaggagtccattggtcaagtgtcaccttgacctacattaaacaaaaccttttcaacatgcaaatgtattaacaaacaaaaaaaactaactctaagagtagaatcaggctatttctaatacaatcgaatcgcacagagattactttcagcttaagaaaattaaactggtcctacaattcgtagcatctactctagaccaaaaataccatgaagtcctagcaagaaagaaaagaatccaaggaaagtagagtttttgtttcatatcctttgcagtccatgcaagagaataataaaggcagcgaagaaaaagagaatttgttgcataccactccaacaaagattgagattgcatagatgtaacctatccacgctggttcattaagttgcattgactgcggaaagttaaaggagacattgtgagatatcgtcagaacataatattcaaaggatgataggattttgaatctatcaagaacgtttaaacacttattcgagccagtaggaatatgaatccatctcaaagatccatgtgaatggaaaaattacaaagcattgtgttaaataggttcaagcacaatgtgcacggggtaaaaagaagtaaaggaacaaacctttaagagctcattcagtagaagaggccccacgaactgtgaacagtcattcccaatctatgatacaatttagattgaaatgtcaagattaaacagttacaaaacacaccatttaggaaaactaagacctcagaagccatcaatattatcaaatagacaaggaaaagactgtttcagaataaagaataaaacacaataaagagaacaaaagtaccttccaaaagccaccccaccaaaacctacaaaatgcagaaacagacagtccataaggatgaaaagtatctatggcagattataaccagaaaagtaacacatctcttattcaactcgacacgcatcaaaacatacttgaagtcacagccataacagatttctcagcttctagttattcataatgcatttattattacaaccaaatgcttccttttacaaatcacacatcatgtcaaagcccaaaaagatgaaaacacatgactgtgaagaagtttctctttaccttcccccaaggctgttgttcagtgctctcaaaagccacggtttgggcttttctagttccttatcccaggacttctggaagctaaaaaatgagataaaaatatgtcacgcaaccatgccagtcatagacagtatgagaacagttgttatttattaaaatatacctcctcataagagtttcagttttatcccaagtgtccagatgccatacatccttctcggtgagaggtcgttttgatcccagagtcatcaatgggttcaaccatgagaagaagatacctgtgggttgaaaaacaagggtaagaaggtacataatagtcaaagtttaacaaatgttgacgaatatactatataaaatgttgcagcttagtcgaagtgatgatcactaagcaaaaacctcggcacagtcacaaatcataagttcatttctagggagaacgggaggataagtcaaaaaaaaattttgaagagactatagactactctctgcggaaacaattttaatgacctactacgtattagcactccataagaaaatttacaattccagggaaatatttaagctctgcataaataaccaacttagataggtagtaagtgcagaaaagtgataaaagatgcggtggcaattctcacaattaaaatagaaatgcacctataaaaacaaagtagggaatgagaagtgtagagtaacatactgtcaaataaatttgcatgcctctcaggacatatattttctcctccaggaagctcttcatactcgtaatcctcggaattttcagtcccaactggtgtgtaaccagggtaagggtccaaattagggaaatacacaaacaagagggttccaaatgcaacctggatccaaaaaccatcctcaacgtcattatcaaaacaaagttgtatcatctacagtctgacttagatacagcacatggtaaagagtagtttggagaatgcaaaaaggagtctaaaagtgcaaacctgaactgccacctcgcttatgtaaagatacagtttaaaactgcaaaaaacaaaaaaaaaatgacgcatataagttcatcgtgccagaccagggaaacaaaattgcataaaccatacagactgcaaatttaccaacctgccatagtactccttaacagagagaacaagatttaacaacaccatgtctcccacaagagcataaatgacagcgaatctgacataccaacggagttcatggatatacgttttagtttccacaacagtcatgaccaaagcagaaccccaagcaaaagcctcaaggaccaacataaacgcctgccaaataaagcacaaaacaacagcatctctcaggaaaaaacatacagaaggagaacaacatcaacaaaaacagcaaagtgataacacacctcatagggaggaaacccagctccatccaaatccaaaacagagatcctcatgaccaatctaaacaaaggctccgcagtagcataagcagccaaaagagccagaaaatagctaaaccatttagacctcaagcagaacttatccactttgtgatccttcgtgatgagccacaagcgataaagacacagaatcaacagaaccagatgagagataccaagcacaaaagagtcaatagcacaaggcgtgtatgcaccaaacgcataatccacagttttagtccacacaccattcggcaccggcttgcaataccaatccaacggctcaaaccccatcttcttcctcaatacaataaaaatcccctgcttcaaagactacacatcacaagaaactaacaatcctcgaatctgcaagtgagaagtataaataatgaaacgcatcagtaacagaaacactaaaagaaaaagaaatcaataattatgtggctatgaactcaatgaagacaaatggagaaaaaaacaaagaaaaaaaacgatgtgatagattattgagaaaaaaaaaaagatggcaaaaagctttttatctttttagtggagagaaaacagagacagagacaagcaccaaaagttagctccgaaggcaaaaaacaaaaaaaaaaaagtttaaaagcatagattctcatggagaaaacaaaatcatcatctatagataataaacaagtttccatccccataaaaaaaatctacaaaaatcacgtaacgagcacgaaatggaattcgattgataaggagaaaacaaaacctcacggagtcaaagagaggtaaagagtgcaaattcgccggagatttggaggaatcaggaagacgataacggaatcttatgaactcattttgtcacacgctctctctgtggcagattcgagatttataaggagatgatgataaatggatgcgtcactgcttacactatacgaagaaatgaagatccatatatttgtatagagaagagagagaggccgaaaagtcaataacgttcacaagtaaaaacaagaagctcttttctctgtttattttactcctttttttacacacaaacaaatgggtaaataactgtaatcttttttctatattaggcaaactaactataaagtttgttatttctttacaaaatatttatattataattcattatgttgctatttctctctaaattctatcttttttatttaatagctctatccaatttttagtatattttgagaaaataaaaatatataggtaatttaaaaatgaatatctagaaaggaagttggataataatatcgtgtccaagttaacaaacatttttttcttttgagaaaaggatattagattattcgtcaggaaaattcgaatcaagtattctacatatggttcaaatctcttctttgacacttagtatttttttaacatttattaaactatccaatgaaaatcatgttctttaaaaaacacatgattttagtagatgatcatatcacgacttttcctcatcctacaactacaaagtgatagttttgaacccgaacaactgttacaaatctttaaatatatttaaccaaacaaatgttatagaaatatgattttgttcgttgttggtatctaatatatataatacatataagtagattatcagatttgatcatttgaatctgcaggatgacacgataacgatattgattaagctacaaaccttgatcaagtatgattaaataatataaattaaattctagagaaatctaatcgtaaaataaaacaaaagaataagctacttgaatataacaacaacaaagattgaggagaggtattagcatagttcgattatgcgatatgttcttttgatttttgatgctctgttttgtaattaataaaaacacatcataaaatgatcactatagcagtaaacaaataattaaactcgcatggttgcaaattgcaatacacatcataggattaggctcattgtagcaataagcataaaccctatcttatttacagataatttgctatgacaaaagtagatgttaaaaaaaaaggacaaaagtggaagtctttcgttttcttaaaccattttcgctttctctttttggcaaggtctttttcgattcgaattctaatgatcaactcagacaaattctatcatttttatttccttaataagtaataattccaaacaaaacaaaaaacagcatttgtcggattcaattttagttgacttaattattttttgggttcaattcatagatattctaaacatttcagtttcaaaatttaatagtaattggccaaaagttttaatttatcgttgagaatcttagaaacgctcgacgtcaatccgtgtttgattccagatgttctgacatgcactatttaactaattaaactatactaaaatagtactcattgatactctcatctccggtactcccattaatgacatcggtcgaatacacactgaaatctgtccaaggttttcttaacttttattattggaaatttcatgcttgtttgcttctacgacatgagaactttactttaaatagtatatactgcctagcctggttgggcttatctcgtgttgctaaaccactcgctacaatactaataatcaatacgattggataaataacttaaaaaggtcaatctgatacagaatataaactaaaaaaaaaaaaaatatagagagagttataggttatagttaacatctatattcaaaaaaacaaaaaaaaaaaattatagttaacatcctgataagtattgtgtttatgtctttcatcagtggctgagtggagcactagagtaaagtcggtaaaccaataatggaggaggagaccagcaatagtttgtgtggcctgactatgttatagggtaggatttttttctctctgtgacaccaaaccaattatttcagaaatatatcttattccaaagagagtttggatcaaatgcaaagattagcttatatgacaacatttttttctatgacaacatattatgtgtttaattacgtctacaagatgtcaaagagattataaaaaaaaaatgtcaattttggtcttatatacgatgaccaaatattagtttggttggatacaaggccactaatatttttctacttatataagcttacgtcaaacttctaaacctagtggtatttctattaaacaatgatctcggttcgcatacttaagtgattaagtaaacggtcattctttcttttttttttttgaattttatgttaaattaaactcaaaaaaggaggccaatgttgttacaacaagtgctaacgttagtttaaagaatataatctggaaaacagagcgtaagttatctctctctgaagccaaacttgaaaccctctatcaaattttctatcaccattctgttttatggccatcaaatgatttcgaatgtgcttatctatccaactgataagccgacttgaagaattcggagaagctccatgtttgcgctcgtttcgctctcgccatagagtgtaaatcatcacctgcaaaatgcaacggactaggaaacctgcaatgcgatccggccagttgcgtgagacgttgttgatgatggtttgccagtccgtggaaaaacaagtgttgtagatggtcccgagattcaagcgcattgttacataggatacaagtcgcatccacccccatgttccaaagtgtcatcctgtctcccgtagagagcctattgtgaacggctaaccacatgcaaaaagcgtgtttaggaatggcttgagcaaaccaaacccctttataccaagccaccttatttgaaactgtgcgaatatgattccaagtatccttggtagagaagatgcttcgaaacctattctctttccctttccaaagtgcacagtcctcggcttggtttcgggagttccaggacagaacaagtcgctcctccactctgtttaagaagttagcgcggtgtcttcttcttctccggttaccccaagcttctaccacagttgcgtgcttatttatccccagatcaatggctcctcgatcccctgcactttcaatcaatcttcctaaatcactccaatcatcataccaaaaagaagtctgggcaccattgtttatttccactttacaaagagtcctcgctatgtcacgaaacttaaggatctttctccacatccatgagccgagacttgtattttcccttaccgcccaaaaaaaaactttcttaaggagagagctttgtatccacttgacccacaatgagtcagcatgagatataatgcgccagattaactttaaacaacaaacatcgttagcttcctttagagatcttaaacctagacccccctcttccttcggtttacacacaaacgcccatgcgatcttagcttttgatgtatttagctctcctcctgaccatagataagcagagcacatcttatcaatttccctgatacaatcccgaggtagacggaaagctcccatccagaaattacaaatactccaaagaatcgagctgattaggttcaatcttccagtataagataaaaaacgagctgaccaagaacaaattttctgctttatgtgatcaataagagggagataatcagttgaagagaattgtttggtgactaaagggagtcccaaataccggactgggagagtgcccactgcaaaagagaaacgatcaatgacttcttgacgagttgtgtgagacaaccccgcaaggtagactgttgatttttccatacttattttcaaatccgagcacttagcgaaagtgtcaaacacgtcaacgattccttctatggacctcacttttccatcagataagaccatgagatcatccgcaaaactgagatgagttaaaccaatttgcttgcatcttggatggtatccaaatttacgctgacctgctgccttatctaaaagtttagataggacatccatactcacaacaaaaagatatggtgataaagaacatccctgcctcaacccccgagagctatatatatagcaaacggtcattcttatatatagcaaagaagtatacgatcattcttatttagcaaagaagtatacggtcattctatttgacctcggttcacatacttaagtgattaagtaaacagtgatttctagacattctatttgttaacatgaaaattcaatttttttgaaaaataacttatgcatcaaatcttcagacccaaaaattctctaaaacaaaaactcaaaattccaaagatctaacacatatataccgcttcttccatgcttcgaacctatggactattaaagggggataaattgcgatacaacattataagataaacataaagacttgtaaaatccattagatctcgttcaggtgcatgagaatattgttataaaaatctacaaattttacaaatacaaataaaagagctttaggaacttcaaatagcaccaatgtttttaaggccaaggacaactcctacaccgatgatatgaccaacggtgccacaagccaaagtgtccgcaagcgtgaacccggccgggtcacccgtttgtagacctgagtcacgtgcctccaacctaagtccagctgtcgccttcctattggctgatggcgcaagtccgaatctccccgcgaacaacatcagggtcgtcgacgttaccattatctaatcaaagtataattaatcattgcttagacttaattagtattgtccatttaattttgttttatatctttaattaccagatttgttgatgaaccgatgaagtcacactttgcacccaaagctccatttcccttgcgtctcatgggctgaacacttgcctgggatgacaaaaacaccattccaaaacattcaataaccttagtttttgcaaataatattacttttgcaatgtcataaaattgattctaggttatgattaattaatctccaataaatctgccactaaaacatataaaatccaggaaaaaattgaccccaaaagattatagaagatcaaatcacattttgagaatctaagaaaactgaaaagtactaaccaggccttgtacaggagctgcagagattttggtggctcgaagaccattgaactgaggcaatgtagtcatcatagtgctagccattttcttagttgattctacaaatcttttattttcttgtgcgatgttttttttatttttgtttttgcagttttgttttcctctatacagtctttaaaatgatttaggcaagaatcatcgtgtggctttggcgatcacagaaatggattctgtttaggttacctcttgctgaggtgtcaagtgtctattggctgatttcaactctggataagactgtctcatcgtcatcacagtgcagattttctttcaaaacctttcattttgggcttcatgcaggcccatttatacttatattaaatcttagtacaaatcatggaacttgaatactatgatcgtgtggacttcaagcggtctgatttaaaccaaacacaaattacatttgaaacatttagtgctcgtggaaattggaaaaggctcgtgtatactataggtttagtggtactttcgtagttgtttcaagagacgaacttgccgtgaagaacactttcgagcttaattagtcaaattctttacccttttgtgattaattttttcaaacctatcccatctgaattagttgatcaatcagttatctttcatatattaaacaaaagcttaaattcgtatccataatcaacttataaataaaccgcatgaagtgtattttaaatgcaagttcaattgttcgtattaggttgttaacaaaaactctaatacaaaaaaaatgaatttttatcgatcgagagtgacaccaaaattaaagattagttttcaccttttaattaatcaattaagtcaaaccatattagtctgaaatgtacgtcaatcatctacgtccatttattcaaaaatataatgagatatgtgagtttctttatttgtaagccaagaacaattatttctgggtgtttattggatttcatgtaaatgttcttatccaaaagtagtaatatatatttcattagaaaaagtggacccgtttattaggaggaaagttggagttatataacctaacgcaaaagccgacacagtagacgactcttgtaagagttgattttcctaacaaataatcataattaatttcattaatatatgttttgtatatagagcagccctaattattcaatccttaagctgccaagaataactatcatcatggcgtattattattactttgaccaactaaaatcattttgacaaaatgagattgtgttttgacttaaaacaaaaacctttccaagaggagatttaattagagttgctggatatggtttacctgaaccggaattctgatttttattagcaaccttcacttcactactcgcatataaaacctaaaccgtatattataccggtaattaataatcattcttccgtaccgaacaatgttttagtacaaggtcaaacatttattcttcgtcaacgcatatgagtatcttcccagaagcaacatatgcatatgttgcttcatatatataacacatagagatctattccaaagcatatcgatcaattcttgctacaacacatcacaactttatcatcatcatcatcatcacctcaaaaattatccgaccgataaactcagaaatggagaacgcattggtcaaaactccactgagaaagctaagaagaagaagaactaaacgggtctggagattgaagcagaagctaaagcttgcatggaaatctatcaagatccgggtcaagtcacatcttccgggtttcttgtcaaccaagaaacacctcttccacattaaatcacgaaaggaagaacaagatttgtctcaagtggcccagaggatctgcaaaatctccaatgactcgaccaaatcactggcgtttctacttcagcttccaaaatactcagccgacgattttcttgaccgcggcgatctgatgactccagctgcgtctccaagggaaaaaatatccaaaatgtggcgtgagcttcacggtagcaacaattgggagaatcttcttgatcctctgcatccatggcttaggagagaagtaaccaaatatggagaattcgtggaatccgtttatgattcacttgatttcgatcctttatccgaattctgtggaagctctagatacaacaggaacaaactctttgaagagcttggtttaaccagacatggttacaaggtaacgaaatacatctacgcgatgtctcgtgtcgacgttcctcagtggttcttaagctcggctttgggagagacatggagcaaagattccaactggatgggctttgtagctgtgagtggagacagagagtcgttgaggattggtcggagagacattgttgtggcgtggcgtggaacggtgactcccacggaatggttcatggatcttaggacgagtatggagccgttcgattgtgaaggaaaacatggcaagaccgtggttaaggtgcaaagtgggtttttaagtatctacaactcgaaaagcgaactcacacggtacaacaaagaaagtgcatctgagcagacgatggatgaagtgaagcggctagtgaatttttttaaggatagaggcgaagaggtaagcctaaccattaccgggcatagcctcggaggtgcgctggcgcttatgaacgcttacgaggcggctagagatgttccagcgttatctggtaacatttcagtgatctcgtttggtgcgccgagggtaggtaacttggcattcaaggaaaagctaaacagtttaggagttaaggtgttacgtgtggtgaacaagcaagacattgtacctaagctacctggtatcgtgttcaacaaggtacttaacaaacttaatccgataacttcaaggctcaattgggtctacaggcatgtcggaacgcagcttaaactcgatgtcttcagttcgccttacgtaaaacgtgattcagacttagggagggctcataatctagaggtgtatctccatgttttggatggcttccaccgcaagaaatctgggtttagggttaacgctaggagagacgttgcttcggtgaacaagagcacagatatgttgttggatcatctaagaatacctgagttttggtaccaagtggcacataagggtctgatccttaacaaacagactggccggtgggtgaagcctgtccgtgcacctgaagacattccctctccgttaccgaccggaccaaaacctatttatagcttatgagaaataaatttattttccattccattcattcgttttcttgaatctttagtccttgtgaattttggttacaacatttcagttcaatgaatatagatcaagctgtgacaataatgtatatatgtttgaaactactttaaatacaatttgcatcagctaaagaaatcagaacatcagagtagaagaatattaatgatgaaaaatcaagttgatgtttaaaagtagcttacaaagttacaagttacaacaaccatggaacacatacaaagaagaatcctaaacaaaccctaaaattcacacacataacaataaaagcttctaaaaaaccagcaaaacaaatctatgagataatttggggattggattcaaattttaaacgcctgctattgcgttgaaatcttgataacgagacattgcgcctttgaactcgtgttcttctggtttgtgagagctcaagctatgcggaatgtatgctctgaaaatctcctctaggtctggactctgcttcagctcacggcaagctacctcgagagctgtgtgttcgaaccctccgtagaatttctggcggcacacatatccgaagatgagagaggtgataatgagagggatcacaagggccgtgtagaagaatgtcttggctcctaagtagccaaacattaccacttggaatagaaacaacgctgctagtatgcgctggtgaatatgcggccacattcttccatagctctcgtatgatggaacgtacactttcaacgcctgtcataccccgaaataaaacagttcaagatcacatttttgataacctaagtgtttatgggtatagtaaatagagagaaagtctgacctgattcctgaggactagccagcctaaaccaaagtaggtgatgccgaatatgaggataagaggagcaatgactgaatagcagaacgtgattgtgaggatgagcatgtctccgggaaccctagtcgcatagcttaagtctcccgggtaccaagcttctttgacctccgcttcggttttgcagagatacttctttttcaggtggaagattatcaaaggtatgatccgagacagctcaaggccataaccgataaagaacctgaaaaaaaatcatcaacataagatttagggaacaaacgaacaatacatatgctatttaagtcaagaagaccaaaatctcacttgagagcaacgtaggtcaggaagaaagttgcgctcttagggaggctagtagccaaaaggttaataatcatgtcgagtttgggatttttcgcgatatccttcactgtgttgaacaaagtcccagcaagggtaacaccaatgaagacattaaagaccgagaagtaaaagtacttccctgaagcagccctaatggcatggctctgtgaaggaatcccctcggctttggagagaaacaagagaagcttcggcaacatggccaagaaaacaatgagcgcaatctgaggaaggaaagactccaaaacggttcttatggcggttatctccacaaccggctttatgaacggaataatcctctgaagattcttaagagtggtgatggcagagacgaacgcgattggtatcatgtaaaacagaatggtcactgcaacaaagaagtagatgaagtattgccggattattctgctgaagagcttgatgttgagattctgccataggagctgccgtggctcaggagcttcggtcacagtccatttatcaaccatctggcagtgcagagactgagctgctgatgcagcagcaaccctggttgtgaagaaaaccactgctgcggtttgctgcttctcagcaagaaccgctttctgctctgtttccagtttggctacagactcgttgattagctcagtgtaatactcaatgctgtctacttgtttaccgactagcccacagaagccggttttgttcgtgggacggttattagttgctgctaatattgcttctgctcgcgcaagcttcttcttgtaaccttccaatttttcccatattttattaacctatacaacacaacaaagagcaaaggttaacatattaacattatgatgcctaaaaccttaaaacatatgactttcttaggccagaacaagtagataccttgctgttttctgttgcgacaagcgatctgtagaatgtctcagggtatatttctctgaaataagaatcaataaactctttctgtgtctgcccgtcaggtggtgcaggcatatccctaacaagaatagcgaattgctcgggttttacatcagcagacatcagagcttgagctctcaatgaagagacatgcttataagctttccacaagaagaaatatgtgaccaaagatatccagtaaacagctcctaggaacgcccacagcctcgaactttttttctgttcaaatgaaaggatacacattttgctttagactatcaaaaactgaaaatgaatcaataggcagaatggagttattgttgtgtttacttactgtgatgttagccattgatagattatcaagttggctaaaagttcctttgcttgtggtatctgtcgcattctttgtgttctttatgttgttgtctgtagcggctagaggcagtagagttggtaggagaagaagactggaacaagcaaatatccccagaactgcatcaaacaaaagccaattttcaagacatcataaacactttaccttcaccaaaatcactggctcgtatatatagacttcaaaaagttctatctactgattctaatttcaatcaccaatgtctaaaagtaaaacagagataacataacatagcaaacaaaatagtcagagccagcaatttacaaacaaaaaagtttccattttgaaacgttttttcccccaattgtctctaaagatcgaaactttattaggttaaatctcaaacccaaatcaaaaccaacagaaatcagcagaattccaccaaacccttgaattggaaccactaaagtaacagagaacagagatgaacagagagagattgagatcgaaccagtgctcaagaagacaaagtggacagcagtatcgacgccggataagttaacgacatcttgttcagaggaagtcaaagcttcacgcatccaagcaaaagggtttcgagtcaaggaggtgccttcccatggctccagccctttaaggatccgattcgggtaataaatgggagcatttccagatttgcgagaaagccaggtgaagagaagcatgagaatgacgaagataacaaaagatgtccctaaggacacaagaaaagatccaaactccatctgggtttagccagaggaatctctcaagctctctgtttctttctaaatcttctcaagttctctaaagtagccgtttttaaaggggtacaacaaaagaaggaaagtaacagtttatattgtcttctggtaattacaggtgagagaagacaggctttttcttttgtcactttattggtgtattcacagaaaaagaaaggaagatatttttctattgtttgtttaatctctttgtggaattgtgtaacggaggagactggaaaaattgaatattgtggaattgattaaatggtgggagaaggagaaggagaggtgtgtgagaagagagtgaagagcgtgtttaagtgacaaggccgacaggtgttgatgatagagacaccaaaggagatggattttttaaccctacttcagggtcctcctcctcctctctttacccattttgttcccttttttatacgtttttattttattgtataataaattattctttggatttttctctttttgtgcttttgaagtttcttctattcccttctattttctaggtttgtttcaaaaaagtactcgtaaaccttatttactactacttagagatctttgatcagtatgacatgtttaatgtatctcttaatatttggaaaaacatatggtaagaaattacctttatttcgcaaatatttacggttatggtgacatatcaatcatataacaatttaagttcaaaaaaatacttgtattactatataaatcaaagcatattttgatttaaactagtaatttcatctgaaatccggtttttcaaataatatatgttttcatccttttacttaatagacatctttataaaatatatgatagtatattaaatttacataatttgaataactcataaacaatttgcgaaataggttcgtttatgtcgaagttgaatattgactgtgtcgtaagtaatgtggtggaaaagcattcttgatgatatgcgtcattttactctagtggagacgacccttgaaacaaatatatgcatctgattttacacaaaagcctacgaaacacatcaagatcgaatgttattttgtatgtgatcaaattcaatcagaggtaatagcaaccaaccacatctcatcagactcctctacgtttctttgaattctaagattagaaagagttcaatttcttctttgagatgtggagcattcgtgattccatgctttaacttgaacggatatttgaattctaatctcataacttgtccactcaacagaaacaaaacaattttttcttcttttttccttggtttttttttccttagttttgttgactgcttgtagggaataccagttatttgggtactctaattcatatttttatttcctccaatatcaatattcctctatattcattcttcttttactctaaatattccaccaatcacacattattttatttgtattttattataagcattcaccagtcacatgcactttatatgtttgtatagtttacgtaagaaaaaattgtcttgtacgtgtgtagaataaaaattacggggatccacacaaaaaaaaaacttttatgcagtttcaacaagttttgaaatataaaaccaaaaaaaaagaactaaaaacaatcgaaagacgtccacgacatgctgtatttatgttttacctcattctattgttttaaattttaatactagtgtatatctcttcgccatattttaatcagaagataaataaattattggttttctttttttatacaaagaaaatttattgttttgtttggtgtgtttccatgcatgaccagtcatgtaatattggtccaataccggtccttaattccttttatgtcgatcgggtaaaatccacaatagatagatcgaaaatatatgttatttttggcatccaactgaattaaatagataacacaagtcactggacaaaacagtagatttccactgagacaaaccattaatttgggagaataaattcataaatctatatataatttatgcgaatgtgataaaagttgttattcacaagacaaaagagaccccaaaacaaaacaaaaagccgttgtccagttgttaatgccacctcgacgtaaaacttcattgccgacaccgaaaaaaagcttgaaagggtcccaaaccttatctttattatatgtcgatcgaagaccctaaagtcttatctacaatgatatttctgttagtatttgttatttgaaagtaacgccgttcacagatttggttaggtggctattgatccggtccaaagcccttttgctgatatttatttctcttctattttcacgtcgacatgtacacatacaaagacccaccacttcatctagtttcttctacttacggtattaaatgatatttcaaatatcaatgaaatttctcaagtgtctattttaataagttgtattagcaaaaatttatatagaagtttttgttaagagactgaaaatatctaaatttaaagtgttagcaaccgtaccatatgatcactattcttcctcatataaagaaaaatattactcaatgaatgcgttaagtaataccattggataaggaatagacatcaatagtacatacttttagttaaaaagatgtaaactttgttttacaactttatgtaaaacgcctttgtatgatgcggattttagtagcttttacatagggtaatatattggtcacttcttacgtaaaacacattggtttaagaatttaatgctatttatgcagattaaccccactttacaaattctaaacgaaagagacaaaaacaaatggttttcacaagttgtagtaactaacattaaaaagtatgtattattagcaaaatctagactaatctttagattatatataagattaaaatagtaagagatttgggggtatcaaatttagtagatttcactttgtaagcttcgtcgctttcacgaatcaggataaaatatatatgtacatttgaaaaaatattgcaatagggattgctgtaacaacattgacttctttttttttttttccacaaacaacattgacttctatgtcttgatataaaggtttgttggcaaagaaaaaaaaaagtcgtgctgactggaaatcgaatctgctaattaggctttgtaagaacacaacgaacaattttaaattgcgcaacaccatatatactataattgtgtggtatgtggatgatacaaaaagaatcaatcataaggattttcaaactatttttattcataatcattgtatgggtctgtgggagacgtgactcctactagtaattttcatgaattatttggcatgccttgcaaccaaaggcaatattaaatcatacaatataagtatcattattattccaaaattgaatatcaggttattatatttttaccacattttctaatgttgtcggtatgcaacgaatcaatcacatgtaatataacattttggtaacaagaggacaaaataaaactaattaaatggtacgtgtctctcctgccaaaattagtttatttatacttaacttgcatatgtctgagcaagttataccatttctatttattattcagtgggaaaagcatacaaaaatttatataactatacttaatgtggtcgaacatgatgggcctttatatttgcccggcccaagaattttctgttcgagactttaggggggaaaaattgggacaatttatcatcaaaatactatttttaaaggtcatccttaagatttatgttgtgaaagattaggttcatattcggacctaagttctacttctaccctatggttttaaattctacatgtccgaaacttatatgtatcaatatttttgatatttcttttcatttaggaagtagctagtaataactatatcttttattatcattgggaaaattattgttaatatgtctaaaatggtattttaaacattatattagatattttcacaaagatatatccaccatctaagtccagagttaaatgtttctattctgtaaatatccaattatgtaacgttatagggtgcttcgtcgcccgactaaaacacttagcgtaccgtttgttccacgcttccaccttattattttccacacacatgcataaaagtccatagataaggtgtatacgttaattctctagctcacatatatgtcgtgactcgtgtatagatatttgcacacacatacttcaattcaagcatcacattttcaagaaaatggcttctctcgtggtaatagtttcacttctcttggcagctttcgcttctcctcttttagagactgctcatagttataatgtaaccgcccccagggtatcactaaatccaattgatgcttgctggcgaagaaaccctaaatgggcgactaatcgtcaagccctagcacattgcgcggtagggtacgggaaagcagcaatagggggaaaaaacggtccgatctacgtggttacaaacccatcagacaaccctacacgccctagccccggaaccttaagatatgcggtgagccaacctaaaccgctgtggatcacatttgcacgtgacatggtgatagtgttgaaaagccagctcatgattaacagctacaagacaatcgacggaagaggggcaaaggttgaaattgccaacggaccatgcttaaggatcagacaagtgaagcatgtcattatacatgggataagtatccatgattgtaaagcagatcccaatggaatggatggtgatggaatacgcgtttttcaatctacacatgtttggatcgatcattgtttcctttctcggtgccatgatggtttgatcgatgtgattgtttcttctacggctgtcacgatttcaaataactacttcacgcagcatgataaagtaagtttatatttacattaaactgtaacttttataaataatttttgagtgtttgatgaaaatttggtatgacgttcttataaaggtgatgttactcggacatgatgacagttatatgggagataaggacatgagagttacaattgcattcaatacttttggaccgggtctcattgagagaatgcctaggtgagtataaatatatattgttaattattttaatttatatgaagtagataattagaaaattaaacgctaacatatatagatctatgattgatgatgtgggagggtgaggagagggtatgcacatgtagcaaacaataggtacgagaaatggcaaatgtacgcgatcggaggaagtgctaatccaattatctttagtgaaggcaactacttcgttgctcccgaaaaacgtagcagcaaacaggtatatatatcaatctcacgttaaaattatcataagacctaacatattatatgatacacttgggttaatatagtcgttatcaattgatttttgagttgaaagaatccatttatattgttgtgtcgtgttcgaatacaacgttgtatatatataactacatatatatattatatgtaggtgacgaagagaatgatggctggacctgattctaaaagatggaaatggggtacgtctagagatgttttcatgaacggagctttcttcggaccgccaggagtaatagtcaggccgttgtacaaaggaggagaggggtttcgggtggcacatggctctctcgtcccttctcttacttcctctgccggtcctctccgttgctacgtcggcaggatttgctaatcaattatatatattttggacaaaactcgttgtagtcttaaacttgggaaaattagaagacaaaagaaaagtcaacttcttcattaaacgatataaattttaatgtttcgtcgaatttatactctcacacttttttttttttttaataactaaaaatgtaaatatttcattagaatttacataaaacctattatttggtcacatggcaagatcttcatcaccagctacctaaacctagtcttatatatttgtttacatagggttcttacacttatcaatattgaactaattttgtcgagatcataacgggtttgaccgaccggtaaatcatcatacatttaaaccttagtggctacccgtaagcccatcaacatggcatatgtcttggtcttgaatcagacgaccttaaaagagaagaaccaagttttatttgtaaatagaaaacctgttgtgccaagaatcgatagaacatgccgatcacacctcttcaccaacaacccacactccaatgctatgtgaacctgacatgggcctattgggcctcctaaaacagatcattctatatatggttcacaataagataatggtcacagatcattcatcgacatatcttgtctcggttttgatgggccttgactcgtttcttatttccttttcctttttcaaagccgagtgaagttatcaacttacatggtattacaataattgtttttttgctaaacgtattacaataatgttacttccattggatagaaatgataccttgacaaaaaaaaattggtgtcaaaatgattgatatattgacagttcaaatatcttaattataatctaactcatacgtataatagatactacatctcgtgtcctctccttttcagaggatattatttttgtaaattatttcagaaactaaaataatgggaagatgaaactgtgtctcccgttaagaaagcatgttgcaaaaaattgagctgaataattactacaactagcttttttaatcaaatagtattttaatagtattaatttgttacctttcgctttttacgtgtgttaaaagatgtaccgaaaagtaaaaggcatataatcagcatttgaaggacttttttatttggtaaaactgtaaaaggtcaaattatccagtttcaaaatgatcataattcgtatttctaaacaaaaattgacaaaatgataaatatccaccaaatgtaaagaggattatcatttcgaagaatcacgactcattataatataagttattctttacgttacgataaaagatgatccaatcatccaaattattatctttaaacgattattttttatttttttgacagaacaaaatatcgatataaaaggtatttattttataaagtctatatacaaaaccaaattggtacatataacatagcttgattatttataatttagaaagttttaatgattatacaagaaagaaaatccgacttagataacctgtatttgtttgatgagctgtaaataatatctttgtcaaattattgtcaaatagatacatcttcgtcaaatatctttatgaaattttgttacatcccccaccaaatagaatatattttaaaaaatattttaggattgattattagactgcacagatatgaaccagatatccaactttttttatattcttttgtggcctacatcatcgatatgattcgcactactagatcttaaaagtgcatgctcatgtttatttatttatcgtgaaaaccaaattatgtcactttcttatttcatttcttctcacttccctatcatttaccgagttatatatatatatacattattgtgacattatactttcttacatccataatcgttcaagattataattttaggcgcttatacggtctaacatgaaactttgaggtttgccgttttagtgcatccttagagcattcttaatgggagtttctaagcaagtttcttaacaaagaataaaaaaattatatgatttaaatattacataagtctcttaaatttgatgaaacttagataaattgtctcttagttaagagataattaattttggtttcatcaaatttaagagacccataattaaaaatattatttatctatatttatattttaattttgtttaagagagttaggcttaaaaactaccattaagaatactcttatagtttaagatgtatttttcaagttccaatacatctttgattccgattacatgtgttttataaaattagtcttgaagttgtcataatatcaagtggaatgtactcgtaattaaattgcttagagagaaataaaattttaaataaaaatgcatttaattgtagtaggtatgagacatgataaaccgggccacccttagttcaatgcaactttttctctagcacattgcgtttgactctttcttggatttcacattttcctcaagtatatcaattatgactagaatccaccttataatatacactttttatatgataaagagtttccttctgatgttgtaaaatttagttaggggaacctcatattgaaataaacgttaataaaattctaacacttttcttcttaagtagaactataaatcatgaatatgaatttaaaagtacatatatgatataagaagtcacaaaaatcaaataaaattaaaatatttcgttgatatttcaacgaataaaaaataagtgaagtaataaaactctatacatcttacagaataaaacgattcataaaaataataaaagttctcactagtgatcatatgctatatatatgaatctagcatccaccataaaccatataatatatccatgagaaccatttactattcatcataaactagatggtgtccacaaaaaccctacaacatccaccttgattagacggttagaaaaaataatgtctactagaactatacatctaccatccatccgtaaaccaaagtatgttagacgatggtttccagtagacttgcctaaaaaatgctatatagagagagagcataatttttggcctttgccataaactaacgcatgaaaaattttaagaaagtaaataatgattttggcaatacaaacatgcatgtccctgtaacacctatcttggtaacagaataaatacttacattacaaaatacttatataaaatgttataagtagttactataaattttgctataacttgtaaccttagtcaatttacagcactgtcattatgtcaacacatgaacttaatctagacgtaatacatggcgttgataaaaaaaaatattacagaggttcatgcaaaattgtttcatgcattttggaaatgattcaattctgacgaaatgtaagatactgaaagccaaaacattatcgaggagatatgaaggatgttatttagattatggagtccctcagacggtgttgttgatgacggattctttgtaggcataagtagttatttctctattcaacatctatgttcgatacatctattataacaacagtgtggtatcacatctctattctctcattttttctaatacatgtataagaaatgtgctcccgccaacacataatcgatgcatttgtttagcggagatgtatgtgtgtaatcatgtgtctcctttttccttcgtttacatcctcttttactagtagtgaaggttaggttaggtttctctagttgtatgaatatttggagactaagagcattctacattgtttaaaacctctcgtaagtatctttatataattaaattatatattaaaaatttaattttaaaacaaaacataaaccaattaaagcaagacaagtgtcaagaaaagttttcaataataacctctcatttctgattttagcatgctttctcttttccttaatactattacaaaaaggaaattgatcactaatttaaaaattcaagtaacatctcacatcggaggacttgtttttcttttttatttcttgaagcagcaaattatttctagaaaagaaagatactctatatctaattacaacagatagtaaatttaattttgaattactttgataatcttatttataaattaatagattaaatgttttgtttataattatagttatttgtatgaaaccaataaaagaatattaatattcaactttgtaaagactgtccgttatacttgagatttatatgtctaaaatacttgttccttaaatccttatagtattgacgaattatttgctttttttcttcaagtaaagaaataaccgatctactatctgttattctgttatgtatgtgtgtgaaagtaaatcgaatgacacttgatcaaaagtgagaatataaaatatcatcattcagattgcattttgactaccttttattcttttctttatttttttgtatgtgtgaaacggcgccaatggtgaaaacaatctaattaagcttttttaattgcctatatactctctctatatatcataattaagcacgactactatgccctaattagctttaatcacaaggctttagaatttaagtacacaagggttatcagtgtcttttcgaatactcgaacatgtctttttgctgttgtcttggtttctttttaattaacactaatcattgttaacgtttacatgatattctttttaatactacagctttaatttctttatattcatttgtcattttgtttcgcttcattaagggaatgaggggcccattttattagaaaaacaagcctaattaacatttagcttcaagtcttgtctcttgtcatgatctattgctcttacgaggttacaaagaaaatctttgttggtatgttttgtttaatgttgtctgtataagcttataacttgactgaataaacaaagaaaaaagtttataacttgacttaatgtgcctgacctacttgttttacattaattaaatattttataatgattacaaaaggataaattataggtcaggcacaaataaataatactggtcaactctctattacttcttcaacaaacaaaaaaactccctattactcgaggtcgaaaataaatatttgctgcgcatctcctctattactctaggtcatatgaggcttgattaaatacatagtgtaaatgaagaaacaattactgtttttttcgttctgattggtaaagtttgagagtaaaagagttagagtaaaatacacagtaataggaagaaaaggaaaaattaaaagaagttagataaatgagagtagaaataatattttaataattttttgtttacactcgttttctcgacctttaatgtttactctaaagacaatataaaacaaacaactttagctcaaatatgttaaaataattgttttgctctttttcatattgaaaaaaatacagagtaagtgagcaaaaaccattttcctctctcttaagtttactctaatatgactatccaattacacctttcatttttttaataataatatttagttaacaaggtaatatcgtcgtaatcttagtcgttttaaaaagaactagttagttaaatcatctcgtttagaaatattgtaattttgaaacgtttaggttcataaaacaacttattttcacaacatatatataaagttacatatgtaaataaaaaatgtttatagtatgtggcattaaaagaatagatgcctaattgtagttttattttcatttttattaatcaaacaaaacaaaagaaagttgaactagtacggaggcttcgtaaattaaactcttcaaaatccatactttaacaaaagttggatgctcatgactcatcatgtacgatgtttggaccaaattgtttttgatcataatttaatatatggttaggtgatcttaatatatatttaggttacaagttgcggagaatcctttactaaagaaatgttctttttgtttttaatgtacatttttttttaattttcctttcgcacaaaagaggggtcaatgtgttctaattaaagaaaacatccttaaaagagaaaaaaatgtttcatttaaggtatctttcttttccgaggaaatcccctgaaaaataatttcatgattatcctatactagcaatttgtagatctcatcgtaatcattttcttgtggatgattcctttgcatgctcgctttagattattaatgacgatatatgttagcgattaacttgcaataaagaacataatttgcggctttgccaggagaaaagacgtatcaattaataaagtgaacgtattgcatgtacgagatatatacacggccaatgaaatttaatagtcataattataaccagtcctgattataacaacaaaaattcaattcaaaaataaaaattagctcatttttcattggacgactatattgtattatcgttataacgatatgggcccaaactacattataaacaaatgttgttatctggcgactagcgttaaaatgtttttattacgataggccaaatcaatatattgctaggaaaatatagtatgtgcgttttggttttaggaagaaaatttcttccaaaccagcaaaatattcatagagtagctttggaaaacatctgtagtatttttccgaattcccgaatttatgtgatagtcaccttatgacacaaattctaataggtaagaatgcaaaatatttactaatattgttattaaccataatatcactaattacttcctgtacgaaacagaagcgaaattgtctagtatatctttgatcattgtgacatcgttttctttgaaaatttagcaactatttaaagaaaagcgatggaaagtcgtggaaaaatatgaaaccataattggtaggaccagatttaatttcaatttgttttcaaggaaattaatttaaaaaacaaataatatgtaaacatcggccacatggtcatataaaatttaattgaaacttaatacttcgaatatgatatatctggaaatatatatatatatatattaaaaaattcaaaatataaatataaaaatataaatatgtttcattatagaggtttggctaaccagtaaactttcaaattaaaacttcctatcaacaaaaaaaaaagagagaaataagagaatgaccaaaacccccaaaaccaaaccttaaagcaaatcatcaaatcttacatcattctagattatttatcgttgatagtaattgtttcacatacgcttcatgaaaaagttgatggtaaaactagtttcgaatagatatgtaaaggcaatttggacgagatgatctttgaaagctcatcattttcaagtgatgttggctcacctctaattgtcgaagcactgtcaactcttgctaccgtcaaagttataattgaatcggatatcaagatcatttttttgtttctgactttctaatccttgtcaaagcaattaatcaaaagcttcaagtgaaaggagtttcaagaaattcttcatgatatccaatctctatatttttttcgatgtttatatttttaatttaatctctcgtaatctaaatcgtagaaaggatgttttggcgaaagagacttgctcatttgtattaaatcctaaattatcaatcggattagatgtttgaccaaacataaggagaatgaccaagatggtttcattcatgtaaacaagattgattttgtattatgtaagttaaacagtatataattataaataatatctaaaaagtatatctaaatccaatacaaagttttaaaatgatcggatttagcatatcgtctcttctttatctttatggtttagatcatttgtttttctcttgtagcttcataacttcgattatgtttttcattttgttttccaaaagcaattagccaaaaagatagtaattaatgaagttaaggaagaaggaaataagagtggaagatgcatatgacgtctaaaagagatgggactgggaaatcttgagcgatgaagtggtgggtctcccaaatcttacacttgacctgttgcttttttatttttattttccaccaaactacctttttgttgttgttgttggaaggtttagaagtagaactgtgaataatatgcattatcctagcattttctttctacggccaaatgggatggcggtgataggtgcatgacaaccgcgtataccttgaataggttgacataaccaacagtcagatatcatatatatagaaaaggtgtatcaactgggttacgatgagacttttatattggtatttaactttaatgtttagaggttacgatgatactttttatttttgatgttataataaaatgatacttttattttggtttttaattttttacgatgaaacttattgtgacataggtcacagtctaaatctttatgatgcttatttattaattaaccttatactagttatcaggaatatagccatatatatcccaaagttatcatcaaatattattattattattattattttttgtatatattgaacagtgatgaaacattaacgaagcaaataaaaagttttgagctcccaacaaaaagaagctaatgttttgattttaaacgaattcggatcttatatttgagtatcttacattggtattaacaacaaatgatttacacgctattagttcatcgtacaaacacacatgaatatcaagtaatagtgaagacgaagaagagggttttagagagaaagattgtagaagaagaagtttctattttctcttattgataaaatactgtacattgtgagtatatatacaagtaaactctaccaactaaacctgactaaaccggacttaaccagctaacaattacaaaatcatacaatgcctcccaatatgcccccttaagatgagccgaatatattgatgagactcatcttggactgtaagtgattgaattgctgagggaaaagaggtttagttagaatgtctgcaacctgatcttcagtgcgaacatgaagcatcttcaatgagcctgcatccagcttatcccgaaccgtttggcaatctatttcgatgtgtttagtccgttcgtggaagactggattggttgctatgtaaatggctgcagtactgtctgagaagagaaccgaaactgatgaaggaccaatcctcaaaccaacaagaagaataaccagccatgacatttcacatgaagcaagagcaagtgccctatactctgcttcagcagaagatcgagatactacaggttgtttcttggatctccaagagatgagtgatgatcctagaaacatggtgaaaccagtagtcgatagtctagtatcttggcaggaagcccagtctgagtctgcaaatccagtgagagtgagatcaggatctgaagagtagaagagacctagaccaaccgtgcctttgatgtattgcagaaccttgtaaactgctgtgaggtgggaagtgcgaggcgcggaagagaactggcacaacttattcacagcaaaagtaatgtcagggtgagttattgtgagatacattaaccgtccaacaagactgcgatacaactccttatcttccaacagttcaccatctgtcttaagtaacttctgatttggaatcatgggaactgaagatggtttgcatccaagcatgcctgaagaagtaagaagttcaagagcatacttcctctgacaaatggatatacctgaatcatttcgagctatctccaaacccaagaaatacttcaaaggaccaagttcacgcaatataaaactctgcttcaatgcttctgttaactgcgtagcaccctcttgtgtagtactagcaatcattatatcatccacataaaccaaaactgcaatgaactcagaaccataaggacgaacaaaaagagtatgatcaccatgacacttaatgaagccaagctgacgaagtgaagctgaaaacttgaggaaccattatcgtgaagcttgtttcagaccacagatagatttctttaatctgcaaacagcattctttggtaaaatgatccccttactctcggcatagccttcaggaactctcatatagatatcttcatccaagtctccattgagaaaagagtttgagatatccaactgattcaagaaccatttcttagaagctgagatcttaagaagcattttcacagtaaccattttagccacaggtgaaaatgtttcattataatccaagccttccttctgagtaaaacccttagcaacaattttggctttgtacctctcaagagttccatctgcataaaacttcacagtgaatatccatttacaacccacaactttcttccctggtggcaacacagtaatctcccaagtatttgtactttccattgctccaatctccttatcaatagccccacacaattctttcgaattctttgcctcagagtaagattgagggattggaatttgagtaatgctattaatgtatagcaaacgtgatggagagagtttgaaatatgaaagagaagaggaaatgggatgttgggtgacatcattgtcaagagagtaacaatgataatcatttaaatgagcaggtggttttcgtgctctatgagaagaaatttgtgttgatggagaaatttgaggtgatggaagatgaggaatgatcgaattacctgagggcaaagaattcatctgttgaagatcattatctgcatcgttcactgcagcttctttattcaaatctgccataggaaaggaatcctcatgaaactcaacatgtctagagatatagactttgttagtctccaaatccatgactttgtaccccttgtaacctgaaggatatcccagaaaaacacaagctcttgacctaggctgaaacttatgacgttgctgaggtgaggttgaagcatagcacaaacagccaaaagttcgaatgcgagtgtaatctggaggtttacccgtgggaacttcatatggagtcttattagagagtacctgagaaggagttcggttgatcagaaacactgcagtgagaacacagtcaccccaatgagacaatggcatcttggactcaaagaataaagcacgagcaacattcaaaatgtgttgatgcttacgctctaccactgagttttgctctggagtttcagggcatgagtgataagaaacaattccatgatctttgtaaaactgagtgaactgtaactccttagcattatctgatctaacacctttaacctttgtgttgtattgtttctcaacttgagtgatgaaagcagggaagatactaagaacatcatttttgttctttagcagataaatccaagttgctctggagtgatcatcaactaaagtcaagaagtacttaaaaccttcaacagtttccactgaaaatggcccccaaatgtctatatgtaataactcaaaagttgaattacaaatgttgttttcagaagggaaagacagcttcttctgtttagctaagtgacaagtatgacaaaaagcattcttcttattcttatgacgagtagttccaagaacttctgatataacatccagtcttgagaaagatggatgatcgagtctcttgtgccacataccaatgtccaccactgcattcactgaaacggatggagattctgtatctaacacatagagattcccaatacggcgacccttaccattcatcaaccccctgataggatcctgtatttcataacaagatggatcaaaaaccactcgtgaaccaatatcagaagtcaatgaactgatactgatgagatttaatcgaaacttaggtataaataagacattctgaagaagaatatctttatttaaccgaaccaatccaactccactaattctcactttaggaccagtaggcaagttcacaaaattcaccacagaagagtcgagagaaacaaacagatttctgtcatggcacacatggtgagtagcaccagaatcaatcacccatgtgttacgtgacagtgtgtgttgagagactgccagaatgccaacaaaagaataagtggagttagagaaagagataccagtatgatccagagctgactgagaagtgctagcaccaagaggagattgagttgtcagttgagatgtgaagtgagcaatgatattctggagctgatcattagataaagttccctgtaaacctgcaatgttgccttgaggagcaggtgaagcagacagggtaacttgagcagccactggagacggtttctgagctttatcagtgggtttccctttaggtgtgaagcccggaggaaatccatgtttcttgtaacacctttcagcaatatgatcaaccctgttgcagtaggaacaaattagccttcccttgttaggaccattttggacatacattacatcaggaaccacagaatcatcatgtgtaggtgttgcttgagagatctgaaaagttgagggtggagtagcaacagtgaatactttctgactgtcatcttgatccagaatattatagacttcaaccagtgatggcaaaactttcttagcaatgatctgacgacgaacaatcgcataagattcattcaagccagctaaaaacttcacagtcttagctctctctgccttcagttgcagacgagcagatttcccacaaacacaaggatcatcaggttcttctgagctgtccatatggttccacaatgtcttcaaacgagtatagtattcagataaagtcatagaaccctgacgaagatcctgaatctcctgagtaaggttgtaggtgcgaggtaagttagtaagatgaaatcgaccgcagagatcacaccaaatatcagaagcatcatccattcacaagatgctacgatagatctgtggagaaactgcatttaacaaccatgatttcaccatagagttgcatctcgaccatgctctaaacatcgggtctatagacaatggtctaggcaaggatccatcaacaaaacctattttgttcttagcatcaagagaaatacgcatcgcatagctccaatcatcataattcgtttcttcaagacgaagagagatgatgtttaaacctggatggtctgcactgtgcataaacagaggtgactgagttggatcagagagatctggcgatggaacacctcttggaagtccggaaacttgagatatagctgctggatgatcgattagaggagaaacgttaccatcggaggtagatcgagtagatcggcgaacaatggagctcgcaacggagctcgcaacggacttggatcgagttgatttgagagtgactcgagctgccttcaccattttgaacgaaaaagagctcaaaagatggaggaaaccagcaagagaagaacaaaatcagatcggagagaagaagattagaaccgtgattgctctgataccataatagtaaagacgaagaagagggttttagagagaaagattgtaaaagaagaagtttctattttctcttattgataaaatcctgtacattgtgagtatatatacaagtaaactctaccaactaaacctgactaaaccgaacttaaccagctaacaattacaaaatcatacaatgcctcccaatatcaagtaaaaaacatcctaacataatccttgtaaaatagaaattaaaagaaattctatcatcccatattatcaccaagataataaattattcacttcatgttgaagacaacaaggacatgactaatattcaaatgagtcgaagtttattcgaacaacaagtcgttgtatcggtagccgattagtgataccttgagtctttatatagttttatctatttcatacaagatcatagcatatatctgcatttaatgtgatgttttgattgagctattggttacataaaatagtgtgttggttatgaaaatgtatgatcaaattttgaccatgacgttgactcgaatgacaggtttgccagagaagtcggtgttttaaataggtattgtttttttggcgttaactaattattcaaacgtcagacaaataatattgtctagccagtatttgttacttattattttcttattataatccaaagaagagagttaaactcatactcgataagacaggtttcacgtgcaatgcccatagaccagaaatcaaatacatttttggactagactaatatcagcaaatcaaacatatagttgttgagtctattttattatgtttaagagaatgcgtcgttaaactggcttagtaacgtattggagacgcactaaataaagttacatatatgggtaatggtatgctccacgattataaatatcccatattaatgaacacatatggataagtcatacgccaaatttgcatgagacagaaacacttggaaatttctgatgctgatagaaaaggtatctcgttttctaaaatgatccaacacattcaaaagaataaattaaaatctccgagaattaaaattaatacacaaaactaaatatctcacaaacaaaaaaagaataaaaaagaaacgagtgagcgcatgtgagatgggccagaccctctgatccaactggctgtttcttcgagggacatgcatgaatggccatttcctttcttctcttcctacttagggtttttgattttctgatttttgacttcgcatttattagttatttttcttttataccttagaaatttcggccaaaattcatgaatagtattttttagatcagttactaaaatagtgttcgaactcacgacatgatctgactccaccgccacagtcagatttcagatattttcttatttattttgcaagcacattctttggtatcttcattcctttcctttgttgtacatacattcttatctctaaagcaccttatatataattatatatatatacactactgttttaagataaataagtaaatatgtatagtattaaaaaaattgttttctcaaaaacaaataagaaattgatttttcgctccagttaagaaaatttgaatattgttcccgtttaatatccaaaagaatatctaacctgttaaaatcatagtacatactatatttatggtgagcaatttttaaaaatccaaaatgtataaatcctagcaaaagatttattcttcaaaagataagtgttctataaaatctgaaagcatcgaacgtagttgacaccattttaattttaacgtcttttcttattattttaaatcttaaaatttggaaaacttgacataaaagctatgcagagccatcaaaatacaaacttctaccgaagaaaacaataaaatcgaacaagttaattaaatgttatgcttccttttaattagtaattatagttgccaacaaattatcaaatctatttttttttttttttttttgcaatggttagtccatcgaagacagatcctccaatgacaataaccatgaagacaaccacattcaccattattttctgttcacgaagcgtatatatgtttcgtttatggcaagtaagactattgatccttagccaaaataaaaggaaaaaatttagtaagactattgataaacacctaaatgttatcctgcaacttcttctttattttattttccttggaaataagtcatttaggatcaatcttatctattggatattgatttcatggtggtcgttagagagcaaagccattaagattttattcatggcatcttaaagccatcaaactatcatgatgaaaacaacaaactataaatgctatcccaaaactagcaataaatgttagaataaactggattcatttaaaatttgatattatcttcggaaacttctctcactttttcagagaaaaaaacaggtacaatacgtctataccgacacatcctattaaaccgtatatctaggttttttgccggcatagatattttgtaattttgcatacggaattaatacaaatttgtacgaatacatctccatgcatgaaattgaacgccttaatagctagtacataaaaaaatgtttgaaagattgttaaaaacgtactactgtacatgttaatatagttgatcgaaataaatgtttcacgtactgctataatctttttatatcattacatttaataggaaaaaatcgtcgaaagtagctaacttaattatatatacgaacgttccattttaccaaaagaataacacttgttttgtattgactgcattttactcattagccatcaacattttgtgtagtgtcgaacattttaagatccatccttcctcttataaattgtactattcgggtctttataaataacgatgcactcgcatgatcaattatatttctgaataaatatattgatgtggaacaaagaaataatggagtactaatagtatgtggtaaacatgtatgataggttgccataaacttttttgaatatactatatctactattcttttttcggatcgagtgacatctttattcagtaatttgtggttttgaaaagaaacaagtttcacaacttgaaaaggaatgggaacacatatatatgggaacacatatatatatatatatataaatatttcaatttaagttattgaattaagttatgggaacacatgtttaaacgaatgttaagaaaagaaatactctaatgtttaaacgaatgaaaaatgcaactcttatgtttttggtctttccaaatacattatccttgtaccgatcgaataatgatatacgcgttgtagatcttatattagagagataattaatctgattttagtaatttttaaattatatgatcttaccgatgatataaaactgtagaaatttgtttgggattaagaaatagtaaacgatatcgaatgattcttaaaaccgtaaaaagtagtggtctgaaaacaagttgatagtaacagttttgtgattcagaattattgaaacgataatctaggtaccataatagtataggattaccattaacataacactcataacagtcgacgaacaataaatatggatatttttcgtataaatgtgtgtagtacacacaaggatccacacgtgtggattcagtgtgggggagggaagggtaattgcgtgtagcgatggaacaccgtaagtactgtgaaagagaccaatggaagaagccctactctctcgtttttagtattatgtcacgtcccatctccaactcatgtgagtgcccactcgtaattttgatccaacggctacgattcattccttgttttcataaccatcatcgtacaccgctcacttcctttctttctagggacaaccatacactgtcctattcttcttcttcttacgcatataatagtatctacataactattttgacgtcgaaaatctatcctatacgtattttaataatatatattacccgtcaattcaactttgtatatatcgccgacagaaatatattaatacatattcgtatatacataccggctgttcttaataaagaaagatttcgcttttgagaatcttgtgacccaattcaaaacgtatagagtggtgtgatagctagttaaaagaatttgaccattcacaaattcgttttggttcatatcaaaattgatttccattgcaatacgaatacgagaatgacaaaagtcaatgaatgattttgtaagcagaattgatcaagtatgactaagaagcactattttggccgccaggaaactatgttaggaacatcattacaaaaattacaaatctacgctttgttatatacatgacatataatcgatgatgccttcaaaattagtttcatattgaaacataacaaaaattaatagtttaacatgataattgacatatgttgattatactaaataaattatttgtaaaataggggggagagagaaatatgaagtaacaaaaacaaaaaagaaaagaaatgagaagatgtctctaaaagcgaatttttaattatttattactcacctagtcaccttatttgtcatttttaattttttatgttaagtaattctgaaatcttccattgttttcactaaattcacccataattctatatatccattttttaaaacataacttgtgaaatctagtgtatataataactaataactgttatatttttatatttgtttgtgtgggaaaatgttaagtaataactgttattttgtataacatgttctctgtatataataaacaagcactagggtactagctataagctacgtttctaatttgtcgcaaatttttaaggttttgcttaagaattagttgcataaacaaatgctagttggatacttttgatgctgatgttttatgtacgtatatcactttcttgcataaaaacacattagccgaattttctagcaactgacaataatgcaactgaatttaatacaaataaataaataaaatctacaaaagatatggcgatggtactgatctatttgtatataatgctgtttccaacgttacccttgtttacgtcaagaagttgcacgtgccttcttagggcagtcttgtcatttcccctaggtaaatgatcactatctccattgtttggaatcaaaattcatgttctctaaatttttttctttctttcggataaaattatctaattaaaatttattggaatcttaagaaaaaacacgtatattctttattacaatatatagctgaagaaatcagattcgcaaatttccaaacgaggaagtgtgtattatacatatatattaccaattataccctcttctacatgcaattcgaactactattatatacataaaaaaaaaaaaaatagaatcaggaaaccctaaaagcacgtcctgtcatttttatcaggtgatttcactgtctatatatattgacttattgctatattctatataaaataaattttgctgtaattcgcacacttccattttcacattacacaatcaaataatgaggcaaaataaaatagccaatgaaagagtacttatgtactccaaacagaacttttaaaccttgaccagtaaaccaaaggatttctacagcaatgatatttttcctaaaacaaattgattcattttatttgcaatagttcactaaaactctagtataaaaaagcctttggtcatccactagctgaaaaaaatctacaacaacacataatttttataaaactactatgacaaagaaaaaaaaaagagtaagaaatacgatcatgtaatactataatatatgatggtaccataacgtattattatttttttttttttcctttgtaccataacgtattattaaaaccataatagtactcaattttaattacatggacgacgcaacgaagttttgaaattcgggagaagcataaattaaaaaaaggcacgagtcccaaactgtaaataaaaaggaaataaggggtaaattagtaaattaagtgtcctttcagaacaacaagttgctttagaagaaaatcaaagacccgctccgttcgggttcgggtcaaaaaacagccattgtcgttctttcttcttcttctgattctcatttcaaataagagagagagagagagaagtaagtaaaactttagcagagagaagaataaacaaataattatagcaccgtcacgtcgccgccgtatttcgttaccggaaaaaaaaaatcattcttcaacataaaaataaaaacagtctctttctttctatctttgtctatctttgattattctctgtgtacccatgttctgcaacagttgagcaagtgcatgccccatatctctctgtttctcatttcccgatctttgcattaatcatatacttcgcctgagatctcgattaagccagcttatagaagaagaaacggcaccagcttctgtcgttttagttagctcgagatctgtgtttctttttttcttggcttctgagcttttggcggtggtgggtttttctggagaaacccaaacgactatcaaagttttgttttttacaattttaagtgggagttatgagtggggtggattaagtaagttacaagtatgaaggagttgaagattcgaagaagcggttttgaagtcggcgagaccaagattgcgagcttatttggctgatgatttatttcagggaagaagaaataaatctgttttttttagggtttttagatttggttggtgaatgggtgggaggtggagggaaacagttaaaaaagttatgcttttagtgtctcttcttcataattacatttgggcatcttgaaatctttggatctttgaagaaacaaagttgtgtttttttttttgttctttgttgtttgctttttaagttagaataaaaaatgagattatcttcagctgggtttaatcctcaacctcatgaaggtaattctctcttttctctctctattgctttgatacttctagcaaatagtgattttaaactaactttgtgagttttggattgaaagttacaggagagaaaagagttcttaattctgagctctggcatgcttgtgctggtcctcttgtctcactacctcctgttggaagcagagttgtgtattttcctcaaggtcacagtgaacaggtttttgtctccttccttttatgatttggattcaaatctttcctttttggttacaggttacttgagaatgttttgtggttttcaggttgctgcttcgaccaacaaagaagtagatgctcatataccaaattatccgagcttgcatccgcagcttatctgtcagcttcataatgttacaatgcatgtaaggaactcactatcagtttttatgacaaacttttctaagtgtcttttctgtttgtgtgttagttaagaacttgattccttaccatttcaggctgatgtggagactgatgaagtctatgcacagatgactttgcaaccgttgaatgcggtatgagactttactatgtaattcataattaattttgtggaatttgtcggtgttttgaaccttctttgcttggtttgaatgcagcaagagcaaaaagatccttaccttcccgcggaattaggtgtcccaagtagacagcctacaaactatttctgtaaaactctgactgctagtgatacaagcactcacggaggtttttctgtacctcgccgagctgctgagaaagttttccctcccttggtaattcatcttattgttcatatgaattctactttcaagattagctattgcctccttaacaataaaattttatgtgttcttcaggattactcgcagcagccaccagctcaagagttaatggcgagggatctgcatgataatgaatggaagttcaggcatattttccgaggttagctttcttcgtgaaaaatccaagttcttattaatagctgaagaacaaagagatttatttaatctgtatttgtttctgcgttataggccaaccaaagagacatctccttaccacgggttggagcgtatttgtgagtgctaaaaggcttgttgctggtgactctgttcttttcatctggttagaaacatctttcaaattggggtttttgtttaagtgttacattcaaatcatgaaactgactcaagtatttgtaatgctaggaacgataagaatcaattacttcttggtataagacgagccaaccgaccacaaactgtcatgccttcatctgttttgtcaagtgacagtatgcatttaggccttcttgctgcagcagctcatgctgccgctacaaacagccgattcaccatcttctataacccgaggtatcgtcttaagtaccttatgaatgcacttatgtgttgattctcttcgttttgcatcaaacggattcggtttttctgcagggcgagtccatcagagtttgttatacccctggctaagtatgtgaaagcggtttatcacactcgcgtctctgttggtatgcggtttaggatgctgtttgaaactgaagaatctagtgttcgtcggtaggtgaattatcagagttcctataatttactctgctttttgctgctgaatgtccttaagaatcttcgtttgttgtcaggtacatgggtacaataactggcatttgtgatctagatcctactcgttgggctaattcgcattggcgatctgtcaaggtttagctcaaaaccaaacctttagtagaaaatattcattggtctttgcattctcgtatacatatatcattcatcatctgatcaaaatgcaggttgggtgggacgaatctactgcaggagagagacagccaagggtttcattgtgggagattgagcctttaacaacattccctatgtatccatctccttttcctctcaggcttaaacggccgtggcctcctggtctcccatctttccatggtattgtaaatttcaaaactttaacaaatctctgaaaggtttctatttctagtcttttatatcttctaattttggttgcaggccttaaagaagatgatatgggtatgagtatgagttcaccgcttatgtgggatcgaggactccaatctctaaactttcaaggtatgggagtaaacccgtggatgcagccgagacttgatacgtcgggcttgcttggtatgcaaaatgatgtgtaccaagcaatggctgcagctgcccttcaagacatgagaggcattgatcctgcaaaagctgctgcttcacttcttcagttccaaaattcgccggggttctcaatgcaatctccgtccttagtgcagccgcagatgctgcagcagcaactctctcagcagcagcaacaactctctcagcagcagcagcagcagcaacagctctcccaacagcagcagcaacagctctctcaacagcagcagcagcagctctctcaacagcagcagcaacaactctctcagcagcagcagcaacaggcgtatcttggcgttcctgaaacccaccagcctcagtctcaggctcaatcacagtcaaacaatcatctttctcagcagcagcagcaagtagtggataatcataatccgtctgcgtccagtgctgctgttgtttccgctatgtctcaatttggttctgcttctcagcccaacacgtcaccactccagtccatgacctctctgtgtcatcagcaaagcttctccgataccaacggaggaaacaatcctatttctccacttcacactcttctcagtaacttctctcaagacgaatcttctcaactgctccacctcactagaacaaactctgcaatgacttcatccggttggccatcaaagcgtcctgcagttgattcatcgttccagcactctggagccggtaataataacactcaatccgtattggagcaactgggacagtcccacacaagcaacgttcctccaaacgctgtctcgttgcctccatttcccggtggtagagagtgctcgatcgagcaagaaggaagcgcctcagacccgcatagccatcttctctttggagtcaatatagattcatcttctcttttgatgccgaacggaatgtcaaaccttagaagcattggtattgaaggtggtgactccacgactttacccttcacatcatctaatttcaacaatgatttctcgggtaatcttgcaatgacaacaccttctagttgcatagatgaatcgggttttctacaatcctcagaaaacctcggttccgagaacccacaatctaacacctttgtgaaggtaaagttttatttcttttccctacccaaaatgttcttcttgtttgcatgcatagcgatgattccggaaatgtttttgtaggtgtacaagtcagggtcttttggaagatcgttagatatatcaaagtttagcagctaccacgagctgcgaagcgagcttgctcgcatgtttggcctcgaaggccaattagaagaccctgtgagatcaggctggcagcttgtatttgttgaccgagagaacgacgttcttctcctcggcgatgacccttggccgtgagtttattaacttatccctcatttccgcatttggttttgtccatttccatgtttatttacctgcatttaccattatcgacagggagtttgtgagcagcgtgtggtgcattaagatactgtcaccacaagaagtgcaacaaatgggaaaaagaggccttgagcttctcaactccgcgccatcttccaacaatgtcgataagctcccgagcaacgggaactgtgacgactttgggaaccggtcagacccgaggaatctcggtaacggtatcgcatcagttgggggttcattcaactactagaagtagatggaaacctccctttttattcaagttaagtttcaatcttataaattagtagtgagatcatcttagtttaattactagcaaaaatctctctttattacttataaaaaagggagatttgcctttgcctttgatggaaacaaaaactatataatccctctgtcgactcgtaatactgtaattataagatcttttggtctttttcttatatgaatatttttactgaactctatatatgtcactttccttactcatttcttcaatcaatatgatagtgaagggttattttggagttacattaagactttgtctgactaaaatggtccacagagaaagtgatttgggtcccaatctccttattggaagtgaaagcgttttgtggttttgttgtgtgaaacaccaaaatattccgacccgcaatttggggctttaccctaaaattagatctcattttgcgtcagcaaaaactttatctctagacacgtatcgatccgtagttcgtaggacatttttattggtaggtaaattaatatatgcccttatcgtttatagtaagttttttttttcacaatatcgtttatagtaagtttagttttcaccaaagaatatgaaacgaaatttgtagaatgagtatggtttttgtttgcgtcttcatgttaagataattagaatattataacatggtaaaaaaggaaatctaactcctattaacttgagaaaataaacgtcatttcgataattgatcgaaattgttgtgaatttggaaaatatcttgcaatataactttttcttgttcggttttatcggaatgggattaggtaagttatgaaatgggcatcatttgaatagtataagaagaatttatgatttagtttggtatttgatattatttttgtttggttgtccattaggatatatatataatagagtgaccaattaattgaagaccatgttttatatatgatatttagtcaaagaaataacaaatctgataaagagatatttgtaagtatttggttttgatgtgtggtgtatgaatgtgactcacataaatctttagtggtgggactatatattctaagtaagaaattggaaatggttgaaaataatgttgggtgcatgtggtagggacatttatagatgacacaagttagggcactttcatgagccctaattaaatagtgcatggtgacccatcattctgaaagttctcaccttctttcttttcttttctttttacctttttttcttcttttaaaaggtatttcttcatcttacaaaatcaattattaattttagtttcataggatgtagtagccattcattacatggttaagaatatattcaaatgaagatctaagatcatagcttttgtctactacacatagaatcgtatgtcttttcttgatagatgtcataactatataatttcaatcttattagaatttcatgactttaatatctagaattcttgtttgtttaatttgggattaagtagctgaaagtggacgaataaaactctttgagttcattaattcaaaaacatgcatgagtgcattactctataattaaaattattttcattgatgaatatacattggaagaggacatgatcagtccattgtgataagatcttatatatagccgtaatttgatcttaaaaggaaaacgtttcaagcttcaataattttgttgatcgaatggataacttgttttaaagtttgctattgaagaccttacctttatctagtagtactatctctaattcggtctcattaccaagtagaaataatcaaatgatatttgcactgttagttccataaatccagtgttcagaatcagagtaccaccgtagtagaatggaaataatatcctaaatttctatatctagatgtataaaatttaaaatgaatataaccaaaacaagcttttagcgataagggttttgagtggatatgtgaaatttgttattgtgcgactatctttctcatttatctcttttaaaaacgacgaacagaaaacgtcaaatgtgatattattgattgtctaagcactttttgaacaaagtaaatataaaggcactttttgagttgtaagaccaaagaaaaaaataaaattctttggaccatcctttcgttgtactaactactctgttaccatttcactgagtgatcccttttaacatatgtaattctattttgtaaggatggtttccatgcgatggtacaaccatgcattgttaacgaacgatccaatctagaatattatatgtcataacttccacaaaactacacaacctaagcaaaagcatagctagtagtgtcctagttcctatccaccaatgtttctagaggtttgaagcgagttaggaaagaaaatgagtactttctataaatgtgtttaaacggtaattataatttagtttcaattaccacacaacatacttaaatgagaaacaatgatattgcttttttctacaaaattttcaccaaactttcttaatcgagttttctaaaccaattttctttctctatatatgaatatgatagccaaatcattcaacctcatttatgacatagttgatcacaaatattagctttagtttttaaaaaaaaaatcttttagcagaagctacttgagttggaatcaacaattatattcgataagtcttcacaagtttgtataacaatcttccatgcttttaagaaagtttagcccttccactaatcttttgaagtttcctggccaattctttttgaaaaaaaatttgatggagaagaaaaataatcgtgggccgttgcagaataagacttaaaccaacaaaggtggagatcatactataacatttcgaatcttttttcacaaatgaaaattcttggatcaacaattgttcttgatcgttttaacattgtccatggaccacagcccacatatgctaatgtaatccaaagagggcctctagatacatagagctacaattgctggtcggtttgaaagtaaaccactaaattttttgttttactctttagaggtcaagtgtgtactaacgccaaaagttcacttccagtaatttggctttcttggttttgttgtcagttctagttaacgtgtttctaaaggtaattgcaagccctaacttaagacacaatctttggcattctcttttaagtctatgcaacataatatgcattccatttctatattacacaaaggggctttgagaatccaatcatggtttactcagaagaccaaaaactcaatccaatgcctcatgagaaccaaccacaacatatcttgtaacttgatgccggtattctaccagtttcccgaatatattgggcttcagccactgccttctcagcatcacgggtttttctagcttccgccaaagcccgtttctcttctgacctttgcttagccaacgcaattttcttcattatctttgcttcagcttcagctttcatctgctcaactttagcctaccaacagaagtttagcaatgctttatcaatgactttggtctaagtgaccaagcaaaagttacagagaatagaaaatttaatctgataccgcctcacatacctctatacgtcgcatttctgcttcgagtttggctttctcctgactttcccaagcttggattctgatttcctcacgcttatacctaaacaattttgagtttcagaaagaaaagaacaacacattttaagtcttttacactatgtttctccactggacatgcaacatatttggtttaggtcataagagcagacagacctcgcattatgtttggatttctctgcttcttcccatgcagtcgctcgtttttcaaactcaatcttctgtgcctcctctgcatctccattgtttttcttgttctcctcttcttctttacttgcccaagcggcgatgttcatcttccctagctgaactccaagagctacaatctctcttcgcgtcttcgctttctcttcctcctcagatagttctcttcttgtgtttttcgacatagaagattcctctggttggccacctctaggagtagaagggagagatgaagtcgggctacgaagaggagttgttgcaccaactggtgtcacagatcttgaaggttcttgactcggtataggtgtcatttcggttcccatatctctcatacataccgaacgaatcgcaggaccaccttcacatatataaacacttatcttgtcaagctccgaaagctctaataattaaaacaatttcacaaaaaaactagtctaattctttacctgttgtatgatcatgtgatgaatccgcaagatcattgctttgtgtggattggtcaatcaacgagtctcctccatactcttgagttagaataggatgtggcgccgagggaacaacattagggaacttctcaaacccatcaacttgtgaggattggcacagatccatcctagatttgttatgctcgtaacctgcattatcaggcacaattctcacaggtattcggttcccttgaccgttcttcctcatcaccatgttctgtctgctcattatccacttctcagcatcattccatttagatggcatttgtcttgaaggatatcctcttgagccatgattctgattcgaacgctcaccacgagctcggtgaaactcgaagcttgaagagctagcgttactgtcataatcaaggttttcatcttcttgaggtctcattatatgaggagaagccatattcaagtcccctttcctaaattgctgcagtctaggctgatcattttcccttggaacaacaccttcacaccgatcttttgagccttgattatcgttctcggttggatacaaaaccggctcatttggcagcttagctacttctatatccgtagttgtagctgccactagacgtcatatgtaacaagaacagagcaaacacacaaactttagccaagtgttcaggaccaaaacagaacaaagacacaaactttagcttaatgttcaggaccaaaacagaggaaagacacaaactttagccaagtgttcaagaacaaaacagagtaaagacataaatcgactaaatgacttcaattgtaatacaaagcagagagacgaaacaagaacaggtcaaagacacaaactttagccaaaaacagagcaaaaacagaggttttagcaactccttcaaagctttaacttatcaaactgagagatggaagaagaagagagaagattaactattaccatcgtcgtctgaataagagttagaagctaacaagctgttcttggagaactcggagtcatctggaatctgaagacgagaaggagatgttcttgaagagttactgttggacttggatccttctcgcttcatgttattgagtggacccattagcttcattctcagcttcgttggcgagattatactcttctgcaatatatatataaaaacctaaaaatattgagctttcttgatttttatgaaattctattaaaaaaaagatagacaaatcaactttttcttgttgaattgaggagagaaaaaggacgaaaatttctgaaacagaattgtattatttaaagttcatctcttcctcccagaaattcttcaacagaggaaaattaaaaggtagaagtggaactcactgtaacgtaaatgtacaaagagtgtaatagtaaggacaaaacagagaagtacaagaagattgaaaaccagagaaatgtttgtacttgagagagagatagataaaaatttaattaacctgcactttctgtatcctctcgtaatccattgccaatgccaaatcttttctctatctctttatatttacagacacaaagcttgctttctctaattcctctgtctctgaaaaagaagaagagagacaaaatgggttttttctaacttgttactaactcctagcttcaactttttttctctaatagggcttttgggaatttttagatgatgataatgattgaacaaaagacgaatttgtttttgtatttatatatttttttgggaatagtttttttgtattttatgttagagaagagaaccaaagaaaaaaaaaaaaaaagtgaagatggaggactgtgcacgccggtccacattttgcttgtttatcattcatatccaccgttctgatttcgacacgtcacctaacttcatctttttttttatgagtactttgttatattgttgttgttatccacgaatacaacaattttgtttctatcaaattaaatctcgaaaacgactttcgtttatagtattaatataggagaaaatattgggaaaaagaacattttaattgattatatacttcaattatatacttcaatataattatatagagatacaacgtaattgatggatagatgatgaaattagaatactgtaacaaagtttcatttgagtgtaatgaattttgaattatttgagataataaagaattttaacaaaagagaaaaacttgagatactaaatgccaaaaagaaaaatttataaagatacttatgtggatttactgatatctgaagagtctataaatagactagtaacagggggatttattattacatctgtcgatctcaccactcgtcataatgaactgaatcattactttttcactgtgaacttaataataataattaaaataaaacagaacctaaaatttgtaagaaaaaacaatatacagtatttgcctgtttagttcagagtaaaaaatccggtaaaaagtaaattaaaacttatgagccgatggaaaagttagtaaaatatctagaatttggtcacgagaattcgttttcctacactagtaattatgattttgaaaaataaaagaacaaggtaatatttgttgtcctcaaataaatgtatatttttgttgttgttgttgttgtttaaagaagaaaccgaagaagtggttatgagtgtagatttggaatgaaatgtaaaaatgagtactgacaactgaaacgtaaacaatcgagaactgacactttctccactttagggcattacgtttctctgtcactttgaccgttgactacctctcttcttctttctctcatcaattgtttactactacacatcacattatcataaatttttatcttaggattataaatttagaatcgcctgattatattaaacaaagtgtgaagattataggttttaaatacagtatatagtttcatgggggattataatattcaaacatacgaatgtatttatgtataaacaataacgagcgtgtacgtattgtgcgaggctcgagctcagctagattcctatagcctaaccttgttttcctcaaatatggttttttctttaataaatattttcctaagaagacatgcttttgcacagaaaatatgtgagattactttcttttctaaatgtcatgttttacgacagatttttcttcacgagaaaacgtacgagattgtttatcaaaagagaactaaaaagtattggactaagaaaaaattggattgctataactctataagttataagaattaaaggcagttattttggactgttgcacatggtgagcttatatttagttatagatatgtgtataatatattaattaacttaggttgcgaatgttttcttacttttaagtttgcattattattttcaatttatagcatataagatatactcttaaacattctgtttgcgttttaatatattcatatttttattatactcttaaaactggatcaattattggactggcacaattaagtatatgcttttgtcaaaaaaggcatatttcatatgcctcacaaatttaagtacttctatctcttcattttttacaattttatcctctccaatataaagcaaataccataaaaaaataaaagcaaatctgaaaacaaaataatatgatgatccacacgcgtgtgttttctcttcaatggtggggaagctcatcttcttcttctctttaccatcaaaaaattgatttaatgagaatctcaaattagaacaattgggttctatatatattatcttgtagggtttagatttttactatgaaaacttgtttaattggatccaaatttgatttgatgagaatctaagattagaactcttgggtttcatatatattatcttctagggtttaaatttcctctatgaaagcttgtttaattggatccactgaattcatctgaagagaatcaactatttcaaaccaaaattattttctttttttcattaccacaaatcgaaaacgaaaatcgccttaaaagatacatagcatatcttgtttgggttctattaattttgaatgatcaaaacccatttaaagtttctggagaaaaagaagaaaaaaaagcagaagaaaaacgatgaagaagaagaagaaagaagaagtaaaacacaagggcaatatcatcaattcaaatacttgaaaatgtttattcttgtaagcccaattgataaatgcccgatttcaatttttttgtcaaataagttcctattttgataatagcccccttaaaacttgatcattcatattttcaatttatagttcttgcctctagtaagtcaatactaataaatttgatcatacatattgtcgagtttctcgtttgtctatgtatgaacttcagagaaatatgttattggttggagtcttgtagaatgatctttgactaattttacagcattcttttctttcttacaaatagtgaaataaacatttatatctttttaatattagatttttttttctctttgcatgaaatcaacgttgatatgattgtgatgtacaattctggtcgctgagttatttaatttttctcaattgacaaggaaaagtttgtactctctcttattttggtcaacaacgaaaaagatttctactcatatgcaaaaaaatatgtcaataccaattctacgtttcataatgggcttatggaaatggtgcgtcaatttgattttggtggtcggtatatgagataagtcaaaaaagccactactaccatatttcattttcctcgcacacactttctgacattttgtccatttcacattgctattacaatttaatcaaatctgtgaatttaaatttagaaattttgtatcattcgcaaaggttcaaaaccatgagttttgactatcatagttgaaaatagaaatggagacatctctctagtgggtccataaagacactacccaaaaagtttttgtcaagcttttttggtcttaaaaacaaatctaatagtctttattatcttgttggtggaatctagattagtcttaaaaataagaagaatgaaaatttcttagaaaaatcaatgttatataagatggacaaaaagattcttaatgaaaattattatatgattacaaacaaaaataacttatcaagaaaataaaattaaaaaacgtttaagaactaccattttaaagaataataaggaaacttcaactttaatttaggatgaacaaaagaattgaattgaaatagaaggctataatatttttttaaaaaaatttagaataagaagatattcatatatcactttttatatgaaacaatagtgagtaatttaaaaatacaataaaatttcaaatgactattaaaatatagacatataatatagtttagtttaaaatacaaaatagagtttgatctatagtgttataacttcctagaaatatatttatagttaatatataaacaataataatataccattttgaattatattgttagaaaatgatttatggggttttaatagtatagtttaaagagggttctcttttccatttagaatgtccacatcaacatgttaaccatctaatagaatatcaccatatcataaaccaataacatttgtccaaaaaaaaaaaaatcataaccaataaccatatttttgtttatatttttattattaaaaatagaactaaaatcattacttagatatacagtagttgatgactattacttggagaattaataatgaagtagaaaaatatatttaaaatacatgtttaggaaaaaaatatatggtaaattgttataataaatgtatgattgtacgtatttgtatcagttttttttaatataagtttaagaaatcacatagttaaaatttgaaattatattttaattaagagtgtgagctgatgggatgtcgggttatttctttcaaggttactggaatattgtaggttgacaacagtttttgtctttcaaggttactagtgaaatgcaagagttttttcagcatatggttctctttccttttgaatggaacttcacacaaatttgtctattctctgaataaataagagtttatctgaaactatgaacaattcagaacattttacctataggttttggagttaaaatcacaggttaaggcacagtaaagctatatgagtttcttatatagaacaatgttctatacatcccaggtttccggcttaatcttttgagcattagtcagttgaccaaagattagggttatcgagtaacgtttgataaagattcttctatgatacatgatcataccaagggattaatgattggaaagggtgatcaaatctccaatctttacgtcctcgatgctcactctatcataccaccttataatctacaaatttcttactctacaaaaagataacaaaataatgtgtttttcattttttatgaactgtttaaaataaaagttagatgaactgttttctgtgacccaagaaaataatagggtattagatgaactgttttctgtgacccaagaaaattatcttgtttctttgtttttattttaacatgtatatctgataatattaaaaaatcgtcgtttagtcagaaatcctagctaaaacttgaagaagaaacaaaaacattagtgataatgttgatatgaagccatgcgagcattatgcatcttgaacaaaaccgtttcactccgctctctatctctctataacacaaggagacctacaagcttcctcattgagtgaatcagaagtcagataaaaaataaggcaatgatcttagtttcgttaatgagaaagccaagtaatcattttcacctcttcataggtctattgggactctcaagccatcatgagcgagttttactgaaatcccttccctaacaaatcaaaacattgcagcaaataagattactcatctctttctatgtataaaattcttcagggagatgatgtaattacgagctttcttagttttctaccttttagaccattcttcaagaaactcgttgtccttgtgatgatcaaactcgtgagtcattccaatcagaagagccctttttggactcagtcttttgattgtgtctagtgtctacagaaaacaaaagtaagcatacatacataaaccataaaataaaacccacactttcaaaattatgctaacctgcgggaaacataagtgagtgttgtgggatcctgtctgcagttgcggtaaagaaaaagaaagagaaacgatgtaaaaacataaagctcatatttaaaataaccattcaagctt

SEQ ID NO: 1154 - DNA, 80139 bp, Arabidopsis thaliana
aagcttgatggatcaattatcttctaatccaatcatcgtagctgtcaaggttccacatttacactattcttatgtcagattttaaccaattctaattaagaaattcctgtactaccattttctgcataagcttcattgtctctaatcaagaaatcatcatcaacatgaataggaacaagtgcaataaaagaaacatagggaaacctcaatgagaacaagtctcttgatgttctacaccaaagagtaagaggactctgttttcaaaactaaaactaaaaacaaacagactagaacatcaattagatccaaactcttaactgcctcaagtcatcaaacaacatcatcttaagaattccagcagagcctccatgtctgcgcacttttgcttcatgtctttcaactcttcctcaatatcttgcacccgagtgtctccatgtctgcgcacttttgcacttttgctttataagtaaacacgttcggaaaacgtagggtcaattttgctttaaaagcatcaaataggtttgaatgataacgagaactcgaggaatgggaaacgctttggcttctcatagcttattggtgggctgattctttattgatacttacactaacgtattaattgagacactaactacatttttaaattccttttccatcaagaaacatagtgaaattataaaaacttaggtaacatcaatgacaataattctcttttacttttccaagattaaacgacattcacccaataagacccaaactcctaacttgttttaataactcaagtcatcaaacaacattcatcgtaagaagtctagaagagccgtcatgtctttcaactcttcctcaatatcttgcacccgagtctcaccaacctctttcagtttcttctccaatcaatccaacttgaacccagcttttgtcaaacaaattagtgtagaatacgcgttggcaagatcatcaatggagagttcctcaggggactgacagtgacacagaatctcagtcaagcttagtagactattcaaggatgttgttctcagatgtgggttctttggacggaatttcgatgcaatgtctgggtgcttttcaaacaaactcttcacagattctacctacaagtgaaaaatggacgaataaagtaaaactatatcagataggagttcttggtgacctgaaaacaaatccaaaaaccatatatgcagcttgaatagtgagcaactcgtacgatatggatttaaaaattcattttatacctgtgaaggaagaacttgaaacccattgacatcgatgctttccatcactaatgaagtttccactaacacatctgatttgcgaacaacttcaagaacaccaacctcggcaacaatcttgacttctccattcaccataaacccgccatttacgtcaagaagttcgttaaggggaagcattgatcggaaaccacagctgggaagcttctgatcaaaccagggttgccctactataaggtcataatcaacatactaactgctaatcatattgcttaatcgtccatgttatcctcttttcatattgcttctccattgatcttgatgagagactactcacaaccaaactaccagaacacagtgaaaaaatgaagaacaagagttttgctgaataaatccttttattgatttcactcgattgaaatacagaggatacatggtgcttatactaatactacttcaagaacattctggaacctttcctcctaatgatgggatctgtttacacttgtcttgcatctagccactatcttctgaagggatatgatcaaaccggtttgatagtacgatcgtcggagagccagctggcattggtatcttgacgctctccatatttttgtctctttgtgttgcgcagaggagttagctctcttctttttgctcctttgtcgtttgtgtttgtgagaacaactttccacattatatgggccattaacatactaagcccacttaacaattgtttttggtgatttagctaaaagatggaacaaacaaagaagaagaggaagaagcaagtgagcaaggaaggacaagaaaagaacaaagttgtgttgtgttggttaatggctagctaaacaaagttaatggctaagtcaagaagcaatgagtcccttagtttaactatcgaaataagaaagagtgtcttgatggttaatgtctagctaaacaaagtgttaaaagttgttggtgttaaaagtgatgtctagtagtagtagttgagctagagtcttaagtgtgtatgtgcgtgtgtattaagtagaagaaaattctataagtatgtttgtatgatgttatgtaaaaatcatccaagtgatcaatattaaaatgtagcctttatgttccatacgttttttgtgcttcatcaaacaagtagacacaaaacataatgttaggtgatttctgtactttatttgacatgattgtttgattactaattatccgctgcataaacatatcattactgtctcaaatcatcttcatatgcatcatcagcatgaattgaagtactcatttgtgtgctaaccaactgtcacagttcagatttaaggacactaacacgttttttttattacacaagtctcttgatcttctactcaaagattaagaggacattgttctcaaaactaaaacgaaagagaaacatcccagaacaccaattagatccaaagctttaacagactataatctactcaagtcatcctcatcgtcagaaacccagcagatattttgtaaaaacaacagtcaaacaacaaatttaaggacaaaactatataaaaaagcttgatatgactctttattgataagggcacatacgtatcatcagcactgattgagacaggaaagacatttttaaattccttttccatcaagaaacagtgtgaaaataaagaaaattagggcaacataaataacaagtctcttttacttatccaagattaagaggattctattccaaaactaaaacgaaaacaaaagagaccaaaacaccattcatagcaactcaagtcatcaaacaacattcatagtaagaactccagaagagcctccatgtctacacacttatgcttcatctctacgcacttttgctttatgtctttcaactcttcctcaatttcttgaatacgagtctcaccaacatctttcaggtccttctccaaccaatctaacttaaacccggcttttgtcacataagagagcgtagaatatgcgttggccaaatcatcattggaaatgttctcaggggactggctcagaatctcagtcaaggttagtaggctattcaagtatgttattctcatatgtgggttcttcagatggagttttgattcgatatctgggtgcttttcaaacagactcttcacaaattctacctgaaaatatcgtatatataaagtaagcatatcagatagcaacttttggtgacctgaaaacagatccaccaaccatagtgagcggctcttaggatatgtatttaagaatgatttctcttacctgtgaaggaagaacttgaaacccattgacatacatgctttccatcactaatgaagtttcctctaacacatctgatttgccaacaacttcaagaacaccaacctcagcaacaatcttgacttctccattcaccataaacccaccatttttgtcaagaagtttggtaaggggaaccattgctagggaaccccggttgggatactgctgatcaaaccagggttgtcctactgttttgtcacaaaacatactaactacttcagtcaaaacaagaatttcacaacacatacattgaatctcactgcaacacgtcctacgtcctataagtccatgacaagtggaaccataaagtgttttcctttgtctgccttagaaacataatcaagcaaatgtagaaagaatcacctatctttttggagagtttctccgaagtttgattaacaacagttaggcgatactttgtgtgtcttttccatccatcaggcaaagatttggaatcagcaacatcaagaaacagagacaaacttttagtttcatgatccacacatcccttgggataggccagaagacgcgtgcgagtaaaaacccaaaaccagtaaagcaaaggaacaatatcacgtaaacctaaaataaacgaaacgttggagaacacgttttcttaccatttggagtcaccaactacgaaattatcagaataaatagaatcaaaatcggattagtttcggttaaattatgggtaagtcaaaccggatgtataattatcggttaactggtcggttcaattggaggcgtagttttaagaacaaatccgaaagtacatgtagttttatcgagattaaaattgtttgggattgtgacacgtttagacactttttgataatattattacttttaagacacttatgagggagtggtcactttgccatctttttgagagataattggaccaatttacccctgaagtagtgattacgcaataattttaaactcattattgttgagatcgtttgggtgagaaattatcctctttttatcatctctcttccatattcttttttttccatcattttcagttctctctttcaaaatcaatgtcgttctctataattcttacaaaatcatggtcgttcccattaactttctctcctttccataagaagtcaccaatcttcattatatcatgtataatctcctcataaactttcgatttatcgtctcctcataatctcttcaagaagttcggtaaggggaagcattgctggtgaaccccagtagcgagacttctgatcaaaccagcatggtgttactactgtaaagtcacgaaacataaaacttaagtcaaaacaagaattgcacaactcataaggacttaagtttttagtcctatgagtccatgaaaagtagaaccataaaatatgtactttcctttgactaaaagtgagaaaagtgtctaatgcttctgagttctaaaattcgttatcaactcttttaaagttttttcctcagatttcgttcctgttttttctttccccaagtctaataaaataccacttattcacatcaataatgttaggttattaatgtattaggcgatttgtgtagtttaatcaaagaaaacgtagaacaacagacttctttatctattttgttcagttctctttggcttgctcaatctatcttcaactttagcatatgaagtattgaatgcacgactaatatatagcatgaaaaaatgcagcatcggctcttcataacacacatgttaaacttgcacgtgaaattgctctatgtaattatacaaaaacacaaattattttatgagtctctcaaagtcctaaaaccacccaacacaaatagaagcaataatgtgtcctgtagtttctccacaaggccaggtcattgtgtttgcttccttatagagaagaattactgattatttctgtataagcatcactactgtctcgtatcatcttcgcatcatcaacataagttaatttgactacctttgtgtgccagtggtcacagcagtttagaatgaagaataccaacaacatttatttaactaattccatcaagaaacaaactaaagtgcaataaaaaagacgtagggaaacctcaatgacaacacaagtctcttgatcttctactcgaagattaaaggacattgttctcaaaaccaaaacgaaaaacaaacagaccagaacaccaattagatataaactcttaacggactaaagtcgattcaagtcatcctcatcgtcagaactccagctaaaacttttccttcaagtccgtcaagtccttccactcttcatcaatttcttgcacccgagcctcacaaacctctttcagtttcttctccagccaatccaacttaaaccccgcttttttcaaacaagttagtgtagaatacgcgttagccatatcaccagtggagagttcctcagaggactcgcacaggatctcagtcaaacatagtaggtcattcaagtatgttgttctcataagtgggttcttggaacgaaattctgatacgatgtctgggtgcttctcaaagagattgttcacagattctacctgcaagggaaacatggacgaaccttctcagatagcattttttcgagacctgaaccatacccacaaaccaaatatgcagcttgtacaagaaagtaaagttatatagttacaggtacttttcttacctgtgaaggaagaacttgaaacccattgatatcgatgctttcatgaactaataaagtttcctctaacacatctgatttgccaacgacttcaagaacacctacctcgacaacaatcttgacatcaccattcaccagaaacccaccatttttgtcaagaagtttggaaaggggaagcattgtttggaaaccagagatatgaaagtttttataaaaccagccttgtattactgtaaagtcacgaaacatagaactttagtcaaaaccagtttgcacaacgcatacatagaatctcactatacaacacaagtcccatatgagtccatgacaagctgaaccataaaatatgcactttcttttgtccaccttggaaacataaactagcaaatgtagaaagaatcaccttcctgttcggaaagtttctccgacatttgattaacaacagttaagcgatatttgatgtgtcttttccaaccattaggcaaagattggaaatccgcaacattcagatacagtgacaaacatttattagtactttcaccatttcccttgggataggccacaagatgcctgcaaccataaaccaaaaaccaataagcaaagggtgatgtcaggtaaacctaaaatgaaatgtaaacttacaaaacattagagaacaagtttttaccatttggagtcaccaactacgaaaatatcagaatcaattgcttgagattgcacaaaggagaaattcttaatcgtccatgttatcttcttttcatattgatcttccattgttcttgatgaagactcctcacaagtcacaaccaaacgtccagaaaataatcctaagaaaagaactagaagaagatgaaaagagaataaatccgagaaccgagtggcatgtacaaaactttataatatcacacaacaacttttataagtagagtcacttcactgtcaaataggtttgaatgtgaatcgtgttgattacgaaaacttgagaattgtgaaaacgcttcggctcctgatagctcattggtgggctaatagtcccaagtaaatcattttcaaaaacacttgactttcaccaacaaaacattcactaacaccgttttagatgacttatactgagagattgttaagtgatgcgagttccgacgttctaaatgttttctccccaaatttccttcctttatttttttaaaccaaatctgataaaattatgttattaacctcatagatcacataatcaggctaatggccaatacatttaataacgttgggcgatttatttactttaaattctacaaatgtttcaccttctttattccttttgtcatttctctttggtttgactttggcatctaaagtgttgaaactaacgactaactagtaacataagcaaatgcgatcagcctcttgttcttcatgacatgatattttgttataaagtgagagaaaacttgtatgtcaaatttgggaataatcactgtaacatagacatacgttttgcaacaggaataaagtcgctgctacacccaacagtgacccaagattaagaggacaaagttctcagaactaaaacgaaaaacaaacagaccagacaccaattagatccaaacagctaagtcttaacagatcgactcaggtcatcctcatcgtcagaactccagcataaactctccttcaagtccttcaaattttgttcaagttgttgcatccgagtcttaccaacctctttcagtttcttttccaaccaatccaacttaaaaccggcttttgtcacacaagttagagtacagtgcgcattggcgagatcaacattggagagtttatgaggggactggcacagaagctcagtcaagcatagtaggctattcaagtatgtagttcttagatgagtgttttccagacggaagtttgatgcaatgtctgggtgatttttgaagagattgttcacagattctacctgcaagtgaaacatggactaataagtagtttaaccatatcagataggagtttttcgagacctgaaaacatacacactaaaccatatatgcagcttgtgcaaggaagtggattatatagttacaagtacttttcttacctgtgaaggaagaacttgaaacccattgacattgatgcctccattaactaacaaagtttcctctaacacatctgacttgccaacaacttcaagaacaccaacctcggcaacaatcttgacttggccactaaccaaaaacccaccataaagttctgtaagtggaagcattacttgggaaccgaaggtaagagacctcgggtaaaacccgccccgtgctactgtaaagtcacgaaacttagaaatttagttaaaacaaggattgcacaacacatacataggatctcactacaacacaagtcctatgagtccatgacaagtagaaccataaaatattgactttcctttgtccgcctaaattagaaacataatctaccaaaggtagaaaaaagttgaaaaactcaccttcctgtttggagagtttctccgacatttgattaacaacagtaagacgatatatgatgtgtcttttccaaccagaaggcaaatcatcaggatcaggaacaccaagaaacagagacaaacatttattaatgctatcaccatatcccttgggataggccagaagatgcctacaagcataaaccaaaaaccaataagcaaagggtaatatcaagtaaacctaaaatgaaacgcaaacattagcaaacataagagaacaagtttttaccatttggtgtccccaactacaaaaatatcaaaataaattgcatgagattgcaaagaggagaaattcttaatcgtccatgttatcctcttttcatattggtctgccattgatcttaatgaagtctccttgcaaccaaaccaaaacagaaataccagaggatgaagagagactaaatcctagaaccgagtgtcacactaccatacttgatagagaaaattatcacacaacaacttttataagtaaacagaatcgagaaaacgcagagtcactcactttaaaagcatataatacgtgtttgaatgtgactcgcgttgattacgaaaacttgaggaatgtgaaaacgcttcggctcttcatagctcattgttgggctgatagtcccaagaaaaagaacatttaactttcccttgttcattttcaaaacaaagcattcattaacaccgttttacatgatatttacctcttagatggccaataaattaaataatgttaggttatattaggcgttttgtgtagtttaatttaatttatacacttgttttggcatctatagtgtttgaactaacgactaactagtaacatgagcaaaggcgatcagcctctggctcttcatgacatgatactctgttataaggagatagaaaaccccttatgttaaccaacatgaagttgctctatgtaatcatacaaatgattccatttccacttttgtccgtctctcaaatgttcttattcatctcggagtcaagctttgccctaaatcctcgaaccttaattgaaacaatgtcctttagtttctccacaaggccaggtctttggctttgcttccttacagtttcaatcagaagccgatattccgatagcgtagcctctggtaaaggttccaagaactcacacttagacaagatctccggaggaggaacacctgtgaccaggtttgtgtccagttttgttctgtctttctttgttttttcgggttctgtaaccagaggaccatcaagagctgaaggagatgcaccaggaattacttcccgtgtgaatggtaacgatcttgcaggttgcaagcagaattctatccactggttgattaatggagatgggcctcggactcgtcctcctctttgttctgcttctttaccagagtcagaaacagccgggatcgccttgaaaaacaattatgcttcacggtttagtgtccagatatgttatatcgtctttagaacaagaagcattcaagatatcagatgaagggttaagtgattttacgacggtaacttacccatagatcagcccataaggtggcaccggatttgggaacaatcactgtaacattagacatacgttttgcgacagggataacatcgctgctccaaccaacagtgacccagacatctccgacattgaaagcttttaaatagttgttactatcaaatagtctaatctataagcaaaaggggaaacaagatcagccaccattgtcattttttctcaataactatagaggttgagtgaaacacgtcagcctaaactcatctgttctctttagggtatggagagatagtaaagaggtaataacctgtttcatgagtgatgccagatttttctccactgctaatcttccgccaggaacttgtgaatccaggtctgtcgtattgtatgatgctctcatgtatttgagaacagcaccaacaacctctctaggagaattcaccattgcgatccttcctgcaagctcgggtcgccacagatcagcccagtcctaaattcagcaaaatgttcagtgatattcacttcttttaaataggaaaacactaagacagcatttagcaacaacaaagtataccaacctctatcggtgccaatttataattctgaaatttgctctttttgtatgctataaccatggtgccccagcggtatggcacagcccacgtttcaccgtcaggagctttttctcccgcatagttcctgcggagataaatctgagactttctaagtcatgaaatgaaccctatgaacattcccaagctagcagagtacgaaaacaaaacacatgaaagattatgcctattaaaatctctcaagctagtgttctttcaaaaagactcatattcatattgttaaaccactgatttaaattctcaccttccatttatcactcaagcctttataccagtcttgatcttctatccctttcattggctcaattagcttttccttaatagcaaaactaagccaagaatcaccaatgctgatcatatcagctgctgcagttgaagcagcccccttttttccattcttacttggtttcgatagatcgaaaaagatctcttcaagatttcctcgaaactgagtctttaacctcactctcttcccttgtgagctcataaactcctaaattccattcacagaatccaacaacatacattttcaactataagcttaagattcaaaatagaaatggaaacacagacaagtgaaactaaaaccttgatccatgatggtggcactgagccacgcaaggcaacgagttttagcgggacagtaagagaatacactttagacttgtacgcttcgaaatcagcttccagtttttcttcatcttcaacttcatttagattctcttcacctgcaaaaacattccattggaacacaaaattcaaatccatcgaaatcccaagagtgacgaaaatgttcaatttcacgcaccagctacagtttctgtgttgatttcattctctgtaacgacaatcggcggtggtagtattcgagcggaggccggagaacagacgcggaggctacttaaaccgatgaacaacacggtcgaggcagagagaccaacgatcctctcatgaaaccgttcgtctcgagaaactcgtgcaatggtgattccccttcctccgtcgcgtcggtttcctccgcagtagaagctcgccggcggtttcacggaaataatcgccgccgtagccatcgatataacgcgatggtgaaacaacggacaacaatggcttctaatctcaaaccggttcaatcaaaccgctgggcttataccgtaatgggccttaaaaatgggcccaatgatttcgaccattgtagagattaggcttagctaaggtctagctggcaataataattgggttttatgaagaaagcgtcggttgacacgtgtgggaggtcaagatcggcacgtgcgagacccacttcgtttcttctcattggtcgtatgctttggagaagaaagcatcttcttcttcttcacacactctctctctctcactctagttttctctctcttcactcttaccataaatcacacaaacaaaataaaaagtcgattccttttttgttttttttatcttctccttaagttatatttttttttttttgctttacagctcaaattagtcatcttcttcttcctctgtctcaattcttcctcctctcggatccatttttagaggttcttataattcttactaattctgtttgcttttaaagctataacctttgatattgttggaaagagtggggttttgggtcttttgctgaatcgttttttggatttgttatattgttcgaatcttcagttgttattgtgttataggattggatggtatctgggaatttcgtaatctatgttaagctagagctgtttttgagctcttttgttgatgatgattttgagattgttggccgaatttagctctcgttttctgattttagcaattggaaagtgtgtattggttcttgtgaggcaatttcactgttttgagtactcaaaatgtagatgagagcatgcataagttgtgtggagactgagcttaatgtgtagtgtaattgacaattagttttgtgggctttcctttgtttttcaggagtctagtttcttacttgaacatagacatggaatcaactaataactgacaaccaagaggctgttcttttcaaatgattggtagtagttatattatgcttggacagtgccatgatgggcatctgtgagatgaaaagctgctgctcatggcttcttttgatctcgttgctttgctcactatctaatgaaagtcaagcgattagtcctgacggtacgtcgatatgaatcaactattactattcatagcgtcctggaccttttattgagctttaatcctttattgcttgtttccattcttcaggcgaggcgcttctgagcttcagaaatgcagttactagatcagatagtttcatccatcagtggagaccggaagatccagatccatgtaactggaacggagtgacatgtgatgcaaaaacgaaaagagttataaccttgtaagttttcaaacttgtcaaggtttactggttttctcttcagtatttgtgctccctaatactcttgtttcgcaggaatcttacttatcacaaaataatgggacctttacctcctgatattggaaagttggaccatttaaggcttttgtatgtgctctctagccttattcatttttattgcttaagagagtacttcgattctgatcatctgtgtgtcattgcagaatgcttcacaacaatgctttatatggagcaatacctacagcattgggaaattgcacagcattggaggaaatgtaagcgcttttccaggattttatactgattccacatggtttctgagagaccaattccagttgcttatggtcatcaaaattgtccaactggttttgcagtcacttgcagagtaactacttcactggaccaatcccagctgaaatgggagacctgcctggccttcaaaagctgtatgtttttttctcttccctatacgtacttgcaagtgcatccttcttttagtgtatgcaatatctatttgttttttgttttcatttacttctatcaccatctaggatcatggtaacatatggttgactgcataatgtcttctcatgcacattatattcagaactagttatacctaaactcttggtgagcaatttgaaaagcatgataatgtattgtttacttcagattcacatattgattgttctcttttctctactaaaactgacttttgacttttttattttattttcaagggacatgtcaagcaacactctcagtggacctatccctgcttcgcttgggcagttaaaaaagcttagtaacttgtgagcaccttaatctctaacttccgctgtaatttatcatattgcagtcctgtgaatctttctgtttcgtttgtcttatgaagcaatgtctcgaacaacttcctggtggggcaaataccttcagacggagtgctctctggattttctaagaactcgtaagacaataaacacccttttcttcttgtagggatagaaaaataaagcctctaaagttacattttttttttttttttgtcaatcctctaaagttacatttatacagctgatctttcatatttcgcttatattcgagatgattttttgaaccacataactatttagctagattgtatcagtgcgactgaaattatatgattctcaaactgatgcgttactactacagcttcattggaaatcttaacttgtgtggaaagcatgttgatgtcgtgtgccaagatgatagtggaaacccttcatcacattctcaatcaggtaaaagcaattatgaatttcttgtgatatacaggttttgttgtggctctctatcagtaaagttatatttatttggtgtcttatactttataggtcaaaatcaaaagaaaaactctggtaagctgctgattagcgcatcagcaactgtaggtgcgctactcctagttgcactcatgtgtttctggggatgctttctatataaaaagctcggtaaagtcgagattaaaagccttgcaaaggatgttggtggaggtgagccgtattgattttttttgtacagatattatctcgttaaatattgggaaatttcatatttttctctatctcctaaatcttcattgtgactttttcaattcaggtgcgtctattgtgatgttccacggagatttaccttactcttccaaagatatcattaagaagctggaaatgttgaatgaagagcacataattggatgtggaggctttggaacggtgtataagctggccatggatgatggcaaagtctttgcattgaagagaattctaaagttaaacgaagggtttgatcggttttttgagcgggagcttgagattcttgggagcatcaaacaccgatacctcgtgaatctacgtggatattgcaattcaccaacatcaaagctactgttatatgattacttgcccggtggtagccttgatgaagcacttcatggtatgatcaatctgctctttatggctctcttccatattatgaatgattcactgagaagtttggttcttgaattagtagagagaggcgagcaattggactgggattcacgcgtaaatatcatcataggagctgcgaaagggttatcatatttgcatcatgattgttctcctcggattatacatcgtgatataaagtcgagcaacattttgcttgatggcaatctcgaggcacgggtatcggattttggtctagccaagttgttggaagacgaagaatctcatatcacaaccattgttgcaggcacatttgggtacctagctccaggtacatatgccttttaaaagtctttacttacataaagatttgatctttcaaatgctgagacttttccatttgacagaatatatgcaaagtggtagagcaactgagaaaaccgatgtatacagttttggggttttggttcttgaagtcttgagtgggaaaagaccaaccgatgcttccttcatcgagaaaggccttaacgttgttggttgggtatgcaaataagattctttttcaatactgatattttgttacgacaaacttgactaaaaaagcttttgactcatgatttacagctaaagttcttaatcagcgaaaaacggccaagggatattgttgatccaaactgtgaaggaatgcagatggagagccttgacgctctactatcaatagcaacacagtgtgtgtctccgagtccagaagagcgtccaacgatgcatcgggttgtccagttacttgaatcagaggtcatgactccttgtcccagcgaattttatgattccagctctgattaattgcataaacccaccagtcgaaacctcgagaaaaaaagtaaaccgagtccggtttcccggggaaagccttcaaatgctattcgatttccgtttttgctccccgagaaaacctgcaaataccaacgaagagccataattttccagttaatggaacagagtctttgtgttgtgttgccatttactttgcccctccagttttaccagattcgagccattcattttcagccctttctctttttgttctgatttttggtataaaaacttttatttgaacatgaaattgaattgtatagttgtgacctttgtagaaaaactactctctgcctttatgttcttttgaaataatccatgttccttcatcttcttcttcttcagtctcaatcaatcctgattcagttacagagaagctgatatcgattcaaaaccaacatcgattcaaaaccggttcattagcagggaaacaaatgttaatgataagggaagtagttagagaatgtacaagaaagtttcagctatcaatttctttatgttccaaatccaacatcaaatttgtcgtttgatgcagcattgagttgatctcatccatttttgggtgtgataatagatcatctccaacaataaactcatgaccaaccccatcaatctcgatggagctgcaaccaggaaactttctgattcccaaatctttcattttccttctcacattagttacatcttcccatctattagcagatgcatatacacttgcaagcagagtatgagcactggaatcacttacttccactttctcaagcttttccgctacccgttctgctatttttacattcccatagttcctagcagcactaagtaaagaacagtatacaggaactagagtttcatcgctttcaccacgcatcttatctatcaattcctctgcttcatctaacaaaccagctctgcatagtaggtcaatcagacagctgcagtgctctgatttaggctggacgttatgtctttcggtcatcgaatggaaaatcttacggccttctgctacaaatccaccatgattgcaagctgttaaaaccgcgacaaatgttatagcgtctagtctaacaccaacattttccatttcgtaatacaagtccagcgctcttcctgacatcccgttcatcgcaagaccgtagataagtgatgtccacgaagctgtgtctctctcctttatttcatagaaaacctctagagctgtctcaatgcatccacattttgcatacatgtctacaagagcagtaccaactactttatctactgtaaccctgttctcatttatgtacccatgaatccattttccttgctctaaagctcccgtttgcgcgcaacctgtcaagagagagactagcacgaaattatccggcctaattcccgcagtttgcatgcacctgaacagttccaatgcctcatcaaaccggttaaactgaacatacccattcatcatagctgtccacaaaacaacatcctttacaggacttctctcaaacaaaactctagcctcatcaatcctaccagtactaacatacccaaaaaccatactagtccaacacttaacattcttgtctctcatcgaatcgaaaaccgctctagccttatcgagacacccacatttacagaacatatccaccaacgcattcccaatcctaacactcatttcaaattctgtaacaacaaacctataaatcctttcaccaatttcaagattcttcaaagccgaacaagccgaaagagtgctcacaattgtaccttcatcaaacttcaaattgctctcctgactcatccgcttaaacacaccaatggcatcctcaaacctcccattaccaacataactagaaatcaacccattccaagaaacaacatctcgttgaggcatttcatcgaacactttatgtgtgatctctatcttacccaatgaagcatacattcccatgagtgaattagatacataagaatcgaactcaagcccagctttcacagcataaccatgaaccttctcaccttctataaccttcctcaaacgaccaattgactttagaacaaccggtaacgtgaaattatcaggatacaatccttgtcctcgcaattcaccgaacaaagccaaaactttcgtgaaacttttaccatcagcaagagatttgagcatcttattgtacataagaagtgatggagtttgtaacaaactcatgttcatgtctctttaggggatgatatgagataatgagaatgtaaagttgtgaactttgtagagaaagagagtcttattattcaaagttccatcctttattttttaaaaatcaaattttactgaaaaagaaaagatcattatcattatcagagtaaattacagaagaaacagaggattgtatctaacaaaagataaaacaggattctcacaactgcgtaaagaaatgattcaagagtctagagttagactcatgttgatacataagaaaaaaggaagaaaacacacaaatcattactcttacaagatcatatttactcgtcgaaaacatatctttacttacgatgataggtaagaaggaagagaaacacaatcatatcttacacatactttttggtatgtatatgttaaagaaagggcatcactgttgcttggagtttgattccacgatcttgcttgccggagctttctcttgtttctctacgtacgcagacggaaaccatccagctttgcctttgtattctccttctgaccagcctgtaccagccacctgaatttgtttcatcaaacagaacaagattgttaaatcattttttttcactgttttgtatgtattgttgaaagggtgtggcaggaaatacctgtcgcacaattacataatcatcgacagcgagactgagttcccctggggcttgagcatcaaacgggtgcacaacctgttgaaacaagaaaacattaactcttgttcctcaggatttgtataatcacactctaaccaagttaagtattttgaaaggtattacctttgcaagaaagtaggaatcattctggctgagaagttgatgattgtgatgatcatcagacccattggacttcttgatctcttcctgtggactagacttaatttctttctgatgattggatttggtttcttcttgtggactggacttcatttcgtccttgggactaggtttggttacttcttggggattagacttgatttcttctcgacgacttgctttgatctttcccaagggatttgatttgatctctcctgaggaatttgaattcggttcttgttggggaagagaagcactatcctctatatgtaaaggtagtgactttggtgatgatcctatagcttcttcctcagcaatcatctgaataagaagaaggcaaccagctcacgtaactaagtgtatgtagtcattatctgaagtatataaatagagaaagttactgacctcggaatgtagcttgtcgaggatatcaagagcattacgatgatatgatctttcagcttcaacctgcgttggtaatttcatttcatatccaatccagggacatgtaaacaatcatgagctttgaaaggagatttaccagagcacggaggcgctgagaagttacgttctgctgctgatcgtcgacttccaacatggccttagtagcttctttaccaagagttttcatacttgatttgagctcagccaatctcgattcagaattcttaagttttatgtaggcttcttcagaaatatcagattccttcaactttgatcttctcctcagtacatcagttgcctgttaatcgaaagctttaaatgccgcaagaaattcaaggtgcctcaaaacaaacaaaagagaagttcaacaagactttacctgagcttcgacttcttgtctcagcctgtcatagtgattcaccaaatgccgagcatcctccaaaggcgcactatatatcattgtacgaattggctcacaaacctacacaaatcaaattactgtaactacactcacaaagttctcttgacagaccctgcccggtaaagattagagaataatatataaacgttccaagaaatttacctgctcactaagaactccgaggagagtttccctctcgccttccaccgacttgtaagaggtcccaaagtgatgtgcgactcttgatagaggagtattagcatcaggattctcatctccatatttcttgaaatcttcagcaaacttcaaccctatggacatacaccattacaaatgtgattccaagaagcactatatgagatgaagtaggaaacaagaacatacctatctcaacaacctttgtgccagtcgcaatgaaaccttcgagtccacgaacaatgttcctttgcaaacgctatgaacagaacaactttgataagccaaaactaaagagattattatccgagaaagcctcaacaaaaaacctaaaatatctttaccttagcagctttagtagagctataaagatcttgaagtttctgatgacaatgaagctcttcttcatcaacaacaacagcatcagcattaacatgccctaaatgcttcaaaaccgcctgcacaaaaaccagattatttttttaatacaaataaagaaacctacacaaataacacaatcttgtctgatattattagaaggtaatctaaacctaaaatcaaaacaaaaaaggcaaaatctatgtctaaaacaagaaaaaagtcccatacttttcacctaactataaccaattcatacctcaacaatcctatctacccccaagactataaattaaccatcaaccacttcaaagattccacctttattagaaatccatacaacaaattcttctcagtaaccagacatataaatctaagaacacagaaatctattacaagcagaaagaaacccacttgctgttgcctcgcgacttgctctctgagcttcgcagcttgctttcttatagcttccatggctttcaccaaaaacaaatcagactcaagtcggtttcttcagtaccaaaccaatagatcgagaggtttcgccaaaagggtagttgaaattacttaattagaagaagcagagagattaaaggttgagtttttttgcaatagatctttaactctcttctttacaggtaaggtaacagtctgagaaacaaaaaggtaacgacaatggaatgaattagtggagaaagttgaagaagctaactcctttggtttcaacactttctttttgagtggtcttcaattttgtacttctttaactttatttttatttttaatgatgtttcatttttatatttttccttaatcgtctttaattaacgaaagcttattattctgtctattttaatggcaattatttattggaccgcatgtcaaaaaatattattatcttcatttctttgtttatttggcgaatatcgttttcaacatgaggttatcatataactttcataacaataaaataaatttaagacttatataattagtcaattgctgtcaaaataaattaaaatactagtcaatttcttcggtcacttttttggactgtaactgatatggttagggccgggcaaaatattcgttcgatccgcttcgattcggtatttgatttgatttgattcgaaaaatccaaatatccgtaagattttggaccaaaacaaataggaaaatgtagtattcgtaaaaaccgaatcaaataacgaatattgttttttaaaaaatcgaatatccacttcgatccgtatctttttatatatattaaaaatatagttatatctatatatagatatcataaatagtttgtgtattgttgccattttatgtttttatgttaagatatttgtttgttcatttttttttcatgttatgttttgatcaatggcatcaaaaactataggttttagtttttggaattagtttgataacattttgctgaccgatgataccaacaacggttgtgtttggtatttaaaacttattttgaaagcatgtttaataaaaactttgaatatctgatatggttatatagtatacaaattttttttaatatttaaatgtatcaaagcggatatccgcaaatatcacaaaaaattccggatattcgaaattccggatatccggaaattttcgaagcaaagcaaatcacaaaatcaagtattcgttaaaacgaatcgaataacaaatatcacaatttttccggatatctgcttcgtgcctagacctaaatatggctatttgattttaggaagaaatttaatttagtaagtagagatattatttatactgaatattcattacattgcaataattatgaatatcagataataaaaacgctagctcttaacggcaacgtttgcttcataagttcccggagcaatccatgcgttgaaacgataccgttttggtctccaagtcatagccaacaaggaaatccatttgaaccatgtttccgtatatagcaacttcagttgtcggaatcatactcaagcacactgtatcttcatttagtttcacgaacgcgtttatcggactcagcttcacgtcggcgttcgtgaaatgcattgttatcgccggcaaaccgatctctttgtctccggatttgaaacaatgtgttaaaagcccttgtggatcactcacacgctttgctccggttactgattcttccacggccgtaccaaagtcatcgtaaaatcctgagtcgagaagggtaagggttgtaccggaatcgattatgatgtttccggttctctttgatgatttcccgtttaatccgtatcctcctccggtgtatggaagcttggttttgccgacggtgactgcttcgagtgtcaagaaatagtaagtctcggggtctttttggattaagggtgtagtgagcgtagcggagtctttgcttggattggaaggtatcgagttggttcctaggtttatgacgcttgtgccgtttgttgtagctgccgtgtgtgacaagcaatacgagaatttcttccctatggaagaaccaagctgggaaactaacgataatggaccacctccgagtccgatgattccggatccggtttcttcgaatgtaccaccgttgttgtagccgcaaccaaagacagtaccggggaaagaaacagaggagccagaggaagaatcaatggagattgtttcggtcgcaacatctcctttggtaaacgaattatctccataagagtaacggtatttgcagatgtctttagattcgtcgcatccttcttcgtgttcggacaaggcttgacaggtttttgaatcgcaagattctgttttgtaggtggaagatttcttcttgtcgaagagtggactgttttgtttgtaacattgttgacatggcttacattggacccaagttaggtcacttcccgtgtcagcaatggcgaaaactttcgacggtggagtaccgattgagatggacatgaagtattcgccgccatttgagattaaaccggattggagatcggttttggttgtgaaacggcgagaacgtgagattgatcggaggaaagcagcgttgagacggtcagagacagtgtggtgagggttgtagagtggagaatgaggagagtcacggtggattagctcgacggttaagttctctcggttagctgaagaattggaagcaaagaagaagctgatggctaagagagaacagtagagaaaagttttggttgccatttttggatgatttggtaagtttgtggtgtagacttgtagtgagtctgtgagtgaaagagtgcaagggtttataaacagcatgaaagggaacttgaaaagattgaaacggcaacgagtttggcgacgtggtgagaatgtgattgatagattagctttaaatttcattaagactgctaagttattgagaggtttagtggagatgattattgatttatttttaaagaaaaaaacagagtcgtagcattaatcttgtgaattggatcgttctgattttacaaagtgtaacgtaaattataaattttcaacaaattcttaggaaagacttggaattgaaataattaagcttaacaaaaatataatactacttagttatgatttatttatatttctggttacatttatatatctatgaagcatttcttcaaaccggactcaaaactaaataaccaaaacaacaaaaccagataaacccaaattgcacatttcccaaatctctcaatcatcaaaatcgaatctagctgatgcatgtttcgccattttaatgatctcagctgcttctttcctcatcttctgttgttccttaagcgctttcttcaacattttcctttgatcttccactggaaacgcattcaaatcagataaaaactcatcgaaatcaacgttcctctctcgaccagaagagtaagtagcagcaccaaatgatttacagtttttgagattcttcttgttggttgttgattttttcggtgaagaacgccaaatggatccgatgagtttcgacggagataacttatcgaaccatgacgactttgatttcggtttcgatttcttttctggttctgaatctgttgatggtggtgtagctaaatcgattgacgatgatgaagatggtgatacgattcttcgtttctctttaggaagcttcttcttcgtttgttgtttcactggcgagagaattttactctcactgatgtttccagaatctgagaaatctccacttccattagagacaagctcagcttgagaactcgatttcaaatccagatcacgtttttttctcgagagattactcgaatcttcatcagataaactcacagagccagtttttttacctggatttcttcgatttcctgagaaattcacattcacgcttttggaatgtgagagaggcttctgcctattcatcgaagaagatgaagataccggttcgtgtcgtggagcagctggaagagatttgaggcgacggaagcgagattcgagatcatctggaagagtagaatcggtgaatccagaacaattgatagcagctacttgctccaaatcagaaagctccttcgcttgcgaaattagctcttccactgctgaatcgtctgtatctgaaaaatacccaaaatccgccattatcgatgagatcaagcttcttagggtttattttttgctttttggtggagacgaaagaaataagagtgagagagaaagaaaatgataaaagtcgtcacaacggctaattcatgattttgtcagttacgttggctccgattctgtgcgcgtcaattttgatgactaacccacaaaatgtgtgattaagctttaatctaattactttattaaagacaattttaatttaagattctattcatataatatgtaagcaaaaactggtgtctttctctcaataagttccactaattatcttttctgtggtttctttgtgttacagatttgatttacaatggatcaagatccttgtacgatgatgttaatgaaaccttgtcttgttcaagccggtgataaaccggtttggttcgtatgtacagtgacagacttgagacgacgccgaggatagacaagcaaccccaaaacacaaacgttttgaagtagcaatctcttccgatgcaaacgattgagtcagacactattggtgttatatcggggcttgcgttggcttcgtaaatggaggcagcgatgtaaccgtataagagtgagccgattggtatgtttgtgatgagaatgttgtggttaacacctacgctattgggtccaaagagatcagatgttatggagactgcggctgcgaatatgaaacctgaactcagaccgattaatgcggttgcggtctgcaatgctgtttgttgtgaggatgataccgctagtaaaaagaaagcgattggagttggtaagagtgcgattgcaaaccagccggttcttgttaaacgaaatctcctgcaagatccaatattcttgatgagaatatgttatttcaatttcacattaagacattccttaatctaaaatgaaacttacttgtgcataaaatctggtgcggcagagagcaatctaccgaagaaggagaatgaagagtagattgtgactagtgtagtagagttttgtcccaaagactgagcaatctgtcccaaattgttgctgtaaacaaggccaattgtgccaccacagaaatacgcaatgtagtataaccaaaactccaatctacttatgagcaatcgaaacgaatgttcatcaccgagcctcactgtgttcccttccttagcagtccccatatgttcatacccggttttgctggaaacggacgttttttggttcttgagctcatctatgttaagcataacatagccagagctttcatggtttaaacgagcgttaatgaccggaagaaagtaatcccgagcataaacgagaagaggagcacacaaggggaaaaccagaaggacgacagctccaatgaaattcaaacgcgctgatgaagtactggaactagataggagaaggtggaaactcgtaatgacagctaaaacattcaaaatggtaaacacatgggagtcatgtctgcgggaatcatagtccggagtagtatctagagacggtttagtaagaactgggtaaagagcagcaaaggaaacaacaaggggaaccagagagttcagcagaaggtatagattggacgacgacgggttaattgcattgaaagcaagggagtacaatgctgcactgattccattgaagcttaccgttaaagataaggcgagagcacgattgttcgggaaatgacgaatgcagaggatgaaacatgctgtgttgaaccaacagatacttaatccagctaacaagcagcagagaaacacctatcatgttgaaaagattcaattactaaaccaaatcaaatgcagttctctcacgattctaacaaactaatctaccaattccacattcaaatcagatccttgaagcaacaatatcttagtaaaaactaacaagaatttcgtatgaatctttcgaattcaagtagttatatatatgtaccagagaataaggcaaagtgatgatgttggtgatgactagccactgaacaccgtaaccaacaaatcccatagccgccgcagcgaaaagaacgacggagagagggaaataacctaaagcaatcccagacgaccatccaaacgctttccccaaatcagaagccacggcgaggtaatttaacctcacctgagaaattccgagaactgatttgagatgggaagagtaagctgagaaatcgaagttggttcccgtcgatgcttggatccagatcgctgccacaagaacagtccatttccgccatcgaccgaacatggtcctgagaggcggaagatgtttccggtgaaactttgtttctccgtcgtcgaaggaggctcggttaggtcggagtttatctgaaacatctctgatacgaggtctcatatacaaaggaagatgattgatgttgaccgatgcttgcaaaaaagcgtttagttgttcatctaccgcttttgatctttgttcaataaaagggattttgggtttttgatgttaatttttttattttattttaacaagtgtcgtattttaaatgttttaggtaaaaatggtttagttggtattgatttaggcaacactatttattttgctttgaagtgtagaaaacgtaaactgtcaaaataaacgtaaatgaaaacaaagaagtggtgagaattaaggaatcttgcaccttagactaagaatcaaggaccatgtcaatatcatatggtttagaccaacgaatttcttattggcaaagcatttaaatttattatagtggttaagattggtatggttatgaggatgaggtagcacaaatgatgaacttctaaattctaaccatccaaaaagaagtattttgaaggtttcaaagctacgattcttttggtaagaatctacgaaggtgaccaacaagtaagtaacatagagcctcattagatcccaaattttgtaatcctttggcttttgctataccataatcgcaagtatcttcctaaaaatcactatcggtggagtgattaagctaaaatggagctgttaatttatcattttccataattcaaaacacacatgcttgctatctttaaataacacactattgaaacaattttggtagatcaacaccaacacattttattttgacttttggcaaatttatccttcacttgtaacaacaagacaaattggttcgtttttttcgaaattatgacttggcatctacgtggcagtggtttaagtagatgacagtacacgcaaccgctgaagcaaagtttcgttgggttctcttctctcacgaatattcttcaataccaacaaaaccaattcaattcgatttcccagctgtcactcttctttttcaaacgaccttttttttttaatttgtttcttcttcttctttctaattctcctctcgcgatttagctttattcaaatcaaaaatctttaatctttctgttaaattctcgtctaaagcttcctcctttaaccccctctgtatcgtggtatgtgtttgattctttattttctctgtagggttttgttaaattttcaataattgatcgccgaacagattagaaacttgtagttgattcgaaattagacttctttgttgtttctgattaccgatttaggtttttgtgtgtttgtaagtctaaagtttgatgctttatgattttcttgatcagatggaagatagagagacacatttaggaactcgggaggttaatgaaacatctcctgatttgttaaagaacacgccttcgaacattgcgaggttggaagatgtgattgagcaatgccatggtagacaaaagtatcttgctcagactagaagtccatctgatgggagtgatgttcggtggtacttttgtaaggttcctttggctgaaaatggtgagtctaattggcttaattggttggtttgagggtttaatagagaatgcaattgtttgttttgtcgaaatgtctaatggctggattaaagatgtaatgtgttattgtcttttctgcagagttagctgcttcagtacctcgcactgacgtagtaggaaagagtgagtatttccgttttggtatgagggattctcttgcgattgaggcgtctttcttgcaggttcttcttcttcttctaagcttttgtggttttacgatgtatttgtatatctcgacaagttcttgcctcttggctgtttggttcaagatttgaatgaaactatcatatctgataatattttgggatatttgtgctatagagagaagatgagttgttgtcactctggtggaaagagtacgcagaatgcagcgaaggtccgaaactgcaagttaattctaaaaagaaatcaattgaaactccttcagaagcttccgtgtcctctagtctatatgaagttgaagaggagcgagtaggtgtacctgttaagggtgggctatatgaggtacattgtgcagatatttaaagaatgttttagaagtttcttgtaaattttacgtgttgagccagtagagtccttgtgtgcaatccatatttctgaccacggaactggaattctgcaggtggacttggtgaggaggcattgttttcccgtgtactggaatggagataatcggcgtgtgcttagaggtcactggtttgctcgtaaaggtggcctagactggcttccgattccagaaactgtttctgagcagttggaggttgcatatcgtaacaaggttagatatctttctgtggaatacaatttgaatttgtgatccccatttgcctagaactagaagtaattgatgcatttctgttaaggttcataaatccactaaagctatctcttgttacattttatctctttcttttgtatagttctatgcgtatatattgttgatgatatgacaatagcaccaattactttggacttttcaaccaggtttggcgcagaagaagttttcaaccctctgggctttttgcagctcgtattgatttgcagggttctagtctggtatgtgtttgatttcatgggaaagaactgtaattttttcgccagtataatggttgcatagataacattatctgaagtcgtatatgtagggactccatgctctctttactggggaggatgacacctgggaagcgtggcttaatgttgatccttctgggttctctggcatcgttggatatactgggaatggaattaagttgagacgtggttatgctggctcctactctccaaaacctacgcaggttttagactattctgatttattttcgtaactgtctttgactctatacttaccagtctctaatgaaaaatcgagttaacttccatttctatatttttcttattagctggttagtgttcttgtgattgaacacacatttcttgtgcatttttttaggaagaacttcgccagcaaaaggaggaagagatggatgactattgttctcaagtatgttttagtatacttttgttttccatgaatggcatttgcatatctgatctctgtcgtcttatttttaaaatatctccaaatttgaagctctctgaaactgttcttttgtgttattttttccaggtccctgttcggcatcttgtatttatggttcatggtattggccaaaaaggagaaaagtctaatcttgttgacgatgttggaaactttcgtcaaatcacggcagctttagcggaacgtcatctaacctctcatcagctcagcactcaacgagttcttttcatcccatgccaggtggctatacatgtatttttatccccttctgttttcatctctgtatagtatgatcttactttgtagattctgtctttctctattgtttttgtagtggagaaagggtctaaagctaagtggtgaagctgctgttgataaatgtactttagacggtgtacggcgtttccgagagatgctaagcgcaactgttcatgatgtgttatactacatgagccccatttattgtcaggctataattgattcggtattgatatatcccaaattttatgctctctctgtcttcttaccaaattgaaacctattcgtgattgagtttttagattttgtgacaccagaaaaccttaatagatattgttactttaattttctgtattgttataactgataatcttgtttagtatgaaaagtgaattgtgctccattttcgttttgcaggtttcaaagcaactgaatagactgtatctaaaatttttaaagcggaatccagactatgtcggaaaggtgcccatcttgttttgtcttttcattcaattgttgactggtgtaagcttgcatgaagttggaattcatggtctgttcatggacatattacagatttccatttatggacattctctggggagtgttctctcctatgacatcttatgtcatcagcacaacttgtcatccccatttccaatggattcagtatacaagaaatttttcccagatgaagaatctcctccaactccagctaaagctgacaaaccttgtagttcacatccatcatcaaattttgagccagagaaatctgaccagttgaataaccccgagaaaatcacaggtcaagataataacacgatggctaaagaaccaacagtattggagcatcacgatgtcatccaggaagatccttcattgatctctgattctgttgtggccaacgtgggtttggaaagacgaggtggccaggaagatgaccatcatgattctagtggtgctatatcctcacaggatgttccagatggagcggactgtagaacgcctgattctccatcatgttctcaagaacaatcatgggataaagaaagtgtcaactctaataatgaggagagaatcaagttgttacaagatgaggtaaatatcggcactttcaactgttcattcttggatgagatatgcagtttaggttcttgtaagctttcaactcttgtgttcatagcatctggtactttcttagttttgtgttctctgtggaagtgttgtccagtttctttactgtctgaccgaaacagagaagtagttatgtttccattgatggtagttattgttatcccaggttaactcattgaggtcaaaagtcgcacaactgctatcagagaatgccagaatattatcggatggtattgtttctgacccttgatttctatctttcccatattttgagttgtgtttgaaaacttcttttatgtacatcttagtgatgatatgaaatgatgttatcaacagaaaaagccaagacatctgtggcgcctaaggagctcaacaacgagaaggtgcaaactgaagatgccgatgcacctacaagctttactccttttatcaagtaccaaaagcttgagttcaaggtctgggattgtacaattaaaatatataaatctcattcagaaactacactgaaaaaagtcattctaactcttaactgcatattctgctcaggttgacactttctttgcagttgggtctcctcttggagtttttcttgcccttcgaaatatacgtcttgggataggtaatacttatttatgtaatttcaggattgtgaaaacaagagatccaagaattttttgtttttttcttgtatgttctttacgctgctattgaattgcttgtttacctttccttgcaaagtctctttatatgctctaaaagctgttcaatatgtgttaggtaagggaaaagattactgggaagaggagaatgctattgaagagatgccagcttgtcgtcgaatgttcaatatatttcacccctatgatcctgttgcatataggttagtcttcatggaaataaaacagcttgtagctagtttatgatatcgctgtctttgttaccttcttttgcaagtgtgtaacgccaactaaacttttgtttcacgcagagtggagccacttgtctgcaaagagtaccttcccgaacgacccgttattattccctaccacagaggaggcaagcggttgcatattggattacaggtacttgtaattttgtggtttggtgtttcgttttacttcctcttctaatttgtttgctctatgtaatgttctataggatttcagagaagattttgctgcacgttcacagagaataatgaatcattttgattcagtaagggtgtgtgttttcagacttctaattacttttatctatgttttagtgtgaccccaagttgttatcttttgtgtttcaatgtacaaaatacttacctttaaattctcatgcagacaagagttctcactatttgtcaatccaaaagtgcagataacctagacggtaaaaaagttgttacttcgcaaggtttttttctattacctctgatgtacttctaagtatacttgcatgtgtgatggaacagagatggaagaaactgatgacgaaaaggatgataggtcctatggttccttaatgatagagagattaactggaactcgagacggtcggatagatcacatgctccaggtgaagttttgatgcatttccacctaatttataacttttatgattttgttgcattcaccttttcgtttggttcttggataaaagaatcagtatgtactagatttggctaaagctctctagtttgcatataatgattgctgaaatatttgggtgatgcaggagaaaacctttgagcatccgtatctacaagcaataggagctcatacgtaagtgaaacttttcattgcttacacattacatgtaacgtttagagccaaaaactcaagactgctatatactgtgcaggaactattggagagatcaagatactgctcttttcataattaaacacttgtatcgcgagttaccagacggaccaaactcgcccacggaatccaccgaaggagatgatagtccaaaagactcaagtagacctcatagctggatagacagaagagaggctgattatgatgatgaagagcttcctttaacattctccgacaaacaaatcactagaagcttctctgcagaagccaagaaatatttgaagaagccttaagactttgaccgtaggtttatatcgtatatccggtgaaagctccctgattttgtttttgtttcctgtgcagaagtaacatctagtgtagaaaatgtgaaaagtaaaaactccgacatggttttgccacattgtaaccataattttacatataataaagcaaaacaatgaaagcttcttcctttggggttattttttcgttgttagctttgcttgttttcaggtctggagttgaagatgtttagcagacattggctgaaacaccgagtcagactctaaagctgtagcgagttcaggccacacaatagcagaaaccgaccacgagccatcattgcaggcgctaggtcgctggttcaggtaaccaactcctattttctcaaccgttgaacatacagttcctaggaaaggagcaccaaatccaaaatccaattcagccacagggaaccgtcgtcctgaagacaagaccaaagctggtccttcttgtccgagaaccacccgagccaacatcagtccaggtcggtgactctcgatccaatctatcaaatctgtgaaatgagtatcgtttgtcacttctgttatcgatttatgcactatgtttgctatatctgacacatggtttttcttcagattttcgatactggcttcacctacagctatagacaatacgtttcctatgtagctcgaggtaacggtctcaagtcttcctctaccgtcgacaagccatcccatcttgcaggttttatgaccgctctctatagaatccaccattttcttccacacataagcggagaaagcttcaatctttgtcctgctctctccgtttacagtagctagagcttgcaacgcgtctaggctcgaagcaccgatgtggtagagacgcttgatgagcgttttagacatcggtatgttcttaatgtcttcctcactgcattttatgaaagttttgtccaagtgagggtcataacgtggaggagagcgtgcccggaggaggtttctcctgtgatctggtacacaagaaaccggcttatttctcgatatctctgaccacaaagtgaggaatttcccgaaggagctcgcgtctcctaaagcatgatcaaacgtgaatgttaaagcgaggcctccacattcgaactctgtcgcttgaatctgtaaagagaaatccgggttaacctgtaccagctttgattggagaaacgcatcaagattgtaaaaatctaaactcttgagatcgacatgagctcgggcttcaacgaacaaagctccattgttgttacagatgatcataggctcttcttgtgatgtttcattgggaacaatctgacccgcgaaaggatagaagtagctgagagtttgagagagagagctttggagggatttgacgattgtttcaaaggataattgtggttgcttggggtagaagtaaaagtaggtcaccggaaaacggccggaaagaaggtcaaaatttgagagattaaggctattaactttctccggttggtcgccagaagctttgactatgaactctccggtgaaactaacatcaaagattttcattttcagtttaccagtaggtaaaaaggttctcaagggaagcttatgctaaatgatatttatttataagaacatataataagcatagaaaatataatatttttgttcggttgtttgtgattatatattcaaaggaatgatcactatccgttttgaaaaaatcttatgtttttggaacataacattacatcactgtcattttggataaaagtttgaagagtacgactttattcaataacaatggttcaaattatcggtgaaaggtgagactgtaaaagaatattcgttcgtactcaaaattatgatttattattataagttggtgcgatagtacaaactttagtggttgatagataaaacagatcaatgcttgacctaattttgttgcaactttattcaacaaattgaaacgagatcatcatatgatattaacatgtcatttcactaaatcttctattgtttttgtctagttgactacagaataatagaaccaattcttatgttattttatgagtgcaataaacaagacacattaaacaatttcttctcaagaaaattcaaatattctcagtaattcaatgcacacaacgaaaatttcgagtttattgagacaaaaatgatccaagtcctttaatactttgtgttgtgtgtgtatgattcactgcttcatgatttctacaagaaccatattcaaatgctgaaacaatggagttatgcgacaaaactttctaaagaacgaaacttcctattcccgacgaatctcaaactcagctcctataggtaaatgatcactcgggtgatgatgattcggtaagaaaccgacaacatctggagaatccggctcaggtagttgaaggatactcacaggtttaatgaagtctgaaggagagatgaagatgtagtcaagtgtgtttgtgaagccaggagtgcaatttgtgaacttaggctctcctcttgtgacttcatagacactagacagaggaactggagcttcttcttcttctatggtctctgtgggtttagcattacccgatactaggtaactataaacctggaaaacgacgacaagtatcaggattttaccaccgtaaacccaatcttttgattttgcaaatagattgaacaattagggaaactcaatgtaagaaactgaatcaaaccatatccccaggaattgaattgaagtcgccagctagtagcaatgaaggtgtgcactcaaattcatctgatattagtgttttgaactgagctagtcgtgacagtagatacttggcttgagcaagcttgacatcagccaattcagggtccctagagataagtaaacatgagatgaaagtttaaagggtggtaaaagataatcttcaatcggtgacaagtatttttaccagtaaagatgtgtgtttgccacgataacgatatgctgaaacggcttgttgatcctaaaagcagccattattccaacgcaatcacgttttagtctcactagtggatcattaaggtcacgactgtcttttcgagaatcttttgtttggggcagatttgtggaaacatgtgaagagaacatagataaaagttagtaatgatgttgagatataaagaaacagcacaaagtatttgctttcttttcctccaaaaggacaaatttatctttcgctttctcatcaccttttccttcgttggatgtctcaatcttctgttcgctgcaggaaacactatctgcttttattgagtccacaagatcattatattcgatccgttcctttgtgactaactctgcactaaatcaaaagaagagtgttgtttcaatcagattgatgtttttgcattaagttaacgtcttgtcaggcttaatgtttttatcataccagcttggcttgtagaagattgcacaaccatcacgcttcctctggccggttctctgaatataaatcccagaatatcccagagagtccatgttatttctgtaaaagctatcgtactcatctacttcctgcgagcattgcaactatataactaacaagtggagacacccttttgttaaacacaattcaaaggccctatgaacaaacaacactaacatttttacaggcctgagcttgtctaatggattgaacaaaagagaagaatgaattttgtgtttcatacgaaaagggtatctcaatactacctaaacacaaaagaagaagttttcacaagaataaagtacctgcagacaaaagaaatcagcctggagatttttgagaacgctgagaattgcatgtgaacgagctttccatctgcaacacaagaaaaggaagaccaagtcacatttactacaaaaccataaccctttaagaagcaccattccctaatattttaacaaagttaatatatcgctaaatccaaagtacatattgggtaatggataattaacgtgggtaagaccaaacacaatattgcctgcttatagctaagttcctaaacattcatagaatccattgttgttttctgaagcaaatcttgactatactccaggccattgattacacaactcacagaaagaactcttgactagtataagtaaatttgatctcgaaactgagaaatgtagagaaaaataattacttgagacaggcaggtggagagtgtgggagaagtgcactcttcacataaacctacaagaaatataaagctcaaatagataagaaactcaacaaaggaaagagctaaaagaactgtctgtatctataaatcaagctcagaaattcgtaagatcgtttaaaactacaaaattcgtccaaatattaagctacaaaatatcacaaagcatatgagagattaaaaagcttgattatttcttacctgagctaatatgttatatgaaacaagacggaatctgatacctgaaaacacaaaattctcattactagtaccaattctacttaaacttatacagttatataaagccacaagctttgataagtaaagaggaatagcaaaaaaaccatcggatttatttcttgaaccaatatcaactccttcaacagattcaaatttgcgaacttttggttcaattgcaggattcgtactcattcttctcgaaataactttcctgcagacacgagagctgttgaatcaaagggtcaggaaaaaaaacaatccttgaacatcaatatttaggtcaaaattaagaagctgatttaattccccataaaatttcaattacagcccagataaattcgagattctagaggattggttccaatataaagatgagaaatttctaaacaaattgtattcctcaacgaaattgcccaatgacaatgaacagagacgatcaatttagttgcattactaaatacgaaacttgagattacagaaaatgaaactgtatattgattgatacagaaacgaagaaacccacctgggaagaagaagattcggacgaggaagatgatgcagagttgtagaactaaacatctatagtgacaacaattgacttaacccaatttggctttagattgaagaaactcttgtgggttttcaaataaaatagtgaagaattcgataattatcatttgctccctgtctttatattaaagtagttagtgagccttcattttatttattggaactttagaaccaaaaataggtcattagtaggttcatttactttccaacaaataaaaatccaatcgaaatcaacgtcaaaatccaaaacccaaaattttcaaaaattcccaaagcacctatatatataactatataagttagtatgagtttctaaatcatttactgtcagatatttagtctataaatggttgtgtaccagactaaaatctaattaatcgatatttaactaattcaccattacggaccaatatacactattgcgaattaaaaatttccatactaacactcacttgagcataaaactttataagatgagaaattatagatatatttcccaaaaagcttcacaccaatattaatataacaaggggattgacgtaaatgacactaaaaaactttattattccaaaaaatgacaccttttttttgaaatttccaaaatagcatataaaatttttaatcctctataaattaattaaataataaagttttttttattactatttgtatcaatcccccaaataaaaatgagagcaaacattaatctaatattaaattgaatcaaaaaagtttttaataataaaaatatataccctaaattgaaaataacaaacccaaatataatactacaaactaatttggtaaaggacatactacaaactaatttggtagaggacatgcaagcaatggaaaacactaatcacagaaccgatattcgtcaacaagcacatgtctcacatgcatggtcttgaaccgatattcacagtcttcaattacgttccggccacagtttctccattgtgctcaacaatttcttgtatcggtatggatttcaacaacaaacctagtttaaattttcaggtttttaaaccgctttcatcttcggatttattggagcacaacatgtttcattgtgatggtctattgctaatggtcatgggaaccaaaattttagtttccaatccgttgttgaaagaagcaagatggatcaaatgtggctatagctttgagtttgaccattccatcgatgcatatggtcttggatacattagtaacgagtcaccaagtggttgtaatgattacaaaatggttaggtttcggtgtcctaataatttaagtgttgaaatctacgatttcaaatctgattgttggaaggttgttgttgttgataaaaccttccatgggttctttcgactaccattgtcaagtgtgtgtataggaggaactccttattggataggttataatatctacggtaccgtttcgatacaaagtttcgatttctcaaaagagagatttgagaccttgttcgagtctcttcatcactcatccatcgggatccagtggaaagattctctttctttagggattttccgtggagatcatctttctttgttacgtgaaccgcacttagcaggtaagatatactgatgaagaagcattggagtaggttaatgacagtttctatagctcaacttcccaagtttccaatatatccaagtcacttcattgagaacaatggtaagattctgctatatattcgtcactttgtaactaggtcaattagcatctacgttgtgggagagacataagaatgcccgaaagttgaatgttactcttctatggagtcttcaattggtggtcctggttgctactatatatgtcccaagcttacttccggttccaggcttttcgaggtaattaagaggaagaagaataagcgtgctccgatccattgctacgagttaaatggttatcttctttcatgtttataatggtctttactttcgaactctataaacatagtgggataacttcataagagtttgaatctggttcgaaaaaagtgggaaacaatatttatgcatacaaatatggttttttattttgattatttctatgttcatattattgcttcggcggatctgaactcaatgccaatgagcaaatgatcactcgctttcggtgtctcgtaatataagatcatgatttgatattcgaggtctttatgcatccgtggttccttattccccaagcttaatctctttattgcataaattgtatacgttctcgtcatatattctacttatttacttggtatagttatttctggatatgacaaaaagtaaactctacattaatattttggagagattttgaataagtatgggaaaatacaagagaagaatctttaacaaaaaaaaatacaagggaaggaatgttgtttaaaaagagttgtttcatagatgaaaagtgcttttctcttatcttaagaaaccatctgaattataacttctacatatataaacgccatgtatcactgctagtgaggtctccggcgtttactcggagaatggcgaggtgagcgtaaacaatgggaggtaccatcctaaaggggtatgcagcatctttgtagctatagatcatgatattgaactttgagagaatagcatccacaccagcatcttctggcttcatggacgtctgaagataagggaactcgaagacttttcttgctcgaatgtttgatgcaacatgtatactagtaaaaataataacgaaccaacccaaagtcaacaactagatcgaacatggcaaaacacgtacaaaacaaaaagtaacaaacagaggagaaacaattatgagtagagatattacctttgagctccatggagatgatcttcattaatcccaagctgctcattatggatgttcaaaatctcttcgtcaactctaaagaatggtcgccaactgtgatacgtctaatgtattttgagttggtgtgtactcaagaaatgctccatgaatgaaaccggaggctagatttcttcttcgtccttcctctcagctagcgtatcttcttggtttaatggagtcgctatgaatcaataaccatttctctctccagtgttgaagctggtcagcttcttgcatgcaagccgcaagagtcatttgtatccatcccacctgatcaatttcatcacattgcctatgtcttctttcatatctcctttaagtatttacggagagaaactcctcctctaagcattttaaagatgttggataagagaacagtcgatagatagaagaaaaggtgtgaacaaactagggttcaagaaccgttggatttttcttgtagaaaaagtaacatttgatgattcttccccaaatccatagggtttatagaatctcgagcagagaaaatgagaggttgagaagatgatcaataacttgacgagaagatattagggtttagaagcgacggaacttggtttgggcttctcgcagaagaaagaaactaatatcgttggtgagagttgtacaaggaacagagtgtgaggaggtagtgtttgcagatgatcgatcaaatgattaagaagaaagagaagaagacgaacttgaagatgatgaagtgttttcaagaatgggtatcttgaagcgcgaagccctcacactagtgttccaacggtaaatgaatgaaagtttatataatacaaaactaaataaggacccacgctatgcaacatgggaaaatatttgtagaaattttggattgctagtttacatcataaatcacagtcataatattttctatttaataagcttttgtaattttatatattaaacttattgtgtcatattccaatatgtaatcctgcaatcggatcagtaaatttgacaatccttcagtaatccatctaatgttaaaattcattggatcatatccatctatgtttttttgaaaaaaacaaaaacaaatcaaatactgaataagttttgaaaacaataataaatatccatataaaacagtatacacattcaagtattgctaaaaaaaattaaaatatatatattgtagggattgttaggtttagtagtcaatttcaaatcttcaagatttgaaaaattcttgcaaatcaagtttagtacaaaatatatgaaaattgttttctaaattattgaatgtaaaatatagtgaaaacgttttttaaaaaaaattattttgttaattgttcttaatattaactaagatatagatttggtctgatataaatattattttgatatgaaattattatcatttaagatgaagtgtgtaaaattaaaatcaagtttattatgatgatatagatgttaaattgtattgcaaaagtaaatatgtatggtggaaatttgtttttttttctaaatactaaattaaaatatataaaaatacggagttactatttataatttaaatatcatcaataaacttaagtgtataaaattaaattgtataataaaatagaatacataagcctgaaattttgtaataaaaaagaattatttaaattaaataaagaaaaattgtaaattgctattttactattccaaattcaaatattatcaataataatttacatttatatcttacacctacttatttaggtggatcttatctggtatatatattacattgtttttctcaattatatgagagaaataaaatataattattggctatatgtttcggttgatctcaaactcaacgccgatgggtaaatgatcactcggatgaatttcattgggtaagaaatcgacttcgtccggcgaatccaggagcttcacaggagaaataatttcagaatgcgtgtagaacatgtaatcgagtgtttcagcaaaccctggcacattatttgtgaaccttggctctcctttcgtaaattcatacacacttcgtagatcaatatcagacggtatattgtctgaatttatgtatttatgcacctgaggagagtaagaaagagaataaatccatgtttcttgaacaaaactacattaaccaagcatggttgaagttatacgtagggtttcgaattgaagtcaccagcaaggatcaccgatggactgcaatttgttagcgctgatataatctccttgaacgaggctaattcagtcattagagtcttgacttgagctagctttaaatcatcccatcgatcaggtttcctgagtgtaagaaagtaagaaaagtattttaatacgatcaaaaggttaaaactatgtatatcgactcagaaagcgatctagttaattaaaagtaaaatatttacccggattttaaatgagagcttgcaataataacgacatgattaaatggttttaaaatcttgaacgctaccattaccacagaaagctcttcagcgttaacaacgtcactagactcactacttacggtactactactcggcgccacgcaaaggttttcatatttggtgtatccttggattctggttgtttggtatgtaatgaactctgcactgtttaaaataaacaagaaggaaggagagactttgttaggcactttagacaataaaattgtaaactataaaactgaaattgtattcaacgtcttaaatctctatttatacaatttgggcttgaaaaagattgcgcattcatagccttctttattttcaataggaattccagagtatccttgagcttccatgtttctatcgaaaaaactatggtactcgtctacttcctgaaaatggattgattgatatatatattagaattcatattagcatacaaaatcctatttatgtgtggcacgagagaatgagagagctaaacaaacttgtagacagatgaaatcagcttcaaaattctttatattatcaagaatcgccttcgaacgtttctcccacctataccaaaaattaataacataaattgcggaggagcctacaggatagactctggaggagagacatacatgagagacgacgacgccatccgctacacaaacacaagacccttactattaagagcatgtccatcgatatgtcaaaacatatataaagtatacttgtataactaagagatttttgataatacgacaatgagggagtaagaataaactacatgagctagggtgttgtaagagacgactcgaaatctgcctgcatatttcaacacaaacaagccaatattagcctatatatgtcatagaatatttatcatataattatttgatatagtaccgttactacgatgaggcttgtgactagggacaatatcaacccacttttcggatttctcatgtttctgacataaacaatgcttccacatgccttttgtgagaaattggatctgaattgtaaagatagtatcgtaagtaattgaagagaagatgttattttcgtatatcttatatctatgtatcaatgagaatatatatatacaggaatgaaaaatcatcaattaatttaagatatcaatgctatagattttattgattttaaaatgatatttttaattgcacctgattttactaataattgacatttgccacatgtttctctctgtataaaacttgttggaaaaaagttatttctcacatggtttcctaattgatgtattacaaggttggttgaaaagctatcctagttaatgtaagattttacgtttagtttaaaccaataattatgctaagttatacaataattaaaaaaaaaaatctgtatacttttaatttttaattaaacgagatcaattatatgtagatttagactttataattaaataaaattatatgttagtttggatttataaaaaaatggttatagtttatttacaataaaatgaacttatatgtcagtttagatttataaaagactggttagggttaagatttacaagtaaactaggttagtacccatcgcatgatattcatgctttaattagtttataaattttgctactctatatattactaatatagttaatactttgtttgtctataaatatttaattgtgtaatttataaattttaaaagtttatcaatttattattggtatcatttaaacatggatactatttaatttattataaaattaatgtgtccctttgtagacgtaattaatatttagtatatgtagttgtatatatggtgtgtcggggtatagtgatattttattaacatcttattagtgtggattaatagtgtggataaatgttaacttctacaatttacaaagtataaaagtctatattaagtttgaatcgtatagtatatatagttgtatacattgtgtgttagtataacgttatgtgttagtatatacattgtgtgttagtgtatagtagaatttgtaaacatgtatattttagtaaatatttgttttacgaatcctgttctattagctgagtattcacatataatgaataaaaacaacaaacatataaattatcaaaaccaataatttaaaaccacaaattttaaaaatagaatgaacttatatgtcagtttggatttataaaatagtggttaaggttaagacttacaagtaaatgagattatttggatttataaaagaatagttagggtttagattttacaactaattcaatttattgggggtttaatgaattttgtttatttagataatactaattttttaattaggaggtgttattgatttctaatttacaaggaattttgatgaattcaattaaatccttgaaagtaaagaaatgaaagattttaaacgattgttagagagttttttataatcttgttgattagtttttcataatcttgtaaagtttctcaaacaatctctctattttgataatacttgaataacacaaaacttttaatgactttataaaagtatgtatctaataacccaaaatttatgaagattttagattattttttacaaatcttaaacgaataacacaaaactttaacatactttaaaaaattttgattgaataacaacagattttacatgacaatttatatcactaaaactcttttgaaatcataaatgaataacacccccttagattatatagtaaattttgattgactaattaaaaagagaagttaaaaatcacttgtttgtttaatttttaatttttatttatgtattgtatgacatggcataataattggattaaactaaaaggaggtggataaaagaacccataaaatatcctttaatgtaatcaatattgatctcttcctcgcatcatcgcatgataacctagttaatgttgtaaatatttttatcttaatatcctataccctattaataataaaaggaaatcttaaagaaaataacgtaaacttgttgaatattacattatatgccattacagtaaagaacaaataaaaatagaacattagggtcaaagttatttaaatacttttttttttgaatacgaggaaattctggattataaatcgtaattttcaaaatccgaaatcacatcatataattttagttttgtcctaaataaaagtatttaaataattaaatttacatattaccaatagtctaaaaatcttaacatactatccatgtaaccggaccatttttcaagatatatatacattttgattaaggatctctagaaatctacttctaacactcaacattttttttttcattgtaaacagctttggaagtagaatccatcatttttaccaaataggagaagatttctaaactttttattttatttctcaattgaatcatgttttactgtctcttttgttatatgtgtggcaatgtcagtagtcctccaactgagttttaggattctaagtaggatattcattaaattgataaattggttgttattagattttttttaatccttagatctttttattcagatattttacattttgaaatcaacttgataatcctttgttagattctagatatttttctatatctagaatctatatcaccaaaagtattccatgaaatgtctgaattagtgtgtattgagcactgccattttagccatcgagaattatgctagaaagtattgtgaactacatgaacttgcttgttaatgtgaatttgattaggagatttcaaattacagtttagtaatcaaatagtcaaattttagtgcttgattccttgagatatgattaatctgattgcgttcatattaatggaacatggcgtttactctgacttgagtgatcacagctcaagactgtcgcttgcgccggtgctcacactcttttcttcgtggtgttttatgtatctctaaatccctttgatatttctctttggtaattcatcacggtttaagatcttagagattgcaatgcgatttgttatatgactgataaaagtatagcaatatgtatatttacttacgttaggagaggaatttaatttattgattatttattatgctgagaaatcttgagattcaataagaccaatctcaagagtcaagacattgtgtatcaccaatccaaagatcaacatggtgagatccttttgttttggttcccattttaccaactctgctttcagtctgattggaattaccaacatgatgagatcaacatagacattttttttttttggtgtttagcacatgtatactaaacaatacaagcgcaggcttcaaagctacgccaaacacttgatggttactaacaaggacggacgaaatagtaagatggtaacattatttctatttgatcttttaggcttcttctaggttggtataacgttatctcgtgaatcaaaagaccctcaaaagatgtagtgtatacacacttgacactgaaaattagtaaaaacgtggtgcccaccagaccatatgactcacatttagttgttactacctctacgtcttgaattaaactccaatttggattatgaccttgcttcattatttatacttggaatcaaatagaaaaaaatgcatgactattaataaggtcagaccattcctctctaagagagaaaaaatgtcttggaagaaaagggattggagttcatattattatctttgtgtattgtggtccattttcctccattcacactttaatcatatgatgaaacatctttgataaatttccaaatacaaacataattaaaatcctatagaatgatatttgcttccgggaaagtcctcaaaaaatgaactatagttaggggtgtcaaaatgggtaacccaactcaactcaactcataatcaaatgagttcatttaatttgatgggttgagttgttaaatggattaacccatttaagtaataatttaattaattattattataaaacaataataaataattaccattattaattcattatcatcaaacttaggatatttacggattccactttttacggatttacgtttttgacgataaaatcatgggtttaagtttttgacgggaaaattacggatttacgtttctggcgggaaaattacgggtttaagtttttggcgggaaaatctcgggtttacgtttttggcgggaaaatcacggatttacgtttttggcgggaaaatcacggatttacgtttttggcgggaaaattacgagtttacgtttttggtgggaaaatctcggggttacgtttttggcggaaaaattacgggtttacgtttttggcgggaaaatctcggggttacgttttgggcggaaaaattacaggtttacgtttttggcgggaaaattatggatttacatttttggcgggaaaatctcgggtttacgtttttggcgggaaaatctcgggtttacgttttttgcgagaaaatcacgggtttacttttttttgcgggaaaatcacggatttatgtttttggtggaaaaattacgagtttactttttctcaatttcatctcttgtatatttaagaaatttggaaaaatattaattttattaaattggtttagatgtgttggttaaacttaaattggcattggtttagagattttagatggttttattcaattttacaaaatttgatgggttaattgggtaaaccattgaaaccattaatcattacaacccaactcattttactcatcaaaccaattgactcaactcatttgacccatcaactcatttaagtcaaaattttcaattcattagggttcatgggttgagttgagttgagttgacccatgaattttgacccattttgacacccctaactatagtatgatatttattaactgttccaacggaagcgtgttcaagaaggtacccttttttccttactctgtttcatttttcttgtgttacacgctacaatttcgcgtagtatacaagaagtagaactgatacaaatattctgtacatgactctaaaagaaacagattttaaaagttcaacaatcaaattatagaaactccattactcattttgatatcacacagataagtaacaacagaatatggtttattcactcttgggtcttggccttaatatgctacatagttgcagcttcgtctctatatgcacatgcatagcgataggcttaatcagattggaagcaaaattgaaaattttgatatatagatatattttcttctacacaacctctgtaaatgaagttatccgatctcatttcttacgtagctggagtagctacaaagccatatagccagagccgtccctagggatttggtggccacaagcaaaaaaaaattttggaccaactaattatctctcttcattactatcttcatagaatcttataccaaatccttttaatcttatacccgtttgcgtaaaattccatcagtttttttgtatccacaacacgacttgcatttgaaacaatttgtgttatatagtttattcggaaatagcctaagttggtttatggactttgaaagatgcctaaaaactttgcaggtgtggctacaaagtaagtcagtcgttcgatttctctccataataggtgtatgctatacataacacttttcaactattcataaaaaaagagaactattataaatcacaaactcaattcgggttcactgtaaaactttgtgctagacagcaaattaaaggaatcgttatagtaatgaaataagcttatcaaaaacgtgcaacctaagaacagaaacaaaacattttaaaacattcacatgaacagcaacatcttcatctgccctgaagacaatgaagaatcttgggctctccttgttgttccatagaaccgacagcaaaactactcattccatcaccataaaagtatctcaaagattcatttctttttcacgtaatctgcaagtaaaagaaaacaactcattgatctatactattaaagatcctgactgtgagatatctgatattctgttcagttcttgattaatacttaccttgtattgtgtattggttctctctatctcaactgtcttcattctgatcaagctcattgcctaatcactgtttccacactcttccaacagattggtctcattgcttataccatcatcgtcactatccccatgctcttcactctaatcactctcattgcttatatcactatattcgcactcttcaaagtgatcactctccctacctatatcactattcatcactgtctcctcgctcttcgctctgatcagtttaatggcatccatcactgccttcatcagcttcacaaacatgctgcatagtgtttggattaccatgtcggttcttcgctgatgacagtcctctaagtgtcgtatttaccccatccgtttagtttggacgtagacaccctaatattacttatatgaagtgatatagctgcaaaagaatctagttgtcaataatgcaaaaagaattgagagatgaatagtcattatgttacaattattgcttaatgcttacccgcatgcgcttcgtgcttctctcagtttctacattgatatctccaggctcttcactgtgttcaatctcattaacaagtccttgaagaggtgtataccctttattaccttcttcggcttcagaaacatgtggaagagtactgtttgaataattatcaagtcgagtctccgctgatgaacagtcctctaagagtcgtataccccattgttcaatatcactatatcttttgtctaattgctcaatctttatatccacatgatcgtagtagttccgttgagctagagcagcattatcttcgtttagagggatacgacagtccaatatagctatattatagcaatcctccccataatatctatctttattaacttcgaaataaatgtcataatcaaagttgttcccaaatctgtctttgaactcacattttacctcgagctctactggctcctccttattagttaccaatgcgccaatcctaaatctgaagaatggttgggagagatggacgtgaagtataggaatggtcagagaggagcttccagtagtacggtaagtgaaatatgatggcacttcttctttccctgtaaataacatgtagttgaaaataattgattcttggtgatgaaggacagtttctggatccaagttgaagcagtccaagaaactgagtacgactttaggaagagaagaggaggctgtgtcaatattgtctgctttcatcacctccatcccacttggatatccactcaattcaactctggtcaatgtaccacaatttcgaaacaaagcttccttaagatgtttcagtttagacatgtgtaggaacacacattttagcctgctgcaactgttcatgcttagctcagtgaggttagagaatttctcgatccaccaaggaacctcttcaatcgctgtttcgtctagatagagcactgagatgttggttgagatttcaggaaagctcctcaactgtgagcatccactgaaacaaaggtaatcaagagattggaggttgattccggtgggcagagtctccagatttatgcagtttattatgatcaagtccttcagttgattgagattctgaaatgaggaagtaagctccaccaaacttgggagattctcgagatgcaagctcgtcaaagtgggagacaacatcatcgccaggaagggcgtaagcggctgaaccaaataacaagttttacgggttttcagtggcaaattacttttaaagttaaattttagaaaataaatctttaaaaacgaaaagaataacagtactaatgtattatgggtaaatctcatcggtattaatagattgtttggaactttccattcacgatcacatctactctttattaaaaccgattattttttaattacataatatatgtcattagaaaatagctaaaaataataaattaagaaaatcccatgtataattttcttttacgttttaatgatatcacgacaaaggaaaaaacccaattgatatcatctttaatttcttattttctttccatttttatctgttttttactttttatttatttttttttaaaatcagatattttcttcttcattctttgtaaccaaaatttactttccaatcaaattaaattattcataaatatataaaaattagtgttttttaagttttcacacgagtcaacgacaatgatttttttttacttttataaaagtgttagggaaagagtttggagataatgttaagtgtagaactacttaccttctcttcttcccattgtttctcatcactctcttcttttgatattctaaactcaacaagattctcgagatgtaaattagaagggaaatcttcaatgtttgttagatttagattgagaactgagatgttggttgagaatttgggaaaagtcttcaactttgagcaatgatagagattgaggcggtcaagagatttgaggttgaatccggtaggaagaattttcagacttttgcagtttagcatgtccaagttcaacagtttattgagatttcgtatagaggacgggagctcgaccaaactctcgcaaaacttaagattaagtatctcgagattagtagcttcagaaagatctggaattactttcaggtttgatgatccgtgcagatccatttcctttagacatgtaagtggctgtatccaacaaaaatcaaacatagagctcaaaagaaattacacatcatgtggcactattgtcataaaaaaacaaaataacaacataagaaattattctcaaaacttaccgcaactccttcccatagcttatgtagcttgctgtactgcatttcgagcttgacaaggttttcaggacgaaaaccaaaaggcatacacctcattggaaatttggaccagcacaatagtttgagtgtacggggcaaatagtcgaaacttggaggtaaatgcaaaccgtcttctttcaaaccaaagttcttaatttctaagaaacggagattagacatccctttgaaggccctctcatgtacatccaactcacgaatattccttatatccagtgatatacctaaaaccttttgagtaccctgaaaaatatgatatatatgagaaatagacaaccccatacaattcatcgtttatcagatggcatctcttaaaccttatacgtatattgagttatgaaaggatcaaaaatattttttttaaacttacagtgcatgcattgagtatatcatgtatatcatttggatccaccagaaattctcgttctccaggtttgtcaatggactgaatgcgaacaatttttctacccatttcttgtagcgaacggtgcatcaccacataaccttgtctgacatgaatgagggacttatcagctaggttttctagtgcaaaactaacatcactatctgccagcaaggacttgatggttgtgacttccatatgattgaaaagacatgcgatatgacgaaatatctcttgatcttcactctctaacccatcatagctgattcttagtattttttcaattttaccgtctatacgtagactattctcaagccttggcagcatatccatccagtattccatatccctcctccgcaaatatttacccaaaagattaagacccaaaggaaaattgcccgcatgtcttactacatcaactacaagatcctcaaaacctttaggagcatagttttgcttgaatgcagattgacataacatctgacaagcatgcacatcagttgggaaacttacttcataaatatgatcaattccatgagcaatcaagaagtgcttatcatttgtaaccacaatgattctgctcccatatccaaaccattgagtttgacccactaatgtatctagtaccattatatcatccaaatcatcaataatgataagaactttttggtgctttagcctctcttccaatgcagctggatcatctatctttatgtcttttttcccgagaatttcagataggaagtgtccttgtagctgcaacttcatattggggtcgtccggattggcgccactataaatattccgactataagatacaaaagccctgtcgatgaaagtgctaccttggaaatgtcgagaaagtcgtttaaacagagctcttgcaatggtagtcttaccaatccctgaggaacccgatataccaaccattctcacttctttagattccagttgcagcagtaaactcatttcagcgatgtgatcttcgatgccaacaagttcctcagaatccttgggtgtagttaaaagcagtttacccaaaacatcattggctatttcttcaatcatttttgcttcgtcgttcctaataagatgaaagataatttaacaaatatgaaacaacaatttatttcaagatgtatctaataataaaaaaaacataccatttggcagagtcaaatccaagcatattcgctacaagagtcaacgctttcttccattgatttttcacttcctcatctgtttgtctcttgcaagtattttcaaagatctttccgaagtcgccgatttgatgcctcacttgggaaggatccacatggtagaaaactggtatgacaattttatcattgcagtttacaatctccagcaactcgttaagacaccagctcgatgaagcgtagttttttgagaaaacgaccacagcgatcctggattccttgatggcttgttcaagatcgggccagagagagtggcttctctcgatctcattgtctctgaaagcagtgattagtttccgatcaagctctttgagaaagtggctacggaatgttacgcggacgtcttcccctctgaagctcaagaaaacatcatataaccaattgtgagaagaagatgacgaagccatagagagagagagttagaaggaggaaacaaggaacgaagacttttaagaagagaaatagaggagaagtagtgagtctgtcttggtggatataaaacatttaacataacagcttagaggtaacttgacttaatcacggccacacaagttttcacaattatttcttagacttttctgatgcaacttggcggaagtttcctctttgttgactcagtggtcacaaccatctttcatagcctcttgtctttacattactatctcattcatttacatattcttaataaagatgtatagttcatcatactccaaatcaagtagatgtgcttctcattttatgcaaaggagaggttttatggagaagtattctcacgggcaacatgagtttactgtgagaaatagcaaaatgatcattacattagaacggaaaatgggtaaaaaaaaactctcctttatccaataacatgtaaaaaaccgtcaacttttattttggtatttaaaccctcaccttttaaaaaatggtaatataacatctaatattatcaaaccaaataaatatcaaataaactattattttgaaacataaataaaacaatttagtttgtatttatctatttcaaattcgagttcgatttcttttccagtatttagttgttgattttttgcgatataaaaagtaagtttcattgccaatacaaatcgttatgtaaactaaaattagtttatagcttagcatatttaattttatttttgttcaaatttgttctaacttttgaaattttaggaaaataaatcttaaaccaaattatttttattatttatatttattttgtcttattttaaattaatttaataatcataggtgttattttaccattttaaaaaaggtgagagcttaaaaacccacaaaaatagttgacggttttttacatgtttttggaaaaggtgagggtttctttacacattttacctattagaactaataagacacacatttggaaagattttaaacaaggacttatttgtgttaaaatgtaaatattgtcaacacgaacaaagataatctaattttgatgctaatttttaagatttatttaatcaaaaataaaataaatcatgcattgcttagtcttggttctgaatctgtattcatgttggaactctattaagtaataagtatcacgttgatactatcaaccacttgctgaacaatataatagactgaaaatagagtaaaagctgcgttattgcagtctatatattttctacaaaagaagttcgaatcatatgctaaacaacaagagatttgactatgaagaagctaagtcattacattatcgcaattggtgtaaaactaaaataagccactggtgtatgagatttttgggttacctgaaaacgtgtgtccagctggaaggatactgaagtatctctcgcaagatcgttgaattcaatgaacgctggaccataactcgtaattttccaaacccgaagccacaacctctaattttagttttgtcccaaatgaaagtatttaaataaataaatctacatattaccaatagtctaacaatcttaacatactatccatgtaaccggaccattttccaaaatatatatacatttagattaaagatctctagaaatctacttttaacactcaacattttttcttcattgtaaacacctttggaagaagaatccatcatttttatcaaataggagaagatttctaaactttttattttattaatcaattgaatcatgttttaccgtctcttttgttatatgtgtggcaatgtcagtagtcctccaactgggttttaggattctaagtaggagattcattgaattgataaattggttgttattagaatttttttatccttagatctttttattcagatattttacattatgaaatcaacttgagcttgtgtcaactattcatcaaagaatattgtgtttccaacgacttccttcttcttaatcattgagctgagacatgaccaatcgaaaggaggaatcgcatatggtcctttgactaatccatcagccatcgatttgtgtgcagcctcagtcatatgaaggccatcccaggccacatactttgaaggatcactacaagcttccactcctacactcccacaacttctacttaagttgaagttgtacggccctcctacaccgcaacaagctgacaagtgtctgtttatgaatcctgacaatgtcattgattttagaaactcggttagtaccgactcattaacttggttgtgaagaaatcaagaaggctaaccgtatttacttggttctcggccaaggcgcaatgaagcattgtagtagtcagcatatatgatgttgacgtgagggttaagcttcctgagtctgttgagttcttcctgaagctgctcactgtggtattctccaaacttgttcagccatttcaaacatcctgttaaaggatcatattcttccatgtttgatgtttggtgtaatgtcaaaaatgctactgagcatccgagagggaaccctccgggcaccagaaatgttcttcctcccataccaatcaactcctggattcaacacagtcccaaagaaacacacacgttatagttttttactcgttattgtgactagcagatcaagaatcttattaaaatggttaccgtaatcgcagaagaaatagtactaatcaccaacggaacaagctctttgacctcgtccaatggtctgagttggaagaatgggaaattgtaatcattagctccaatctctcccatgagaatcaaagcatttccaatcatatctctacaatctaagaacaaatacaagttagctcaaaccacttgaaaacaaatacattataatcactttactaaagttgatcttcactattactacctgatggtaagccacatagatttggtaagctctgcttgaagatcttaagctgaactcctaaactgaagttgtgaggacaatggtatcctttctcttctagaaaagaactttccaatgcagttgctgaggctacggcaaaattaactcctttctcaaagtttccatttgtagatccgaagtaaggaggcacataaggaagccccaaaaattcagctgcaaagaaaaacaaaattggagcatcacttgaggtttcacaatgttaacttgctgttcaagaaaatagaaaaacagagaaagatttgacataagaaacctaagaattcagtgaacagaacacacaaaattagaatgcttttatgtaaatttaacctaacaaaactgcgccaaaacagtcaatttacacataaataaagagaagtaccgatgaagtcaatgatgaggcgaccgtcagagaaacgaccggttgggtggtggaagaaagtttctccgtacggtggaaacgcgctcataggaagattgttatgatctgagagacctagcaagtttccagtgtcggcaatcgaatcgccgaaactgatgatcgactcgaagttccggcactgcgattccgagcttacgatagaaacaaaaagagtagataaaaagaggctacctagtttcatcaacacatgagaatctagcgacgccatgggagtggtccagagtgactttctgtttttctatctttttatttactttatatatattattgttttggaatgtaccgttagtgatcaatgatgatgactcaatgagcctttcttgttgccttataaagaaaggtgggacaaggcaatttactttctatgacctacaaaattttgtatttgtatcgtttaaaacgagcctttcttgttaccttacccaccctctagaaaatatcaaagaaacaagtaacaaccatgagggagtggtggggtcagaaaaactagtcaatttcttataacttcttatcaagagtaaaaatcttgttcagtaaattaaacaactaacgaataacgatcatatactccaattgctcttttatttaaccttagcctttttgaagccacaagcattgttaagtcgagaggaataaatagaacgaggccgacaataatacccgaaagaaaagtgagagtaatactattttacacaacctatacactttttaggaagtgtagaaccacgttagaaaattaggtctaaaagcttattatctcacgcagtcaaatgatttaaacattttgttttcctaaaataatattaaattaaaatctaaatatgttttggccaactatcagagaaagatattataattatagcaatattttttggttgatctgaaactcaacgccgatgatcactcgggtgactttattaggtaagaaatggactacatcgggtgaaatccaagagcttcataggtgaaataaaatcagaaggcgtgaataacacgtaatcgagtgttttagcaaatcctggcacatattttgtgaactttggctctcctttagtgaatccatacgcactgcatagtccaaaattcagtgtcttcttcttcacctcccaaaggccacacaatcggtatattgtctgaatttaggtatgcatacacctgaagagagtgtgaaagagaataaaatcatgtttcttggacaagaagaaacgaaaacaaaataacattccaaatatggttgaagttatacatcactcgaggggttcgaattgaagtcaccagcaaggatcaccgatggactgcaattttctacagccgatatcgtcctcttgaacatggctaatctaaacattagagacttggcttgagccagttttacatcatcccattcatcaggtttcctgcgtttgaaaaattatgaaaatcatatatatatgaaagttggccaactctctccaaatgagtgacacatcatcacacaataaaatgacatgtgtcattctatattaattaaattaaaagagtagtaaaactaattgagaaaaaatcaaaagtcttttgttgtgttaaattcttcattaatttcactcttaaatgaattttctaaaaacattcaattataaaaattcataataatgtatcaagcactactttcattctattctacttattttattaaattgtttttttatcaataatcattaatttaatggctaaatatttacttgtgttgtagtttagatgtttgctacgtaacctcatattaatttagtaattttagttagatattttcttattattacgttttctgaatatggtttatcatatgactttctttctgtacatttttgtgcgttctgataacttgataacatcgatatacaatttttttacgtaatagtcatctgagacattggacataccaaaaaaaaaaaaacatgactatatggctatatgcaagggaagataattaaagtgttaacttagattactaaaatatcataatgtgatattgtgtattagatgatgatagaatatatggaataaagaattgtttattacaactaagttagacaagtttcaaaatacataagtaatataactacatacatatgtatcaatatatcatatattgttgttgtatctgatcatgatagtgaaatattaaaataatagatgtataaatatttatattatatttgaattgatatttcgagttatacatgaatctaattataaaaaataatagttttattaaatagatatgaatttatcaaaatgaacatcgaaatcaataaaaaaactcataatcatatttttccgataattttaaaaataaaaacccacgcgtagcatgggcgctcatctaatatatattaataaaccaaaaggttaaacgaaatactcataaatttctagctaatgaatattaattattttacccggattttaaatgagtggttgcatcttacaacaataacgacatgattaaacggttttaaaatcttgaaagctgccaatattccgaggcaattgcaatttagttttttaactgcatcaccacgtatggtactcgccacacaacggctttcagcaagattgttgtagtctacaatattgtatgtaatcaactctgctgtgtttgaagaaaagaaaaaaaagaacaagggactttgttaggctcattaattagacttaaaccctaagatcacattttacgtgttaaagtctctatttatacaatttgggcttgaaaaagattgcacagccgtctcttttatatccttctcctcttggaaaataaattccagtgtatcgaaaaaactaatgtactcgtctacttcctgcaaatgtttatcatgaatttaggcttacacaagtcccccccattatgtgtgatacgagagacaaagaaaaagaaacctgtagacagatgaaatcagctttaaaactcgttatattatcaagaatctcctttgaacggttatcccacctatgaaaaaaagattaaaagcataggcttgatctttcttttgataaaccatgaatcaaccagattgaaccggagtgggcaagtggcacgagatgggttagtctgctatggtccatctcaatttatcggaataaaatccttagatagaggattgttttatttagctagtgtcggaatgaacatttggaatttctaatcatgaaccccaaaaaaaaatcataaataaaatttttgaagagtttacttgaacagttttcatcaataaagaaaaaaaattgttagctccagacgcttgattcagccattcgggttgtcgtataaattcaagttttgatcaaacattgtcttaaattgatatttcggatctaatgaatcattaagtttggtttttagatcatataagtttggatttttttcttggactcacttgagaatgggatattcgtatctcaaagctcatacgccaagagtcttgtgacaaggttcaaagtacatcccaaggtatatcattttccaaaacacccaagatcattacggtagaaccgttaaaagatgatgaaaaaaagatgatgaagaagatcagaaacttgatgagaaattgtttcagacagtaacccacaaaccaagaagctgccccacctaaataatgcaatgaaaccgtatccacagaaatacacacacacataaataataaatattagaataatgcatgggggtaaagacatttcgccgaagactaagaaatgatccaaaactcgaagacccttaagagactactaagtcgtcgatagcttcaacctctcttctcttatctctccgatattttagtcttattctctaccatatatcttcacttctctattctatataaatgcataaacctgagtcacgctgataagtaaattaagaaaggaatattaattaagatggcatcttctatagtctcctgcaatatagctttttcgtgtatcgatgacagtcgataactcattttagagcatgtgcaatggatagagattttataaatcgtttatttaatgtacaatgtgcaatggataaaacttaaataaataataaccgtaattttaaataaaataaaaaaattaaatttttgaatcgataactgtaactaatcaaaattttatcatattcgttctggttcgtttttttcttttaaaataactcatttggatattttctaagtttctggatattttggttaaccgtttggttattggttcgattttattttatttaaaacttaaatcaataactcaactaaattatatgcattaaaataatatattcgatagacttataaaatctctaaatgagttatcgactgtcacgtcatcgatacacggaagggctatgttgtaggagatttttcagattgtggtttgacatgtatttatttgacatggaggtttatcttgcaaaaaaaaaattacatataggattttttttgcacaaaatccttatgttttcaaacggagttatctagtgccacgtcatctatacacgggagggttgtattgcgggtgactttagagatggtggggttgacttgcataattcgaacttggagggtaaacttgcaaacgagattgatttggagagttattttgcagaaaacccttatttattatatacatgtgtttttcatatttcacagatttatcaaatgcaaatacacacatattctatcaaatatccagaatgggaagtacttcaagacaattataaaatatgggaagtagaatttgaacaagataattatatgataaattgggaggtttgacgagggaataattaaaaacaaaatctactataatatgtagtttttacttttgagagcataatttgataaattaaatgagtacttttaatatgaatgaagagatgagagcacaaatttcctctattcgaaatatttagttgataaacaatatgtagttttaagttataatttcagaaatgagtacttttaattgctaataaagaaataagagaacaaaattactctttatcacaaattaagatatgaaatatagagttgatagtaaatttaaaaatttattattttacttgtaaaaattaaccaactactgtccacataattcatatatcatcgaagagcatcatccaccacaaacaaaaataatatatcatctacgactatgatacttatcatctcactacaacaaatatctacattattagccagtgaaaagcgctataatatgtcattaatagcgttttcataaacgctgtcttatgcctttgttattttagacatatacgatagcgtcagaattgtatgatatgttataattttctaccatagctctaatgaaatgctttattagcacataccaatatttttgttaaattatttaataatccatattcttcgctatgttaggtgttttaaccataacattacgaaaacgttacattacatttgaagtttttagtagcatgatttgtaaatgcgataatatatgtttttcataacaatgataacctcttatgatcgaagtaaccgaaactttttaacaaaagcatcattcatttgcaataaaacatccaatacacataagtttaaatccaggatacaaaatacaattctcaagccatgttctacttaactacattatccaaaacgaattacaaactaggaaacacaacaaaagtctcaagagtatagtaaacctcaagacatgataaccttgtcctctggccatgcaatggctgtgccaagtgcatcttccatgatctcgacttcatctgatggcctccacactgttacatcgcttactttcacaatatcgacccacactttaactgcattatcatccaatggaacaaagtgaaccttctgttttggatcgtttgttgcccaacgtctttcagccataactcgtttctttccagtaatatccatcaacttgcacttcatatttttcttagaaatgccttgattgaaacactgccatgttcataacattaataaaccaaagactgatcagacaatttgacagaagcaatttcaagatactaaggaaacatttacctgagatttttgtagagttttctgtattggagagcttgaaccatttgcattctccaaaggagtttcagatcctgaagctgaagacttagaacttgtggatttaaaagctgcagatttagaacatgcggctgtagattttgcccctgctgaagatttagaagctaatcctgagtgctgaagagataacttctgattaccactagcagatgggagattttcaaataccactttatgcacaggccatgatacaaaagccatcaaacaatcctcaaggtacatcatttccattgtaggcctccatacaaatgtttctcgcattagcactttatccacaaaaacattaactgcgctcggtccaagaggaagtccattaactaatgcatttttctcttgggtctgccatcgaccctcagcaacaatgacttcatctgttgacaaatccaatagcttacatttgttctgagaatttcctctaaggccctgtcaaacacaatcagttaaaaaatcaaataagactctgtctctacttgataaaacatgaactcatcaataagctgactaagaatgtgctgaaatctgcagtttaccaaaggcgcaatgtctctgcttcattctggtaagttcatcttgcaactcattgacctttttcaataaaagaacttgcttctcttccatgtcagtcatgcactttctcttgacttggaggcaagctagttttgttttactcatgcctctactcattgctctcagccttcccggattgtctggtcctaagagttgagagaggtgatcttcttctggatttgctgacgttggtggaccatcacttccaaccagctcagccgcctttctctacagaatatgaaatttgtgtcatctaataatattgggaaaggaaatcattcacactcttgcagtgattacttacaatctgttcagcagcattagtgttcaccggcgtaccatcctttttggtacgggactttacccagaactttagccttgtcacttctgatggatctccactttcaagtttctgtgtcaaaaggaaaatatcattcaaagtctatgagaatgcattcttaccggaagagacaacatacatgtcaatttactaaccatgtcttctgctaatctcaccattcctttacgacttgtagtatgaggtatctgattcctcctcctttctttgtatttatcactcacaacctaccaactaaacatgttaataattgacaaataaaattttaaatggtcataattccaactcattaccttaaaggctgcgctagttttgattttaacaaatttccgccattctattggggaaatattcattggtctcagattcatcttttgctgattattaggagccagattaatatccttgacagtccgagacttgtatgacctccacagactgcccatttgctttagaacagcaaccctttgaaactcttcatcaagctcaaaccttgcctgcaatcatttaccatcagacaaagtatggaaataaacctttacataactaatcaaaaaaaagaaactgaaaagaagaatttacctgcatagatttccagggaacagttttcatatcctgactaacatccttccaagtttcaattgtgataggaacatgttcacgtaccaatgtgcctacatatgatgccagcttaactgaacctggaccaacaggatctctcataatagtgtactcaactctttctcgaacagttggatccttggcgatgttcttcatctttgttggtcccctttgtctcttacgcttagcctgaggctcagttcttcctgacaattcaatctcccctaccgcctcttcctcattcagcccatccttatcagtcactaaaggattttccttttgtaaaagatcctcctcagcttgttggtctactacaggctcagtttgaggctcagtttgcttagccgaaggctcagtttgctcagctgctgtatcttggggctcaatggtgcctatatactctggctcatcatctgcaactttcttctttcttttctgtccacctttcttctttggtctacccatttcagttcacctgcatttcacagaaagaattccatgtcagtcatacttcaaaaaacaaaaatgacaacaaaaactatcatgagtaaacatagagcatgcaaggcataaaacaataacacataaaatgaataagaatctacatttgacacataaattccttcacaatcagatctagcatattcagcttcatccatttcagcgtccatgtcaatatctgctggtaatggaccaatctctgcgtttccttcctaagcatcttctttactatatcttctagatgaacctttcatagcaacataccaactagatgaatcatctacccttgaatagaagacttgcttcgccagagatgctaatataaatggatcctttaaaaagctgacttgactgtgattctagttaaccaatgtgaacccatcttctaccttaaccccattacctctaactgcccattgacaccgaaatataggaacatagaacacattgtagtccaacaatatgatgtcagttactgtcctatagtacgataccaagtcaacaacctgtgatgtatctttagcactagatctacatatagttgttgcttcataataaactccactattctgactttccctttcaagtgatcgtgtgtgaaaccgttgtccattcacaatataaccagtataggaccttgcactacaccgtggaccatatgcaagccatttaattgtatcttcatgtccatttgaagaaagaggtatctaccaaatgataaactaaaagtcagtcacttatattctcataaaccataaaattcagttagcaaaagtatttgcctgttcttttaaccaagatgcaaaatttttggcatgcatattcaataagaatgatgcatcacgtttacatcttggatttgtgtcttggagatattgcaagtgcatgctgttcacagttgaatacaggaatttgaaaaatcagcttgctatattcagtttcgtaaatgaacattagataaatttctgaaagcgatagaacttactccacataaggatccaaggcagccatattttggatgacagcaagatgggctatgttcttatctacttcagtgagcataaatgaagttcctgcggatattggacgcccttctagtatggagttgttctcatactctgtattcctttctggtttctcttctacacttgtagtctttttcagaaaatcactacagaactgcatgcattcttctgcgagataagactcagcaatacaaacgtctggttttacggagtttcgtacaaaatctttcagaactttcatgtacctacaaagtggcaatgagaaacattattctatgaaaacatacaattttcacagaataacaatttttaaaaaactgaaactttacctttcgaatggatacatccatctaaaatggattggtcctcctagtcgagcctctcttcccaaatgtacagtcaagtgaaccataatattaaagaaggtgggtggaaaaaaccgttcaaacatacaaagagtttccacaatttcagcttccattactgaaatcacctctatgttaataactctctgacacaagggattgaaaaatgagcataagcgtattattgctgtccgaggaccttttggtaacaaacccattagtgcaacagaaagaaactactgcatcaagacgtgataatcatgagatttgagtcccattatcttacaatcttctactgatacacaccttcatatattagaacaataccgatcaggacctttaaactcaaatagatgcttgcagaatgtttttttctctgatttggacaaagaccaaggtgctgctggaaggtttgttcgttttccttgtgcgttaggatgcaaatccttccttacaccaagatcttgcagatctttcctagaattaagcccatctttagattttccacaatgtaacaaagtagatacaatgcttgcacccacatttcgctctacatgcattacatccaagttatgccttaccggtaaattctaaacaatagaaaaacagttcataaggatcacaccataaacgtcacttaaatgatcaatagataaattaacgtttacctcccaataagacagcttgaaaaaaatggatctcttcttccatcttgataactcatcttcgtctacttctacttcctcatcttcttcggattcactagattcattgtcactatcagtgactgattcaatgcagtcattcctttttctcttcctcccagattctttagcattcccgaaatcgtttttgaagtttttcaggttatgtgaaacttcacgacctgttagaattcttgcctttctcccatgttctacctttccgtcaaaccaagccttcttgtttttataactatgtgttggtgccaacccttttctatgacacataaacacatgctttctgctatatttcaaccacatactatctgtgccttttccacatagaggacagcccattttacctttaactttgcatccagcaaggtttccataggcgggaaagtcactgatggtccagaaaagcattgcctttagagtaaatgtagtcttactgaaggcgtcatatgttaactcacccttcttccacagatggttaagatcttcaataaagggttccaagtacacatcaatactatttccaggttgttgtggaccaggaataagcaggcttagcattatgttctcattcttcatacattggtcaggaggcaaattgtagtttactaacagaacaggccagcaactatacctagtattcttcatgttgaatggattaaatccatctgtggaaaggccaagccgcatgtttctttcttcagcagcaaattcaggatacttgtcaatcatcttatcccatgtaactgaatctacagggtgacgatgttttccatcagtgcttttgttactataatgccaccttaagtccttggccatttcctttgatctgaacattttcttaaaccgtggaattatcaaaaagtatcgtaataccttctgtgggactcctttcttagcttcaccagtttgcatgtaattcttccaccgtgacgcattgcatttaggacaattttctagattcttgtacctctttctaaatagacagcagtcgtttacacatgcatgaatcttttcatatcccatatcaaagctctttaaaaatttcttgacttcatacaatgatgtacgaagcacattgtctgcgggcaacatctctggcaatgttccaagcagttcattgaaactcttatcagaccaaccatttttggtcttaatcctaaaaagagtcactatagccgacaattgttgtggtttaaacagctaggatatagaggtgtttcagcatctgctaactttgccaggaactcatcttctcttatgtcctcaccctctgcaatctcacctaagtcagcatcaaaacactaagctgcttggtatagctccaaaatttcagcattccaccgactgaagttgctttcacagtcaaccactgagtccacgtccccatgatgataccaatcagctctcaacttgtaagcctcatccatccccttcttacaagattatccaccacatcgctgcctgactgtcgttccacactacgacagtctttgcagggacatattatcatgtcaatgactcctaatgcagcagccacatcggttacaaatttctgagcacctttctcatatccaggatcagctcttcaataaatgagtaaacaggaaaaataaaaaacctcttaaagcaaccaaacctaaacagaaaactaacccatattaattatctgcttacctgcatagacgaacccatgccttgtccaacattatatgttctaagcttaattaaaacctttgtaagagcaattcaaaccataagcaacattaaactattgaagacagtaactcaaatagcatcacagacaagtgctcttggaccaatataccaacttatctcttatcaagttcatcaaattaagaaataaacaatggcaaacacaatcgacagtagctctatctcagattaaatcaaagacacatgttttaggaccaacaaattacactatctcagccaataaaaccaatcgacaacaatcacagcaacttaagtaaagaacagaacaaaagaatcacagcaacttaagttcatacaactcataagtaaagaacagaacaaaagaatcacatgcacaaaatttagttgaaagggactaacctgtcgtgtgaatagaagaagaaaagtttcagttcctcgacattgcaatcaccaacacttgataaaaaacgataatcagtataagttgaagcaaaaagtttaagaactctaaatcaatctaccctaatttcattcaaatcacaaagccctaaatattgaaaacaaatcgatgcatataaaccccaaaatcaaatcgtcacaaagaactaggtcaaattgagagtacaaaggaaattagagtaagacatgccttgaatttgagctcactggtggctgcgacaaggttagagctcactggtggctgcgacaaggttagagctcactggtggctgcaaaatagaagtggattcgatgagattaggtcaaattgcgagtaagatggaagctgaaatggattaataaggaagaaagacaaggttgaaagagagtaaccttgaatttgagctcaacggtggctgagctggagaatgtggcggcggagaatccgaatttctggccagcgacaaggttgaatcgactttgggttgcaaattggaagtggattcgatggaattggaagtggattcgacagatctgaaacgtttaggctgaagactgaaattttggtcttctcgattttgttagattttctcgaagctgcagagggaagtgaataattttgcctaagtgttggcgcttaagtgaataattttgcctaagtgttggcggaataaagtattttagattgctagaggatttttggtcttaacatttataaggtgctattaaaaagtaaccaaaaaattaaactcatcttttatagcagttcaggaaaatgagctatcctctactgttatcaatgatgactttttttgtagtgtctgtcaattataaaccgacattttccaatagactcatcaaaaatacaacaagatcatatctttgaaaaccatctagcgtacatcatatatttttggcgatgatcttgatgcagtagaactcgctaaatgattcataacccgaccatcactattgttgtcatcacttttttttgttcaacgagagagaaatcacaattttttaaaaaagaaaaaaaaattattgaagaaaaatcatattctatttttttattgtcaatagaatttttattgataggattcaagtaggaatagttggcaagtacaaaaacacttctggagacataagccagcgagtaaagaaatgtaatcaatatagtactagtactgatctcttcctaatgaaagtaatccataaagacgtatttgtatatgtgaattagatcaatgaatttgaaatgagtatagtggttgaactgaattttttcttggactcacttgagaatgggatattcgtgtctcaaagctcatacgccaagagtcttgtgacaaggttcaaagtacatcccaaggtctatcattttccaaaacacccaagatcattacggtagaaccgttaaaagatgatgaagaaaagatgatgaagaagatcagaaacttgatgagaaattgtttcagacagtaacccacaaaccaaaaagctgccccacctaaataatgcaatgaaaccggtaacaatcgtgtccacagaaatacacacccacacacacaaataataagtattagctagaataatgcatgggggcaaagacatttcgccaaagactacgaaatgatccaaaacttgaagacccttaagagactactaagtcgtcgatagcttcaacctctcttttcttatctctcaaatattttattcttattctctaccatatatcttcacctctctattctatataaatgcataaacttgagtcacgctgataagtaaattaagaaaggaatattcattaagatggcatcttctatagtctcttccatgtttctctttctccttcttcttcttgtatttccacatatagataatgtccttggcgcacgaatggaactccgtgaacttggtgagtattttttattttgtctctaaatattcgtaagttattaatattttactttatcagttaggtttattaggggtgttgagttatatatgtatgtgtaaaccgtttaattggtactggtgcaggagagataaattatgctgatccactaggttttactcggcccattgtccccattcatgttccgggttttccgcctcggcggccaactattccgcagttaccaccatatcgtcccagaaggtgccctttctgttatcctcctcctcccccaaaggctttcccaaaaaactcaccaagtcactgatgtcactatagctacgaaattgcgtcaataaatgtatgcacgttaatttgtttcatttgtgatgtgtggggctctttatctattatatgcatgtcacgtgtttgtcatatttgcaatgtatcatgtatgtggctctttatctattatatgcatgtgtttgtcaattgtcatatttgcgatgtatcatgtatgatgtatgtgggctctttatttattatatgcatgtgtttttcatatttgacagatttatcgaatgcaaatacacacatcttctatcaaatatccagaatgggaagtactccaagacaattaaaaaaatgggaagtagaatttgaacaagttaaattatatgataaattgggaggtttgacgagggaataattaaaaaaaaaaatatatcgccgagaaacactttaaaaggtaaaccttaccctgacttgttattaacaaaaatgctatgctgacatgtcacgtttagaaaactccataacccaattaattatttgtttttttctttactagaatatatacatcaatttgtctttaatataactaccacatatttaattttcactcaactaattaaacaaaattacaatttatcatcccattaacaaaatcgaacatctaacatgagtaatcttaataatcattaacacaaaactatttaataaattttacaattttgaacaatatatcaatcaaaatatcatatgactacttacaatatatgataagcatgtttatatgtgtatgtatatattgcaacatatacatcaataatttttttttgggtatacttattatgaacatcatacgttataattagtcatattgattaatattatctttattttttgttgtatataatggataaagttgtatatatacaatttgaaacagatatcttattgcatcatttcaaacatattataaatttatgaagtattaatgatataacatgtctaacataatcctaaaaattaaaattcattatatatacaagaaaaaaattatataaaactaacagtttgaattctcctccgattttagtctttgatccaatttttttaatatagttataaagaatcttaacaaactgtctaaatcaaaagattttaaaaatattaaatcacttttctcaggtttaaatcacttttctcaggtttaagtacttttaattgttaataaagagataagaggacaaagttattctttataacaaattaagatatgaaatatagagttgatagtaaatttaaaaatttattattttacgtgtaagaattaaccaactactgtctacataattcatatatcatcgaagagcatcatccactacaaataaaaacaatatatcatctacgagactacgactatgatacttatcatctgtcaattatataccgacattttccaatagactcatcaaaaatacaacaagataatatcttttaaaaccatctagcgtacatcaagtatttttggcgcgcgatgatctttctttctatgatgcaatacaactgtaacaatgtttatcatccaaatctagttaaataattaagagtaaacagctacaaaaatggctcttctttttcttctccatatgcattttgtctatacctaaaaatattattcatttcatttttctcctcttcttcagttacatttgttgctgagagtcacagtattgtggatacttacaactgcaaggatgatttctcacctgcaaaaagtttgtctctcaatatcgcctcaagaagcatatacaagattgccgtgaaactatgttttaccttccgtaatgtgaaagatacccttctagaacttcttctgatcactttatccttcaccttgtcaatctattagagtacagtacagtgttaagcaattggaagagaatgcagtaggagttatcctggcgagagcgaaggagagattgaaatgaagaataccaaccttgtgatgtggaatgtagtgattccaagcatatcgtgcttcaccggataataagagcatagaccgaggaggaagatataaggcctttttgatgcaagaggagtcacccgacttctcagcatcggtagttgaggctttccatgtggaaacagagtatcttctgaattccataatacaaggaccagctaaagaaaggctgaatatgcaatcttcaaatgctgaatgtgtatcaatatgaggcgataatcccacaccagatgggtactcatttacctaatattcacaagaattcctcagccttcaatgtagttaagaacaattataacagaatcttgatctatatacagagtctgatgatataccgttaactggtccaaattcaagcttgctgagccgttgtcaaagttcgggaacaaatagattctttcaagtataggagaaacaaacgacggaagctcaccgagacgctttttggtatcaacatttcttgtcccgtaacaaaactcatatccatagtgttgaacacgccgtttagcaagaccaatccaatgtcgagcatcaacagctgcaagcaattgctgataaagacatgaacaataataagtaacacaagaggtaaaaaaagaaatcaaatccctacaacataagcacattactaaataccatgtacctgttcttctgccacagtgacaaaatcaggtaacaagaaaagccctggaatattcaactctgaatcaatcaaagacactggaacacaatcattcacctgcgtctaagcaaaaacataaaaaaggctcattgcaagcagataccaaacaaacataaagtctctgtcttttggtaaagatcaaaactttgcaacatagagatctaacattacataaagatcaaaactttgagatccatataaaaatctaatcgtgatatgataagacccattaattggaagtacctcggaaggtaattgaagaactgaatatcgaatatgcaaagaacgtcctttaaggtcaggacatggtcgaccactcaaagcttctagagctgctttcgcggagaagggatcagcgaaagagacgataacacgaacgccgctatcatccgccgcgtagactccgtttacttcaccgaactcagcgaacaccgccgcgattgcgttgtgtgttagtccaaccgccggtccacaattcgcgacgtatagatttgatgaatttggttctccagaaatggaagatggcgatgattgcgtcggacggacgaatcgcggctgaaccattctcggaataaaagactgtaactttctccgatcgtataacggcgaggtatcttcgccgatatgttcaatgaaaaaaacgatgacgtttacttgagttagaagtgtcaattgggctgtccaaagtccaatggtcatgtccacttggaacatttttttcatgggttctaatggttggtccttaatggacaatggtctgaaaatttgtccaagaccattaaggaccattgtccaatggtcagcccatggccagcccatacaatgatgtttatatacaatgcattttcacacaatctcgttaaaagctctatttataacaccataacatcaacatgaaatgaagtaatcaacagtgacaactcaaacatgcatctaagactctctatatgcacctacaagtaaagaaaagagactacaatggctacagggagaatgatttaacagagaaacccacacaaaaaaaaagatgacttggtgaactagagtaagaagatgacctcccacgtctcccacagactcaaaacttacatacaattcacaaagtcgagtagttacatagattctaaccacagagactttgttcctaaagggttcaaaagaaggagaaaggtttcaaatttacattaccatgaaaaaggaattgggagactgaacaagacgtttgagcttgtgctttctcttctcaagctcagctggagcctacaaacaaaacagattcaagcaaaaacaaaattagcttagaacttttgttgtatcataaatggaaaaacctcaaaactgtagttaaataaatgtatcttgcatgaataacttattttccctatcttgtatgttcacagacaaattcaaacaagtttaaaggaatgtttttagttatccacatgatgtatgattctcagaatcttgaaagtgatctaacttattggacttcagtagtagtggcagcaacaatttcgtgttagtctttttcattcccacaacaataagagtattattgaattagtcatcacttaattgatttccaacgtttggtcaaacaagtgacggattgtggtgagaaacgattacttaattgtggaaattagctataagaaatgttcataaacattagcgaacacacacttagctccatacataaacaccaagctctacacaattaattacaagctctaccaaaaccaaactctacatattctgtgaggcatttcatcaaacacatggttggcatcaaaggaagggagagagagaataacaaagaatagcaaataagtgaaatttggacaaacccacaagctgaaatcaaagaaagcatatgcagaatcacaattaaggaatagcaaagaacaaagcgatgaaattgcatcaggacttagagaacaaaatcgatgagactaacatatgaacgcatatttcagagagaacttattctaatcaacggattcatattctaatagaactaaccggagtaggagtcgaaagagaggtcgaagcgagagagagagagagagagagcttcgtcgccgagagagaacaaagtcgacgtgtgagagagaagagaagaaaactgatgtgttgagaaaattgatgggccaaccatagaccgtatgggttagcccattatacccgtggacaaaattggtctttagaccatatgacccgttttagttacgaacattatggattgggtttagcccatggttagatgaccatttgacagttctaacttgagttatgggcctcattaggcccatttgatattcacatgggctgattaatatattaaaagaaaaaaaaaagaaatttgagaaaggaatagctaggcctagggcttcgtcaggaatctccatgaaacgcaaggacgtacagattttgtagcagccgaagtaagttaggtccgatatcgctacagtatctagattgcctgcgaagtctgtaatgaagagccacaaaaactaaagtcatttgccgaatcaaatctagggtttgtttaggaggcgccatgaaatgtaacgagcgagattgtaataacgataacggggaggaagatgagaaagacacaaacacaagtaggttagacttagattcgctccctcttgatctaaatatggttgtactagctagattgcctgccaagtctcttatgaagttttgattcgtgtcaaagatgtggcaatccatcatccgaagccgagggttcattgattacttcttctctatgtcctcgaagcaatcgcggttaaattacctgctaccactgctttgatcgtgggatacgatcctattgatgatcaacacaaagcattatccttgaagagaaaaaggtatgatatctagtggtcatctggagaacaagttatgaacattgggagatggtgaagtatggatacacattaaagatacccctttaccttatagggcgggtcatcaagcgagtgtattcatcaacggttttctctactaagctgctttcttaaccaaaactaaagagacagttttggtttgttttcattttagaactgagaaactgagttttatcaatgcacttaagggttttgtgcaatggggaagtgaagcagtattcattgaatacaaagggaagctt

SEQ ID NO: 1155 - DNA, 119420 bp, Arabidopsis thaliana
tccactatcttcattattcgtcttcttccttaatcctacatgatcgttgtgtttggctatcatcattttgacgaaactccaataaactttaaaacgattattggttgcgatccatctgttacatcgcatcccattaaaacatctccaactagaggagatgacatctttcttggttatagccaatgctgataacttttgaaatggtgagtaccatcttctaaatctcgttccatgtagacatccccaaaggctgaagttaatgactgatgactccccaacttccttgatcgataatgatatccaaggcaaaaatttgtcgaggtatattcgtagaatcaaagacaacatgatctctctccaccatatccttatggattgtctcgaaccggtgctatgaaacagtgtctgtatgaaacacttcttcaagtcgccttcattgtcaatctgagccccaatgataccaggatcaaatatccaaattacatctccgtaccatttggcggaggaaaatgacaactgccgagaacgccacttcatttgtggaccaatgatcactaattggttacaagaagaagatggaacgcaatcggagacggaacgccgacaataacacagtagtggacgtcggaaaaacgctctacaagagagatagatggctacgaggagccaacaaaatcgcataattatggaagagagagtagtatttgtagcaaggcggagtgtttttcgacggttgcgataccgacgaggcatttggtccatcttcaagggatgtgcctttccaacatgactctgtgaaatcgaaaccaaatttatatggtggtgggtagaatgactcaataacgagtcagggaaatagatttgagacaggcaccgtggatttaagtgtaggtgaaacccatctcttctcatcatcaatctcgagacccccatcattaatttggactgaagaagatgtttgaataaataaactgcaaacaaaagagaaaggacgtatggccgacgccggagacgacgccggccagaaagtaattaacgaaagggtgctttgttgggtaatcgccttctttgtcgttcagagagaagaagcggtttacagaagcatgcaccagatacttattgccgagagcagcgattgtattacaatttggcgtaaaccaacgtataaatattgttagttgggtcattcttaattagagtaatttatgagttgtgtctttctttcatagtatattattcgtcagttgaatcattttataaatctaatttataagttgggttagttttaacaaacaaaatttgattcgtttttttcttttttttttttgtttgcatcaaagttaaactaacacaatttgtaagttggttccctcagacaatgtatcgagtgaagcagaaaaataactttggttagacgttactcttcttttggcaccaacctggtaagagtatgtaagcaaatacactaccattctgtcaaggttaagaatttttggcagaaaagatttttgtggtaaaccactctccacttccctagaagcaaatagtggatagcaactattggaagtgatattttgcttgtcaatgataccgctaggcatgaataaaaaaactaaaaccaaaaaaccaaactaaaatgaaccgaaaaagagaaatctaatcaaacttgattgacaaaatatcaaaacagattttagaaccagaaccgaacacggcccaaaatacgataaatattattatatatccaaaatatcaattataattgcaattgatataacccaattaaccaaaattttaaatgaaaacctaaagatatcaattattttagactaaaatagtcaaaatactcaaaatatccccaagcttttagttatatcgtcaaaacattaaccagattttcttcaaatttaaccatttaaaaaaaaaaagaatcactattttggatacccaaaaggaaaaaactaaactgaaaatatctaaaagcaaactaaaattctaaaatatactgatgcatcctaaactcatttacccacaatattcagaatcaaatggatctatccggaattgaatagatatccaaacgtttaggactagatactagacatcgccttatcaagatattttctaaacacgacggggaagcatctttccgtcccgaagagtggccatctcagatttgaaagatagccggcgtatggatgcaaaccgcttttgatagcatacacgtgagcagattgagaggaagagagttcgccggatgccaacttcgatctctgtcataactttctgaagctttcaagaaggaaaaggcgaaagagggaaatgtttgatgaatatgaaaattaaagtgaagataaaaagaaaaaacaaaagtttgtaaagtgaacaaataggaggagagaaattctgacgccggcgagcccaagctccaccagcgttggagaaaactattaggattattgcctcaatattagtgctagagagagtttttctttttagttataaaagagactttttaaaaaaatcaacacaatttaatttatttaaaaatttaaaatcatgcatgaattttttcttatataaaaatttgacatgttttaacttattaattaaataattctaatttaattaggtacaaagtatattaaactcaaatataaataaacttatttaaatttagttgtataagtcgtataaatttatgtataaacataaaagcaatgaaattttaaagaaataaattaaagtataaaacttcaataatatgacaagaatttatttcatgttttcatattttaatatatatatatatatatatgattagtgacaatgaatattagtgaatttaatatttaattatactaaatcaatactacgtttttgtttgtttaaaaatactttaaacgtaacaatttttttaaaaatgtaagtaattgtaaataagttttaaacaatgtaactgaaaaatttagaatgaatcgtttactcgagagttaaaaaaatacattaaaatgataattagaaaaagcaccaaaaatattatttatcaaataaaatcaattggtgtaaattgtttataactaacattttatggatgaatgaatcatttactcaagatttagagaaatgcatcaatatgatagttagcaaaaaaaaattaaaaatattatttatcaaattaattcaatcgatgtaaactgttatattcatatattaataaatatcaaaattagaaagttatactttattatttattgaggttatactttatattaaatggagaaaccagcatttgaaaagtcaattacagtttttaatacttttgtctcccggcgaggctgagttaaaaaagtcgacagtctttcgagagtaaaccaacctatggctatgggtcttttttcattgtaataatttgtaagtcgggtcatttttaataaaaataatttgtgagttgggtctttctatatagaatattatattatagaaagaataaaaaaaaaattattcgtggtcattctatatagagtattatttgtaagttggattattttaaataaacataatttggaagttgggtcattttcataaatataattaacaaaaataataataaataaatataaattataagtttggtttggttgtggaatgaccgttccttgggaagggaagctgcttcgacgccttgtttgggaatcatccggacgaagcaacgtcaaacatcgcggtattattggcaaactatcatttccaatagttgctctccactctttgtgttgagggaagtggagagtggaattccacaacaatgtgattaatgaaaaccgggaggaaatgttagcatatatgggcgtacaaggcacaccttaccagcttgacgccaaaataagagtaacagtttgccaaagggattttgttgatccactcgatatgttttcggagtgaaccaacgcacgctccctacttatcccaacttatctatgtaactcacagagtcatattagtaaatcggaagagatggtccgtatctatttgtggcacatataaaagtaagaaaattagcatgaatgaaaaataataataaagcgagtacgtgtcttgcttccttataccgtgatgagttcatattttggatactaattagggatcgacacctggttgggatgcgttcgaattcttgttcgaattctctcagtactaccgattcgtattcgaagattaatatagaggatccagcagatgattctaaaggatatcggctgaagtacaccggttcgaatcagactatttatcttaatgatattattggcaagaattctggtgttgcagattctggaattttttcatggaggagtacaataagtatttatataaatatatatataaattatatcaagatacaatgtaatagtgatcatttagggatagttcaatctgatggatctatattatattattatactattgatgcaacaatgaaagaaggaggaggccttacacttaaaggaattaggcatggagctgagcgtactaaagataaagatgaagaaggagagggcgcaacccaaaagtacagggaagactgatttagtcatatgactaagtctcgttttcccttttatttctgttttcttttgcaaataatacagtggctttatgttcctatctctgagggctaaacccacgtttccttctctgctttgtgtttcgaagtgtgtaggagttgagactccattgtgtattgaaaataaaacattgaataaagaattattttgtttgcctattggaagattttttcttgtgaatttctattgtaaggtagatatcacttgaaaaacgcaaaaaataaatttgttttgctttcaaagttttaaacaattttgacaagccattgtccattgaatccgctcggaataagacaaatgacatttgaaattggagttgcatttgctagcactaaattttatctttatataatttgcagcttgttgcttcacgttctcagggtctttcctactcaaataaaatatttgcatggatgtatattttttttttggaagatcggtctatacatccgcacgaagtttgaatactctaggtctctttaatatactttgcattgagattttgtacgttcaattcaattagtaaacgtgacttaaatcaaaattaactaaatcgactttgttaacctataccctacccgaaagggcgaaagagaataatgaacgaccaatcattattgtattacatttaacaaaaataaccatcaatattattctgatctcgtttcataaaatcgcacattgattaataaatcgtttacttttagaaaacgtaataatatgcaatttgcagcctaaacttaaaaaaatggttagaaccctcatgggattcttccatctccaatggatagtctaactgtttaaccttgtaaatatggcatattattacgtttatggagaaccagccaaatcaggtgaaatgtaaatttaaccggaaaattaatataaccaaaacatacaacaatccaaaaaccttttaaaacaccccaaaattttctcaaaaaaaattgtatacattttatcaagaaatctccatttaaatacattctcgattcaagctcttcattccatattgtcgattacccatataccgggcgactaaggtaaatccgtgctggatttttttgtaaatgacagaaaagagtaaagaaaaaccagagaataagaagaacagtagcaaacgttgtccaaatcacaacgatgggcaggagagcggctagactgccaaacaagatagcttgtgtgtccaacaagactcgggactaatccgggatgtccacgactttacgatgcaaagaacatagcttagaacaaacactcataaatacaaactgtcaaccacattcgcaaccctataacactttagagccatgatctaagaacatttagctatgagaaaaattaataattgcaacaataaaatatatgtatttttatataagtcgacccaaatagatcgtataacatcaactaagaaaaaatcatgtaaaatgtaaaatgtaaaatatccatctaaggaggagccataccactcacgttggctttatgcagccaagaagcatcaaaatagcaaaaatacttcctcaattagtgtcattaatatattgaagtgtctgatcaattaatgtttcaagaaaaaagataaaacctttttttcatcaaaggaaaataatataaccttttttgtggacaaataaaagtttaataactagtaacacaaaattgcatacaaatataatgaaaattctgaaatatatttgtttttgttattcgggccaagccccagaccacaaacgaaaatcaaatgcaggtttcattgtccaagtaaatataataaaataatgataccattaaaataataaactaagctagtcttcgtcatcagaattatcgaatgtgatcttcgtagctttaggagcatcagcagctatttctttgaaatgagctccatacaattttgattcctgcaatttttaatcaaacaaaacactcatcaatcactccagaatccagatgatgaagaagaagaagcaatttgtgtggagaatcaaaaatgtgagggaagaaaatcaaacctttttctttacatgagtgccaaacttcaaaagatcagctggcactacttgtcctgcttccctaagaacattcacaagttctcctgcaagaccctgtaaggaagatacgatcaaatttgaatcatttccattctcaacaactctgtggaaaggatgtagctcaaagaaatttttaaaaagagtgttttcagtattaccttgttcagtggcgtgaagaaggtgtgtgcaacgccctttttacccgctcttcctgtcctcccgattctgtgtacataatcctctgttgttaaagggaaagtgtagtttatcacaacttccacgtccgggatatcaagccctcttgctgcaacatcagtagccacctgtaatttataaaacagtgtcaatgctctgtttcagaaccagtcaatgtatttttattagccatggaattgcggaatgataagagtacgcataccagtaacgggcaggatccttctttgaacaatgataaagacctggtacgttcgctctgtgctttgtttccgtgtatagatacagctttccaacctctaaaatagttgagtaaatatcgaatttcatgagcaataatatcaaagatctttttctctttagttgatgtgatttgggctaaaagatcaaacctttgctgaagaaaacgctcgagacgttcagcttccaccttgtataaagcaaataccaaaaccctgttcctgaaaataccaaaacgcttggtattagtatgttgaaaaaggaaagatctggtaagagttcaatgattaagtagcaaatttacttttgagatttatggtatttttctagtaatgcaatgagacgctgatcacgcgcacgttcatccaagacctgcatttgtaaccaaaccttgttaagagtatcatataaaggacaacactacttgctatgaggatgatccgatagaacatacctcaatgatttgcataacgtcgtggttggcagctaagtctacagaacctatgatcacctgaaagaaatttgaatgatcatcggaaattttaagcaacttgcaggtgaggaaagacaaactgaggaggaaaacagaccttgattggatttggatccatgaattcctgggccaatttgtgaacatccaaaggccaagttgcactgaacataaccatttgacgaactataagacagataagaaagaagaagagttttcattacaatttagcacatatatcaaatttggcttctcacaagaatgctaagtgaaatgtaaaaaccacctgcctttatttgtgttactcaatataaaccggacaggttcctcgaaacccatatcaagcattcgatctgcttcatccaatacctgacatgtaggaacttctgttaccatctaataactcgaaaatatgattcccgttgtttcattataggagcaagaaacgatgcaacgactatgatgatgatcctacgaggctaagtcatcaaataacataatcaaaagatgttctgctgcttacgacaaaggaaacatccgagagacgaagcacattagactcaatcaagtctctcaaacgaccaggcgtaccaatgacaatatcctaacaaataaatcaagaaaaaacattactcaactgatccagaaacataagagaatgtcctaatcaaagaacataataagaaatcttacaactccagatcgaattgcacttatttgaggccctttagagcttccaccatacacacaaatcgatttcaaaccacacggttctccagcttcacgcaaaacatcagaaatctaccaaaccaccaaaaacaaacacaacactaagaaacttgaccatacgttttcattttcacattgtaatcataatgaacaagaaacaatatatatacctgaacagccaattctcgtgtaggagaaagaactaaacaagtaggattaaccttctttgatcctccaccaatcttcttatttttcttcaacacatgcataatcgcaggaatcccaaaagccaatgtcttacctaaatacacacaaaacacaaaaagtttcaatcttttcaaccaaagttcaaaactttcacacttccataaacattactaacctgacccagttttcgcaatcccgataagatcacgcccatctaacaaaaacggccacgtatgtgactgaatcggagacggcttctcgaaagtcttacaacaatctaaaacattctccggcaaattcgattcagcaaaagtcttcaaagctgcgtactttgcttcttccacacctttcccagtcacaacaaccttctgttgttcactctctccttctcctaaatcctcagcttcaagcttcttctccgggacatccttcttcttattcttctcagactctttctcctctctcttacgtttcttcttcttctctttattactcaactcttcctctacaccattagtgacctcttgaggcacttcttcgacttcatgattttcctctgtatgtttgttcttcttgcttttcttcttcttcttgttggtcatcggactctcgacggctaaaggttcgccggagacgggaagctcttgcttttgtccagccatttctttgtttcgtttacaggagagagttgttgatgaaacggccgaacgagagtccgttgttcaatttaggtttttagggttttaaagcattgcaaaaatattttctacaattgcaattttgcctacatagttttggttattacatagagagtctagacatctcttttgttaaagtaaaacccaaatttaatttgatttgtagatcgataacaagtctttaaagcctcccgaacgttgcataccaaccgtcggataggggatgacccatggacgcgaaagaggacgtgagacccactggtaggggcggtcggggcgttacagcaaaatcgcatgtgattgttaccagcaatatgagtgtaaggcaatttttggatgtgaagtatacaacgatgaatctgaatttatttctgtcccttgaccccattgttgatgacaaccagaacacactgattaaaaaggactgctccggtcgggtggataaagacaaagggatagtaggcgatgcacaagtcttttatactaatggcttcaaaatgtctgctatggtaacaaaacacaccaaccggagttacctcaacaatccgacaagtataaggagaaaattgtttgacgacgctggtgttaagggttctaatggtgttgtgcgatttcactctgtagaaacatccaacgttgtgaccatttctgttgtgaatgatttctacaacaacgagatgggtgacgatggtgttaccaatgttactggcattataagacttgcaaggagcacaaacggagattcaaattgatgattaaaatcattcgacggttaaaagtcaaattgaggttagttttgatgatcagttctcatgtttggttcttcacaaataacataatagagctttaattgcgaaattgatgaattttcatatggaattttgagttgtttatgtgtcatcaaacatggaggtaaatgtagttgtgcttatgtgtattttgattttgtcgctgatacataaaaaccttaatatttttcatcaaatatagaaaatagaagggtgcaaattgtaataaacaaaagattgatctaaaacccaatgggcttattagccttacatccatatccaaacagacccatttttctcacttatctcaccgatgtgcctcgccggagacgccgtcgttaggacatgataagattctgaaatgatcgtttccatctggtcggattgctcctgctttttttctcctttgccgtagactacggagggaaaccaatataatggtaaagtttcgagctttgtgttttgtttccgccggagaattatacaatttactgctgagaaaagagaacattttaatcatattctctttttaattcgtgatgagaaggagttaatttgttagcctattgagtgcttataatgctactataaaaagagctattgatgttctgaaacttaacaatgcagagtaatctgagatcatggtcatggacaagcactttggaggctccatgaaattacagatagaaaactcaaggtaccatctctttttacttctcgatgtttagttaaattagtttggttgtgttcaaagttcttaagagtttagacagataccagagtgacagtagtcatgccttagagtaacagtgaacaaacagagaacaaaggactacttttgttttgttttttaatttcaaagcatccccgaatagacctagattggtgtgtgttccacgtcattatgaaaggggtatagggtggaggtacaaggatgtcataaagtgttcgattttgcccttgggttcactgtatccatcaccttccgtgtagaacacatcgaagatacgtgcaatgttgaggcatcgcagaagaacttgacgcggcacatgatcatgtgagttcatgaactcctccacaaccacttttttgcggtatacgtacattttacgcaactctcgggatgcttcctccttggtaactccatattgtttcatgtaacagttgagcccattagccacctctcctctgtttatctcagtctacaaaaatatcatttcttcatgaaggactaaaagaagtgggaaatagaaagaaaagaaccaagagatccctttgatatgcagtgtacctcgtaggttcctacgtcatttgctagacggaacattgcagtcagatgtttgatgattaagggattagaattgagccactcaaaagcttccttctcgttgatatcttccattcctataaagcaataagctgcataatcagccatcccggctgtcaataccccaaccttcatgtactcgtcaaaggttgatacatgacccgtccgtgcccactttgctatctcttggtacgcttttgtaatgatcttgatctgtgtatggaagaactaattaaaatccactaactatgagcttccgcttcatcactaacattatatatacatacatactggttccaaattttgtttgtttggctagattaccttctctaccacttgtttcacacggtacaatcttcctaacggtctcatttctcgttcaatctctcccatgacatcaaacaaacttccgaggacgattcgtaaatagtctggtagtttatcactgacctcaatactccacctggtcataccaaatttttcttcccacgagtgagtgagtgatgagctgagtatagagaaagagagagcgagagcgcactgagtacctctgcaaacattccgtaagagctttaacttggggaagggttgcatatgcgtcatatgtatcatccacaacaaccatgatcatgttgattttagccactatgatccttccaagagaatagtgtggctcgaagtacggtcccagagccacgagatggctctctacaagtctatccctaatgtaaggtagtttagatgcaagatctaagtccctccaccatctgcaaccataaaaaaaaaaaatatgaattgagaatattaattgaaacagagaccagtgtcatcaactagattgaatatgagtatgtcacttggtgagcgttttgagttcttggacgtaatgaaactggcaaaagttgaagttaagcttcgcaaacttgagcaggatctcgtcgtgaccttcttcttgttcgtagtaagatatatattctcttgccactagtacttctatgttacagtatcgaggtatgtataatgagttttgtatatgcttcaagagatggggactagcagtggatgcgttaccacttgtcaaagactccaagtgattccgcgtgaaactcagtgcttcgtccattataacttcacagggtgttccgagatgcgcaacttcgaacaactgtagcattcctctaaaatctctgactagactctccttgaacctcccatcattacctctgaatctatcaaaggcatctacaataaaaccacgtaggccaagtaaatacatattttttttaagttatgatatactgcgtacatgttatgtgaaactatgaaactgatatatcttaccacaagacatcttatgaccgtatagcttaaagacctcaaacatgatggagattgtttccaaatcatcttctccaactataatgtcatctaactttgtgaaactgtgtttaaggatgtcttgaatctccttatcaaaatgataagagatccccatgctgacaagcaaatggatgaggcgaatcttctccttgtcgctgctttcagaagacatgagcttgtctctcgccagcggcttcgtagtttcaatctctctttctagctcatcaaactcctaggaaaaaataaaagaaaatggctggttaagaactatggtttcagcagcaagatcgatacgtgaaaaagggttacatgcacctaccacagcgcggttgagggaaacagagaggaagtgatctccccaaagagaaggagaaaagtgcggcgttggaagactactctcaagatcatcactactcttcttagaagaacttgcaacaaaaaagtcttgttgttttgcgggtttccaagaaggagtgtggctgtgaagcaaacgttggcgaggaaagagacagcgagtggtagtgagacaaagagggacgctgtgaacgttagggagaccaaaacctattcttattgcttccatgttgttattattagtggaactctgtttttaatgtttgatgtccatttcaatcaaattactctgtttaaataaataaaccctatagatgctgatcttgatttgtaaaaaaaaatcagctaacagctaatcatattatcgattaatgttggacacatgtgagtcgggaaacatgggaggaaaaatgtcagaaaacgataagtttattttttatttaatggggaatccaagctatcatgttacttagttaaccggtcacgtgacctgttcaatctctctttctctttcccaagtgcattatgaaccacaatgggtcgtactcttgttttgcttgaagtactctgtttttatgttttgtagctactgcaaaagctttctcatatctactcttatttcccggtacatcacatgtgtcaatcaaaacattcgcaatcaaaagctttctcctttaggctcgtcttctatatgtgatgcatctgagctttatattcagaagtccgagattagacatgccttaagctaaaatatcgacattttacttagataatttcatgatgagataaaccttgctaaaatatagactataaaattataaatacgccttacatcgtcctttattaacgttgttttgggaggggtaagaaaaacaaacatacacgtatcttactatatatctaaaaagtgttttcaccgtatcaaagaggaattggatggatgaacatgtcaagaacactttgaggttgtaaaagatgtttcttattgaagaagataacaaggcaatgccttatatacaaataaacatgtttaacctgatcgtgtgtatattgatgattgttatgaagatgaggccgtcttgcgggaagtagaagaaattgaggaaaggaaaaagtttgcaaatattagtgaagataaatctgaagattcgtttacggatgagattctaggatcagggtcagacgaggatctgatacaggattctcaatactggactgatttgtttgacgaacagtaccctctacattggcctgattccttcttggaacagtattttgtatataaagttcacaacaagtataacaataccaaaaatcgattaaaggttttacatcacaataaaaacaaaaaacttctcaccatcaagaaaaaacaaaaaacactaaactaaatgttgccatttttctcacataaacttatcactatttgaatgtagtgatatataaataacttttgttacataatatgaatagcccacactacttgtcttccacatcctctcatgtagagtagagtcttttagatgctaaacataaaatgaaatgttttttgatatttaattaaatcatcaattaaatattaaaaaacataaaacttctccaaagttagataattcaccaagtatgtcatacaccattgttacaaaaaacatattatcatctttgtaatatgggtggcctaataaacagactatcatatttgttacattggatttctattcggcttggagatgtgaacctctagtggtcgtagcgtaatagtaaaaggttaatgcatatgtcataaactcgattttttcatgggtttgattctcgtggataagtgctaaacttttattttgaccagtaaaattttttagtgttccggtctattaaacaatataatatggtgagttaactacacaatgtttacattatacactttctacgaaacagttaggatagcaacatctcggatcattttagtgccaagtgaaccaaatccccctaggaagaaagtgatgaactccacattatatatatatacgattttcttgttgtaaattactaaattccataattgtaattccaatgatgtctattttatttaaaaacttaggtggaaattttaaatatagatgatatattagaaaaagcttatatattcttaaattaatttaacatgaaagagattgatgatatatgttcgtacttaaagataacaaagacaaattatcagaaaaagtttctaatttcatgttgtaaattgtttcaaaaggttgaattttatcatcaaaaatacaattagcatgaatttctatatttttaatgatgcgacgaagaatattttaatgttcaccacatatctttcatctgtattctttatttctaatgtaaacttttattaacgttttatcaatgactcaaaagaaatcaaatttgtcaaactttaatactagttgttatcgaaggtttttagttaaaagaatatctcacatgtcaattatatgtagtgccgtttttatcttgatgcatttttttattaatatgtcagtttgttttactattattaactgactaatcaaacacagaatgcaaaaggaatctaataattgagaattttaattagaattgaaatcatataatttccatgatctattatatttgactaaagacaaagggtatcatcacaagacatgtaaactgagagcacgtgggtttcgtctagacgacggataaactgacgtttttggaaatacctggattcgattgtggatttccatctcttcgatacacacatgaacctcagcagcgatttcgccggaactctctccaggacacactctacgagatcgtggtggagcggttccacaactaaggagcaaatttttttgtttctcattgtctttcttttttttttggtgggagtttctcattctctttcagttgttcagataacaccactattgatgaagagtcttgcttcttatatagagttgtgctctgaatcgaaaaaagggaaaaaaaaacaaaacaaatggaaactttagaatcatataaagaaaatttcaaaacaaaaaaggaaacttcagaatcagaaaaggaaatttcaaaactttagatttttgtcttttgggctttattttttttgggccttaaaaatcgacttccatcacttccattaaggaataatatctttgcatcaaattactaatgtattttatggttttaatgtgaagaattactaatatatttcttctttttttttttttgtcgaccatttccattaaaagtccaataaggccaaaatacagaaggcccaacattacagcgaaaattaaactcatgtccaacccaaatcgtttgaaaatataataaaacattaacgcaataatgattaagtgctgacacgcgtggaggacgttttactccccttcgccacgcgtcgagacaaacgagctccaccgttggaatcgccaaacaccactgcagttctgatttgccaccatcaatcggccagtgaccgatgaagatctttgtgccttctgtcgatctcgaatgcaagcgcctagatgtcgatattctgccggatcaagtctaaagagctgcttcaaaatctccaattagcaccatcgtcggggaagcttcatcattggctacacccaaaattgatgtagcttgatctttgctcgtacgttgtgaccaaaacgaagagatgaagatgttattcctcaaacaatttggtggaaacaaagagaattatgaagaaggcggagatgtcgacaaacgcttaagatggagatctaagctcgtcacggcgagagaaccggacaaaaccggtgacaaaagtctgacacatagccagaattattgagatcgcactaagacgaaagatatacatatccggctaaccggaaacaaaagtttatacaagtgaactctctctctctctcaaggatatgtgagagataagagaaagaggaaattctcttaattactaatatatttcttatcagcgatttgtccaaatgattcaattatataatggatttccaacaaattatgaatcatgtaattattataatatgctttataagctcattatcctcttatgctcattttacgaagaaattgcagcaaattagacaaggccaaatggctattaatcaaatatggggaggtgtgattaatttttgttttattaatcctaaaattgcctgatagtatgtacagttagatatttggtgtctaacatccatataattattttttctctaaccaaatatttttccttatttgaaatgaggtttgaatttagtcttcgggacattatgttgtctgtcggcttaatttctcttacaattcttgggcattgttttccttaaaactttcgggctttacttctaatttatcctattttgtattccactttgtaagattttagataaatcttccactgacaaaaaatgaggtttgtattggacagtgacattataaaaaacaaaattatatcaactcaacatttataaaaataacgccagtagtttattacagttatatgattcttaatcatcaattaaacacaaaatacattcattagaataatgataattagattttccaaatccaagaaaagctgaaagaggacaacaacaaaaaaaaagtaaacgaaacagagtgaaggcataagtaagagaatctgcttaagctataagcaaatcaaaaagcatttatcatccattcattcacctggagatataaagcaaccttctctttttctaagtggctcaagttaaatttctcttttgtgtttcttcgtcttcttcatacaaagtcaagaatcaaaaccaagtgagatttaatctttaaaggtcttaagaagatttcagattcaatcaaaccatggttggtatattttcaagattctctgttggtagaagcactcatcgacgaacacaaagtgcaatcgtaagctctctgtttcatctttttacagcttctatgttcgatgagaaaatccaattttagatcgatttcttatgaaagttcaatctttagatctttgtttggttcaaaacagtggaaaaatctctcctttagctcggatttgaaatacccagattagattctacactactgttcatgatatgcttgaattcgtttagcttgccctaaaagctttggcctttttcaattgtacgaattgggttttgttagattaatcttagttattgaaaaatgtcttactttgaccaggatgataaggaagtattggctccaaattctgatgttattgcagcaaccaccacaactgcaactactgctactcatgggattgaagtagctacagagtttaaaccggtggaacatccggtcgagccgttagacaacgatctaccgattcagtgtccattacctgaaccatccattctaaatgtaacatccatgaaaaagatggttctttgttgttctgtttatagaaagctcttagttttgagtttgtaaacgtttttgggaatttttgatgaaacaggatgggagaatctggaaggagagagtatcagcgtctatgaggagaaaaggtgatttgcagattgtgaaagatgaggctgcttctgagtctgatggctcagcaccgaaaccgcctcgcccgcctcagccaaatcgttcgatcttgccatcacttagtgcccctgaacacaacttgctaaatctactagaagaatgcaatgcgatgccaccggtaacatctaagaatggatgaacaaagttgcttaaactcgatatttatcacaccgatacaagattgttccttacaaccactctcgaatctttgtttttcgttgtttacgatttttacttatgtgtgtgccagaacaaaaccaaatcatagtgtatgttatatagattatacaggcaactaaaattcattaagcttctgctctatgtacctcaacaacaccaatattctacaatggaagtaagagccagtttcgtctaagctgtaaatagagaactttaaacactttaactgtgttactttttataggaactttgctctttaggctttaacttttgcagtgtattattatgcatcgagttcttctcaagtaaatttcactatcagcattatatatggtaagagagaaaagtactttgcaaactcaaagaaactttgtttatccactttggttttttacttcaacattaagaaaatacataagagactttactccttatattgcttgcaagaactgatctttgtatagttaaatcttcaattcaaactgaagattcaggaactgtgtaaacatctaccactgtgggattcactagatgttttcgtggcccacgatagctcccgtggttaatccttgctctttgattgaatcctccagcctgatttccttcggtggcttcgcggttcatcgcataattgactcgagttcttgtaaaatctgcagaaaccataagaaagtgaaggatcaagagaacaataagaagagttggtgtagaagatgagagcttcaagtgacccattactcttttgtttttctaaaattggcaatatggatgtgaaagagagttgaaatgatgacaataaatagaatgcaaaaagaaagaataaaaggagataagatggaaattaaaaacctttgctttgaattgaagttactctcatgactcacatgactctgtttgtgcagttcaccaaacttcctactctttgctacttctaaacatataaaatatcatattattctttgtccaaaaagatcacaacaatttcactgattatgtatctacctatcaccttaaaaagattggatatgttttattctctagacaaataactaatctctctactagctttcaataactttttttcttaaaaccttcatatacattatgtgtaagaaaatctcaaagaaacaatttggtgtaccaacttacaaaaccttggcattcaaataaaaaatttctgcgattacaaataattttatttttcttcttcccacattatctctctacttaaaagttaaaaaataacaacaaatcatttaatcaagagtttcctcatggagatttaatattttactcctccggtctatatggtgatgaactcatatccgtactataaaacgaatcttctccaccaccatttaagtaactctcttccttctcttcatcccatttcaaaacctctctcacatacttaaacccttcatccacattcgcgcggtccctagcccgagcttgccacacaaacagtttctgacccgtgatagaaaagtaaagaagcttgaacttcattgctacatagaagtaagcttggtaagctagtgactgtacgttgttgttcgttctcacggggcagaaatcgctgaaccagtcacaagatgttaacggtgcacggtttagcttttcttcgaactgatcatacttgtttaggatcaagataaaaggtgtgtctttgaaacaggggtgcttaaccattgattcgaaaagttctttgctttggatcatcttgttctgatactggactgttccactgctttcgggtgtgatgttgatttgatcgtaatcgcttaagctgatgcagaagatgactgctcgtacatcttcaaacatttctacccatttgcagctatcgttcattccctttgcgtttacgcggataagctggtacctgcaacggaaaggattgaaaataataagtaccaaagcttgcggttcaagattgcgaataagtgagtgttaaccgactttggctgaggagatgataaggcgtcggggttttcggggtaagattcagacattggactgtgatcactaagagaaaactccatgaaagctaatccatttccttgtgtaacaccttctgcgtatacaatatctcgctccgaaggctcatactcattgctcgatacttccatggcctgcaaatgaagcctaagttaacacttgaatcattatggaaaagataacaccagaacctaaacccgggtttcgttcatacccggcttaagaagtattccgcgacatcaggaaggaaatgcagctcatcttttcgtctatatgttgcttgtatagccggatctttccaaacttcttcaaccaatggagcatattcacgtgttgcagctgggaaaaacgcatcgagatcaccagttgctatgatatctagaagccaatccgaaaaatgcttcaacctcgggttcaaggtatagacgctttgtggtgtagtgacagtaccctcgtcgtttgcttcttcccctgcaagaaaaacatgtcaagaaatcaagaaactcatatatgaaagccaaatttaatcgttttgtaatggataaatggtacctcctgaatctccttcaacggcgtttaaacctctcgtatgcgataaagcttcctcttcaaatcgttctcttccatcgagtaagatactgagatatctatacatattgctttgtaccatcagcttaatatcttgaagctcttccactgaaaacttgtttccatacaaaaacttggcctgtttcagtcaacaagaaatctcaataagcaaccattgaatcttcattttttccacattacatccattaaacattacctgtttgaagatagtgctagttccagaaccttcaataccaagaagtagaagcttctgaatcttcttatgctctatataattcggaacagtagcataattactcgatggttgcaccgttccgcgaggttgtccttgaggaacaggtaaagaaaacagcgcacacatgaacctcgtagatgcctggttaaaccaaaccgaaaaaactcgtgatatttcttaaaacagcaacacttgataaggatctgatgaagagttattatattttaccttctcccaaatgtttcctcggatattattctgcccttcttcctcataacgtccatcgtcatatacccaaaaatgagtatcacgtggacactgtacatttgctagctgagatatatacacacaagcaaggtttattatattcgattgtttcttgacatgtgatacttaaaacaagacaatatcaaacgttacctttaaaatcctcaactcaagctttgtgatctccctaccgttaatataaacttccgtgttcccattgctcgcgtccggggacagcttcccggtgaagttcaagttcgagctaatgactctatctggtttctctccttcctgtttacaacaacaatagccaataaacaacaaacaaagcaatttcaacctgaaacaagtaccaaaaccgttacatatatagtagtacattaccttgccccatagaccagattctttgtcgtaccaatatctaccgggtttcaacttctgaggcggtagaagacagttgagcaagtcagccatttcctcaggctttaatggataaccattcacaatcagctgctcaggtctcagctgattagcagtacactccttttccgccttcattatctgtttaacttccaatggactaagcaaccgcgacaatacccgagaatgcttccctaatttagaccgtttcgattcgtcaatagcttgaccgatgcaactcacacactttcttccttcaggcatcgaacccattgctctaagcacacagtttccacaatacttttcatcacacacaatgcaagtctccttattttcccatttcgcttttccgcatcgataacactcacttttcttcttcttcttccgtctcttcgtacttgcagtacactcatgaaccttcctctccctctctgtctctgcctccacattgttatcctcctcctctgcagcttctctaccttcaattcgatcatgatcatcgacaggtttgaatttcacaaccggtctacgaacctgattcccattttgtctatgaccagaaactggtgatacagaagctgagccagatgatgattcagggttattatgcaacacagagaccacagactcagagctagctggcgaacctcccgaagagcttgtgactcctcccgctatacgagagaccggtaatggtatcggattattcacacgaggattaacatcaacaggtgaaactctagggatatcatgaacaggaggaggaccagtgtactctaaagctatagagtaatcaaattccgatggatcttcaggtaaaggagctccaggaggaagcatctttctcaccatttctttccagctttcaccttcatctttcttctccatgtttttttacacaatcaaaagaagcacaccaccaatagagaaaattacaagatgcaaccacaaatcacatcaccatttcctctgatttaagacaaaacaaggttcctggttcagacacaaagacgataaaaacaaagaaagagttgggattaggataagtatatgtgttaccaaattggctttagttttgtcatatgaataaaaatcaaagtcaaatagccggcatatatggacgtttcacgagagagcattgaaacctaaaaaggaaaagctttttaaattgacattttgacaaattcatggtcaaatcaattgtccatgaaaaaaattaattcaacatctaaccaaacccacttaaaagtttccagctttgaacgcagcctatagaagaaaaaactaaaagggaaaaaaaaactaaactggttaattattctaaatccactaccgaatcgaacttgctaataagaatacatgcagcaaaatttcagatcatgactgttgatagattaagcaaattcatgaaaatttcaaatagaatgaaacaaaaaaaatgagctgtgtctctgaaggaagacaccaattaaagcaacagaacaaaataaatcttttgcaaaagaagatgaaaaaatcttaccttttgtataaaagtgagaaacaaaaaaaaagtcgaagctgaatctgagaagacgaacacagaacaagaagaagaagaagtaagaggaatctgttttggtagctgtgatatttgttttatctctctgagaaaaagaatctggagaaaggaaacggcagagagacggtgaaatctatagagagatgaatcgataaaaaaggacccacgagtcttacatagttcgtgacgatggagacgggtggtgaaagcgcgtggcaatcacggctcgttttctagcgagtggttcacattgtcacgaccaatctaataatttggttcctacacacacacacactagttacgtttatcccccacgcgcctgtatgcgtgtgtgtttcaaatctacactacatactcacacgcttgaaatgtaaaaaaccatatatggaattaataattattaataattaatacttttctttttttcgtcaacgttttaatgattttatatttgattaaacttaattacagttaatattgatttccaattgtgtctgaaaaccgttgagaattaaattagcattcgtatatacaaagaactgtatatgctaactaatatgcgcataagagttgtcgaatttttttaatatttgaaaattcaaaatcagagtaagcatgtgaggaatgacattattattgtgttctgacgttgtttggccgtatattcattcacatatgtaatgaggttttttgggatgatttctaaacttatataaatgggatgatttaaaaagtcttatttgtttcacttgttcttagtggagttcaaatgttgacagaaaccaaaaagattatgcgccaatttagataaacctaaacaacatactatcataagaaaagttgtaattagtaaaaattaatggcgacccaccctgtctattatctgttgactattgaacccaaaaagaaaaacaacttataaacatatccgtgattaggataccataattttggtatcttgttattctcacttcaaaaatgatgattcaccaacatatctatttcactatttgtaaaacgctttcacaaaattcctatatcctcaattatttcagttctatagttttgtgagaagacttcatttgtcaaaagaaacctgttttggtttccgactacttgcccgtgactcctccaatttatgtttcgattagatcggtttagaagaaccgaaccggattgaaccacttgaaatcgtgtttgaatctcaattttaaggagggtcccaacaactgacacatagcatggagagaaaatccaaagcaccccactctcttttctctctcactaatcacaaacttatcagaaccttcaaatacttttacttgtggctcatattttccatgaaaatctcgagggatgagattcaaaaaccctcattaaaaactttcaaatctttcttatataatcatagattccagaatttgacattttcggacaccaaaatccctagtttcttaatggttatgaggagaggatgatcaaggcaccaattctacagtctctattggcttctagagacgatttaactcataacccagaagtcaacaactttggagggaaagagcaagaatgtttatacctcttgaagagatgccacaacatagacgagttcaagcaagttcacgccagattcatcaagctaagtttgttctattcttcttcattctcagccagcagcgttctcgcaaaatgcgctcactcgggatgggagaacagtatgaattacgcagcttccatattcagaggcatagatgatccttgtacctttgatttcaatacaatgattagagggtatgttaacgtaatgagtttcgaggaagcattgtgtttttacaatgagatgatgcagagagggaatgagccagataatttcacgtacccgtgtcttctcaaggcttgcactcgtttgaagtcaattcgagaagggaagcagattcatgggcaagtgtttaagctcggtcttgaagctgacgtgtttgttcagaatagtttgatcaatatgtatggaagatgtggagagatggaactttcttctgcggtttttgagaaactggaatctaaaacagctgcgtcgtggagctcgatggtctctgctcgtgcaggcatgggaatgtggagcgaatgcttgttactattccgtggaatgtgtagcgaaacgaatttgaaggcggaagaaagtggaatggttagtgctctcttagcttgtgccaacaccggtgcactcaatctaggaatgagcatccatggcttcctgttgagaaacataagcgaactcaacataatagtccaaacttcactagtagatatgtacgttaaatgcgggtgcttagacaaagcgttgcatatatttcagaagatggaaaagaggaataatttgacttacagtgcaatgatctcaggacttgcgttgcacggagaaggagaatcagctttaagaatgttctctaagatgatcaaagaaggtttagaaccagatcatgttgtgtatgtcagtgttctcaatgcatgtagtcactctggtcttgttaaagaaggtcgtcgagtcttcgcagaaatgttaaaggaaggtaaggtggagccaacggctgagcattacggctgtcttgtagatcttctgggaagagccggattgctcgaggaagcattggagactatccaaagcataccaattgagaaaaatgatgttatctggagaaccttcttaagtcaatgcagagttcgtcagaacattgagctaggccaaatagcagctcaagaactgcttaagctaagctcacacaacccaggtgactatttgctgatctctaacttgtattcacaaggtcaaatgtgggatgatgtagccagaactcgaacagaaatcgctatcaagggtttgaaacaaaccccgggttttagcatcgtcgagctaaaaggtaaaacccacaggttcgtttcacaagatcgatcgcacccaaaatgcaaagaaatctacaagatgctacaccagatggaatggcaactaaaattcgaaggatattcaccagacttgacacagatattgctaaacgtagatgaagaagaaaagaaagagagattaaaaggacacagccaaaaggtggctattgcctttggactattgtatacacctccagggtctatcattaaaatagctagaaacctgaggatgtgtagtgactgtcacacatatacaaagaaaatctccatgatctacgaaagagagattgttgtaagagacagaaacaggtttcacctgtttaaaggtggaacttgttcttgtaaagattattggtaggtttaaatccacaaatgaatggaacaaacacaaatgagaagatttgaaatcaactttattttattttcccgcaagttttccaagagttaaagaccttacaatgggtataaaaatgcttacaccaagaaatttagcacccaagtctatatgcaaaacagtatactcaaccgaacttggtgacgcacctaataattggacactgaaacaatgttgtttactcaaggtgaattgatgaaacgcctgaagtaatacatgtggttcgtggatcaccactttctaggcaaacgccatgtggatcttctctcaccaacaaggccaaaacattgtgcgaactccatgcctgggtcagtttggtgccggaatcccctaaagtgattgcaaatatggcatcaaatccaccagctccaggaacaccagcaagtagaactccttcagcactcattgtagaatccaaaagttgagtttgagattcaggctctatctgcaattccatggtccctcgaggtcaattatgatgaagtcaatttgttctaaatgcggaatttgtggaacccgtatatcatgtatgctgttaagattctacagccagacgagtattattatgcaacagcactaagtaatcatgcacaaatggtccgttgagatctgaagcaactatcaaaacagaacaaaatcacttaccggaacgctagccgcctcacccatctgacgcataagaattctgatcctcaacatagcttctcttgcctctaagagttctttaataatggcttcgttgattggttcagtagcatgtaacacccactaaacatgagatacaaaagtcaaatgaaccaaactgccccttcatgtaaaatatcttacgaaatcaatactccacgaaaggaaatataccttttcagaagtaagcacactacaagacttaatgactcgtagataaacatcccagtggtctttagctaatttgctcagatcgtttagcttagtttccagttctaaatttgcatctgacaaattctgccagttttctcgtgccttctctggatcagacatttgccacttctttactgcacctaccattgatggtgtggaggatccaccacttccaggttctccaaggaactaaataagacaacatcttgttagtacaccagatttcacagaagtcaaagaaataagaagttggtgaagttcacaacaggtttttctaggtaagaatttaggtctgattgtttgcttacaagattcatcagtggtggtaaagagaactcagttctcttattgtcccattttcccttcaaaattgtaccaataacttcatttaatggcagacctgttactgcaacctacaaaacttgggagtcagtaaaattcccttccttagtggagaatttatatacaacaaacttctcgttatgaacctgagcaaatgacaagacttctggagagaagcgaacataacgctgacttccatagacagcacagctgacatcaaacccacttccgaccttcccttgtgcaagacaatgagacgtttgtgctatcatatggataacatctagatcagaacagccaaactttccttctttacatggatcagataggtcaaccactccaagataatgtaacagagctgcaaccacagctgttgtcattgctgcagaagaacctaagccagtttttgctacttcaggcttggaattagcaccatttgactccgcagcattgaatgtgattgatgcaaacggtgcaagggtacccagcgattctggtgtcaatggaagcccagccgattctatctattagaatatacaagaacatcaacattttgtacaaacatctcaaaaggatttgaataatcaaaggaaatatcaacaaatgcaagtgcactttagacagtttcagcaaagaaaaagatagaaaacctggttccgatatgagtaaaagtcattggagcctaatattgttatatcaagacctgcaaacacacatttaaagaaatggttactcatacaatctcttcttcatgaacaaaaatgattaaaaaaagaagcaaggacttgaagattgccttgcaataagagtttgtgcaatgattctttgtccttctcggttgccaaatgagcagcagctatagcatactgtatcgcatgctctacaaaggggtttcttgaatcactgtttattttttaagaaaaaaagaaatagtgtaagtgctccatcacttatatttgtaaaatgaaatctcacagacacgtcttgatatgaaaaaaaaaatcttatattatcgagataaaaaaaaaaatatgcagcgcatctgaagaagtctctcggatcttgccttgcagacacagactgaagagtcaaatgattcagtgacagtttatacatgctttctctcgagagctgtggtgatgttaatttgacatctgtccatttctggcaaaataagcaaacaaacaaaccaacaattgtctcacacaacatgaaaacccctcaatgctgcaacaatattacttcccaataacacataaatgagaagaggatacatacccatgcccaactttcaggcttgacttcttcgttgattggcttcacaatcgcgtaaaaccgtgcatttgtactcaacacaagccctgcatttggcttctcgagtacaaggtagcctccagtcatcaaaactttcccaggagcagaagcaacactgcatcaaggaatttttaaacacacagaattcactaatatcttttatagatgagagatttctaataatatcccgagaaaatagggcgagagaagaacttacacagccattttcaaagagtgacaaagataatcgctgatcaaaaccccagattcacctacgatcaaacaaattgcaattttcttgaagcaaaagccagataaaatcacagcgcatgcacagattcaatgtatctacacagacgaagaactatcgaacttatctatatcaattaagtacacttagaagtcgagcgaccttaaaaattctctagattgctttcgtaaatatgaaatttatcggcgaaagtaaacaaaagaaacttactaacaacctcagtctgcgattggatatcgccggaaatgatcggataatttgaaatcggcggcagtaaatgaccggcggtacgagtagtggtggtagatcggattcggactctggcgcaaggaagaagaaaaaagagacaaaaaagaagtgaaggttgttaggaatatttatgggtttaccaaagtatcaaaggagggtaaaagaggaaatttatagcaaccccaatggtaagggaccattagggtcccttaatatttttttaatcataaatttaaaattttatagtttaagggattcattttgtccctgaattttttgttcttacaatggtaggtccttaatcatctttttccaaactcaatagccaaaacacaaagaaataactaaagtccaaactcatttcataaaaccaaacacaagttaaagaacttaaacacaagaacacaacattattattaaagcatagaacacaacttaaatacttaaattatataacacacaaactcataactcaaacacttaaagtatataacacaacttatcataaacaccaaactcatttcaaagtaatcatctttttccaagtattgcaatagccgaacacacaaagtaatcatctttttccaagtattgcaatagccgaacacacaaagtaatcatctttttccaagtattgcaatagcgagtgtttaaatccaagtaatgaaatcattccagcttggcaataccagttccaaacatacttttaacacctacaataatgttgatcacggagttgataacagagactgatgtttcagagatttgagttcaagctctcgactagaaagattcgaaaaaggaccagactcgttacacaaggcattagatatagagttcattcccggaacacccacatacttctttgcatccccttcgtagacagtacacacattaaaatcagaaattgattacttggtatcaatcaatcctagtatcaagtatgatacaaacgcataggctgacaagtaatcacacttcataatctactaatttttacaataagcacaagtaaaatcaaaatccaagtattaaaatccaaaccaaatcaagttcatttcaatctaaaaggcaaaatcaaaaccctatataatgacgatctaaacactcaaatctaatgaatcataccttcagaagagattggagatgagtattaatgcaatttccgatttagatcctcaaactctccgatttggatcgaaaccggatcgaaacgtattctccgtcgatcgagacggatcgacacacgttcgccgtcgatctacacacaatcgctgtcttcttctcttactgtcgacgctcgagtcggatcgttaacgttttgacagaaactcgacgtcgtcgtcgccgatgaaaagagaagcaaaactcgtgaaaaataaaaccaaactaggcctgggagttcggaagaaaccgagaaacccgaaccgaaaaaaccgacagtttcggttctcggcaccgaggttttgaacagtagcaaaccgatcggcaatttcttttgaggatttcggtttacgggtcggttcggttcggcacctctgaaccgaacggttatacggttttgttcttcaccactccatcttcatcttccccagtttgcttctatcattatgtgttgtcttaaggaagaagaagaaggtcggccgccatgtttaacattaaaaaccctaattgattttaatatgtatgggctttcatttaaacttatgtttgttggcccataatactaattattttcgtttggcccaatatatgttacagcccacaattattttattcagcataaaaacaaaaaccctaagtggaatttattcaatcttgatttacgtggatttttaatgactacaatagtttaggaatctcgtgattctctaatatttacaaaagtattgtatcacggaatctgacatattctcacaatctttctcattcttaaggatatattattgtagagttttgttaactttgtagatatcatagtaaatatcgtattagaaatatatttctcttgcctttttaatttttgtgaaataaattgttttttcctctgcttcattatatatatcgttgctctttcacgctctcaacaacatcattattagcaagaacttgataaacagtggtacgtataaattttcttttttctttttgtcttgtttgtataatttctttcttttatgtgttttgcacgttagtttttatatttttattgcattggttgtctttgtttctttagaattgttctagatttttaaacttttattttcaataaagtaataaagtaatggagatgttggaattctggaatcccaacaaagagaatatgctaacaattggagagacacaatatctcataatatgtggacggatgctacaggagcttgatgagtgtttttttgtgacgaaacagtttttcattaccgtttagtattcttgagtttttcattaccattacagttttaatgagtgtttgatgagtgtttgtttgtgacgaaacagtttttctcttttgttttgtgtggcgtttgctttttaggaggtaggggataataatcatgatactttttaggtgtacgagtatgttgtgtatttgatgtggaataataatcattttacaaaactttcgaaatatcaaggtcgcatctattattttggaagagtctttatatgaagaaaaagctttaaactcactaaaccaataacactatactttattagagtcataaagtttgttaaattcattttatttgaataacacatgactttgattaaatttttaaaatctttaatccaataacgcatgacttgtaatgattgtaaaaacaatttttaaaataccaaaccaataacacaagactttaataaagtcttgaacattcaatattgaataacagtggatttataaagattttaaagtcattataaatgtaagaaccaataaaacccccttagtaaacataattttaaaaatattgaaacggatcttgcttatatcgcagatattatactcattccttaattatcgttgatcgttggttatatatttttaggtaaaatatccccacaaaaaagaaaaccacattaacaattgcgttaatatttctttaatacaagctttacttgaaggttacttccaacattcaagtaaaacaacatttattctccgatttgtaaaagatatggacaatatataaaattataacaaacttatttctcaaaggaaaatgttgcctatttaactgcgatgaataaattccatttatcatttgtttcctacaaataattcgatatttatttcaccttatcgataaaggaaattagctcataacaaaaatattttatccttatttgtttaagcatcaacttagcatattcttttttcctaatttaaagatttcgaatataccaaatcttctcaaaactatattcttttaaattttatatattctctaacctaaaaccatatcaatcctttcaaactctataaatacactttcatttccaagatctaaactcagcaaacacaaaatcatttctccatctcacaccaacattgtaccttttgtcaagattaaaaaaaactgtcacaaatcgattgctgtttcatttgtcattattctttctcgagtaagtcactcaattctcgaaacttcatcattaatgttagaatttgttaggggttagatttgggcttgcttggcccaaagcccaaatccaaatcaaaggcctaagcagaatgttaagtcaagagggtaggctcgtcaaagccctagaggagtgccctacacgcagagtactataaatacggaatagcatgtcctgtcaaaaggatctggatccggcttgacacgcagagacaaagagctctcatccacttgcccgtctcaaacagctcgtcagcttgcccgtctcaaacagctcgtcaacttgcccgtctcgaacagctcgtcagcttgcccgtctcgaacagctcgtcagcttgcccgtctcgaacagctcgtcagcttgcccgtctcgaacagctcgtcagcttgtccgtctcaaacagctcgtcagcttgcccgtctcaaacagctcgccagttcgcccgatcgaagtatctcgtccactcgcccgtcccgagtagctcgtttacttgtccgtccgaagtgtctcgccgacttgcccgcccgaagtaacttacctactcacacgtttcaagaagctgctcagctcatcaccttcccgccggatcgtctcgaaactgcctaactcaacatacgacataccttcagtaatggcctagctcgtttattacgatataaactacgtatggcttgatccctttcaaagggtacgtaggcagctttttacaaggttcagctataaaacgaataaactctattcttcctcggacatcaagatcgtcttccggcctcaagctcgcctttcatctacaatcggctcgttcatactccgtctatactcgttaaagagatcatcctttgtaatccgtccaatttgcctaatcgcgggctcgttattaaaagaaagatttttcttctttccctagagatcccaatttcttacttgtgtgattcgtgcatcaacagaatttgcacatgttcttttttataatcctaagattttatgtaatatacgattgttcttacatttttcgtttcagctatgttaaactatcaaccatttcatgctcctattacaaaaataaaacatgctacaacatttaaactatatgttcatatttttttcttatctattgaagttttgaaaatcgatagaaaagaatttctaattgatttgtgcatggcttctataattaccaagcgtgatgagttgaattcaaaaaatggaagccagaacaatcaatatgcgtctgtgataaatccactttcatgtctaactcactagatccaccaattttaccacaggagaacgaagaaaaacgatggagcaacaacgatattgaatctcccataggacaaaggaaaatcgagatccttacctgacaaaaatggtggcttggattgaatccagtgatctgaaaagaatttgatcgatgtcttaaactgtgaaacttaaagaaaaaaagaagatttagaagtcgcttaccttttggatgtggaagcagggacggagacaccgaggtcatcacttatcaattattgtcattgtccatcgttaaagagagacttgccgaaacagaacttttgggcattaatggaccatttggtccacaatattaattatacattgttttgatttatattaacgggcttttcatatgggcaactggcttttttgtgaatcttaaatgtaaattttcaaatatttttagagattttcgtatgatgtttttgtgtttacgtccatttaattatgactacatatgctttgacactcaacaagataatcacaccatacgtttgtcttttctttttctctagcctatacaaattattattttgatgtatactttacttttcatgttatagcttcggtttggtttgaatttttttagtttgaatgctaacaactaaagattacaataaataataaatgcaaatgaaactctataataatacgtttagaatactaataatatagataaactctattaaattagataaattaaatatattgaaagcaaacttctaaatgaactcgaataatgatttctaaataaaaatattattcaaaaaataatagcaaaatgatttttaatttaacgagatggggttatatggtatgacggattttggtcgatattaatacaagacggtacaccacgggtgaagtcatagaattaacaatcaaaatacaattataccaagcaaatataacttaaaatttaagaatgttaattacaaaatcgatccacgtacaataaaaaatattatacacagaaaaattcatctatttatatttttaaatatcaaataattaatcccgtagtacactgcaggtcatattctaggacgagttatattataatcgatatatttagaatagataaaaaagtttgtaatattatgaatatttaaatatatataaaagatacgagacatgttatattgcgtgacaaggttattttttaggaagggttatattgcgggacggagttatatgatggaacatgtttaagtcgatattaatacgaaatagtatattaaggatgaagtcttagaattaacatttaaaatatagttatacaatattaaatacttaacaaaacaaaacaaatacaactgcaaattcaatattaaaaaactcgattcacggtgtacaacaacaatattataagcaacaatttcaatagttgtaaaaataaataaatagaaaacaaaaaattagcccacggtgtaccgcgggtcatatcctagttactatcaaaactaaattacaaaatcgttacataaactactaaaacaaattattacataaacaaatatatgcgtcatatattgaagatgacatcaattaaagaatgaatttgacaatgttttcttttaaaattagatatttatcattttcgcatataaaaaaaagtatatacaatacaataaattattataaattaatactcgttaaattaataaattatttcgatattgagttgatcagtgtaaaactgatataaatcggtaaaatgttaaaatagtaaaaaagctcgacaaatcttatataaaaatatgatacatcagtatcataaataaacttatgaattatatattgtaaactagtttagtgaatagtacatcgatataattcacgccaacttacatgtaacattacatttgccattgatatcagtaggtgatgaacatataaaatagttttgattagccggatcaaccactcgtagaacacaaatctcatcttgggaagcttcttggcgatctctcgaagatactttattgcaatttggacgaataatctcactatatgatttctttgtcgatcgtaacaaaccataagtccatgcacctgataatgccccgatcacgggtgaaactatgtataaccataaatccttataacatccccatataagtgcaggccctaagcttcttgctggattcatagatgctcccgaaattggccttgaaaataaaacattgttagcttatgttttaacaaaatcaccatggaaatttttcaaaagagacttagaatagttacccggagaaaaggatgtcgagtactatggttgcgccaatagcgattccagcgaatgacccggtggcccgtttatcggttgcgacagcagatataacaaacattagattgaaagtagcgatgaactccattacgaacgaggtcgtatttgagtttgacggatatgttcccacataaacatcgcctttgaggctacaaacatcgtcgtctagatggaacacaagccgtagaactgcagccgctaaggtcgatccgagaagttgagcggcaatgtaccccggaacctgtaatacaaccaccacattacatatacaatgtaagactagttggtatagatgatatctatggtaaaatgaccaaatatgcgaaatggaataaacgagaaaaacttgatttaacaaataactagtggaaatacatattttgctgcttataattatgaatatggtcgaaatcatgaaataacattataaagatagtatgaggtatttttttacaattgtagatatctttggatcacctgattaaaagggaacttcttagaagaggcaaaggcaatagaaacagcagggttgaaatgtgcaccagagacatgaccaattgagtagatcataaccgttacgactagtccccataccaaagctataccgggaagtgtcaccggtttgccatacgtctcatttaccacgatggctgagcaaccggcaaatatcatagtgaatgtccccacgaactctccaatcaactatagagtactttcaacaaaaaaaatcaactaaagagagaacaataatgtttgttttatttgattatcatacttcatagattggaaaatcagttaccaataattagaaccaaagtcaagattgagcttgcatataggctatagcaaacatcacacgaaatataaaatcttgatttggactaacaaatatttcacgacaaattaagaaaccatatcgcaacataaaagaggcggctcaccttttgaacgaacgatacggacacaagaggagcggataaatccgacgaccgggaatcatcaatggattgatagttttcgatgtccaagacaacggtttgtgtctgagtagtaatatcagaaatctcagccattgatggaactatggtgactttcctccaagtttatggttttctcatctaaaaactcaaatggtcaactctactttgtattcgttataacttataagcaaataataaagttgacttttttattctatagtctataccgcatgttgataaattcttttaggttcatagttgacttctttatctttgtcacaaaacacacgacatggtttacacgatagttatagacttataattatatgtaaatgtaatcagctttgattagaaatgatatttcaaaacacttaatttatgtatagatgttaagctaagatgaacaaaaagataagcaaaatgtgtgtagtttgtgttgttatgtgaaggagattaattaattaattaaagattttggtactcataatatttcgtttgcttagaggtactgtgtttgtattctctctctgttctgctcccaccatgtctttgcatgcacttccccaaaccgttcccggctgttgattaaaccacaaaaccatagattccggttagtcacggtatgattaccaactttcaaaatgtatatgattagcaaatgcttagttttagacgttttgttatacctgaatctgactcgacgtagctctctagtcccatctgataattgtctgatggtaatgtaaacaccaggctcgtcctcttcaatccactcagcttgcatttcactagcattgctcatggaaggtggatcatctctggaagaagttgtggttcttgctgcatccatcggtggtcctccatgataacttcctggtccatagttgctagagccgccataaaagtgatgcgggacagatcctggaggtctgaaattgtgtcttggagtccagtctttgctttctcttgctgaatccatctttgagtacgttgaatctctctgtgactgaaatataaacttgtgttaccctctctggcttaaaagacaagattcatatagatcctgttctgaagaaagactaagggatctaaggatatatgtgtttacctgatcgtcggatcttgcaggcgtttggagagcttggcggttaaatctctgtacattgtaaagctcaacgatcttgtcatagttctcaccccaccaccgttgagcttgccacttatcaaacatctctcggctttcaaaacaagacacaagtaattgttagtttttatctcatgtttcagcgttgaatgccatgaagatatagagattgttttgagtagttcaaatacctgaaacggatccgtttgagatcatttcctccagtgggaagagaagcaaatgtgatatgaacaccaggttctacttgagccatccactcttttggtccatcatcatccagtacaacatcacaagactgtgcagagatagattctcgatcatttccatatattgaagtgaactttgattctaaccgtccagctggatgatgagaggagtttgtgaagtcccaagcaggagttgaaccagcacttccacccatgaaagggtatggaacaccttcagaggcattgtcataatccggaaatgatctatgtcctttcttcaagggactactagaggaaccagtgcatggcttgcattgtttataagcaccagagaatttcaaagccatatctttaatctgcgtaacatatgcacccaaaaagaccgattacattcaaaaactttatcttgtttatcaaagtaatccatttaaacacacaagaatgttgagtataacggtacacaaacattataggtagtttcaagcctttttaagtatgactaagtatactttttagcccaatgaagtaaaaagaggtctactatgatcattattaaaagaacaacaataaagctatgagatctaacataattaaacatatgtattaaaaaaagaaacttcatattgtcttcttagcctgcaccacaatcataacggcccactatttcttttgtttatgttcttttgatttactaaaatagttacccccaccccaaaaaaccctttctttatttccttgtctaggtaagaatccactaaagcttatttgagagaaaggtatttagatcaagcttcactagcaatattcatcaaagtatgaccccaatataagctttaatgatagtcctgataattcaactggctacataattcaaggatatgtacaatgagggtttaaattgtttcagtagttgtttttgactttcatatgtctagtcacatagagaggaagcaaacactgacatgaaaactattaaagagagattggtgaaagattccaaaaaatgaagtgaagttacctcattgtaagatctctgtcctaaacaacagtaacctctatatactaatgacttcaaactctattctttggtaaagaaaacgaataatagtcaaatatatggaccctttttaagtcctctaagatacgttaattggggtttgtgtctttgtttgtttcacgagcaaggcaattagagaaaagcaataaaataaagtgaaagaaaataaaagcagaagaaggatcaacaaagaaagaagagagagacctgaatggttaggcttttgacggcttctttagtattgggagtggtgcctccacgcgctccatgttcgacttcttcacctccgtctgctttggtacaagctatgcaagaaaacatttttggtctcttttttgagttgttctctgccttttcagacctataaaaccagagagtactctattaaacatcatcacaaaccaaacctcacactactctactcaaatcaataataatactctacaaaacaaaacaaaaagtaattaagaacgttaaagtagagctcactctcacaatccgacataaaacacgggtaaagcttatgtaatcgtagtacacatgtaaacattagttacaagttaggaacatatagctagaaaagggtatttggatttcaattgtcgttttcttataacgcaaaacacaaacacaaaaggacaaagttgttgacatatctctagtcaggaaacaactactcatgttataacaaaaagaaaatgtaacttgactggttagtagtttaactcataaagaaccaatgctaaatatttcaagtactaaacccattttttaaaaatggaaagaaagaaaaacagtttacattacaccatggtcggatatttgtgttacctattttaagagcgaataaaaaaagatgggtataaattagtgaagagatcttgataaagacaaaagtgttgaaagagatattaaaactacatgttacacttttctttattaaaaaaaaaaagatgttataactagaaaagaaagagagcttggggatcagaaaataggacccagttaagaaatactaatattttaaaaattaattgtgcaaatctaaacacctgaaaattgtataaacacattatttacaagtaataatatattctaaagacaatcataatagagacaaatgcttctttattctactttaaatagttttttttttttgttaaagaataacttaatacttttgtgtgcagcaaaagatcctaaacccatccctcaactaacaaaagttcgaagaataattacattttttttgcagtagccgaaatttatgacattttaaaaaaaaatcagattattgtgatgactcaagagaatcaaataatatgttctgattccgcgtgtttaacatcgatcaagacaaatacataagtaaagaagaaaacaattggaaacactagaaaagcaaaacaaaattgaaaaatataacaagaaaatggaatcttgacagtcacgtgttaagaaaaagaaaaagagattggtttctatttttagggttttgagtgatgatggaccaatctaaagcgtgtcgcgacatgaaaactaaaactatatccaaagtaaaagataaaatcgcaaaaacaatcacgaatcacgaaaaaaactctgttttgatatcaaaagcaaaggcaaaaactgatacaaaaaccattattattctcacctcagaaaacgacttcttctttttttcttaatcattacaatccaaaaaataaaattttgattagtgggttttgtttattactcactcacctttgtgtttcgatatctgagaaatgaagcgatatgatctgagattattgagatactagatagctagcttctgctttattttcctcttgaaggctttggtctatttaggaagccggcacgagtggggttagttctgagtctacgtctataaatagaccatcaatggctgcagagaagattagtgtagtagtgttacagacagtaattgtaataaatgtgttacaaaaggacgaaaacaatttatgatactacaattttgcttttaatgtttttgagaaaaaattcggcgttttctcaaaaaagtaaaagaacaataaataccgggaaacttttgaatgaaaatgaaaatttatattaatattgaagaatgaatacacatttttcggtgaagtttctgatttgggtttagtgagaaaattttggtattaatcagaaaaaaatgacgaatcgaatctgtctaaatcaaatcaatcaagtgacaaatgtttgcagaaaaaggtaacgcaaaaaaaaaaaaaaaaatctctgaatctttttttttccgggaaaaaatagtattgaaaagatcgatcggaaaaaaaccagtgactaatcgtttctacagaagaacagaaacagagcaacgaatctctctgttttcttattttcccgagaaaaatcttcaaaaaagagaatttttataaactcacctgaaatgtcttcttcttcgaatctgattatgtaataaacttcactgagaaaatctccaaactcaaaaacccatagaaatcttcattttccggaagagaaatttggaaaaaatgagaacagagacgaaaccgggtcgagaagtcgggttattgggtgacccgagaactgaaaggagctccgagagttttaactagacgaagagaagagagacaagagttacgaagagtatatatatatacgtggaggaaagagaatgtttaacggcgtttaatgtaataaaaaagaaccgtgagttttgacggaggtttattattttggtgtgccgaggaaaaatattggtctcgagaagagacggcaaagagggcccatgttgtctaccggtgacggagatggcttacgtgtggtggaagtagaatacgtggcggtttctgattggtttgagacagctgaaaccgggtcgggttttggtcacgatacatttgacaggccaagggaaccgtcgcatcacgattcgctttgtgtgggttcatttcatcatctctttttattttattttactatacataatatatgtgtgtttcatcgttttgtcttgttttggttatgatcatgtgtgccaattttttgttgttatgtttctactaaatgagtaaagaagcatcgattgtgaatagaatcaataacttgttcattgaatttttttcatttggacatttggagttatataatatagtgtgaaagtgtaagttgaagtgtttgcttaaatagtgtcccaatcatggattaatgttggcatggtggatggagtattgaagtatgggatgatacaactatttctatttattttacacatgtgatgtgtttgtttgtcatgttcatttctttaatatataatatagtgtaatggtccgaccatattaaaaaataaataaaaaattgtcttttcttgactcgttaaaccaaattatgctaggtttagagattgctatagaagaaaagcttgcagaattgacgatgtgttaatgtattttggaataaatatttgtactgtaattttgttttcttcaattgcatatgtaagtatctcatgcatgcaatgacttttttagaaaagaaatgttaaacgaagatttcttataaattttattattttcattcatatacgtgaaaagtacgaaggaagtgaaatgtcaaaagagttttaaagacaagcattcttgattttggggttaatgatgaaatatttggccatgttcgaatttcactgaaggttataacatagtgaattacaaattttctaaggaagtacaaacgagctgaatctctatgatataagaaaaagcatactagtaacataaaatgttaacctcagacaaaaaggtgttgatattaatcacaatgaagtttctcagtgtagcttgaaagaatgtatcgagttcgaagcatttaaaataattatatgaaagtgatatgaacgagcttgactttacttagtcgtgttggtcatcgattttttctacttttaattttagattaaaatatgtagaaaaaactcacttgattccgataaagatggtaaactaaaacacaaacttttaattataaaattactaaataatgataggcataaggagtcattctccaaagttgtataggctgataatatcgtgatgttgattcgcggttaagtaataggcattacacttctctgtaaattatggccaccaattaaactacatacatggattatttaggttgatctagttaataactaataattttggcttgaatcaactttgatcataacattgttagtcaaccttctaaatttgttgtcatatgaaatgttgtaaaaatcaaaacggcatcgatttagatttaatagatttatagacagtatatatttatacataaactgaaaaaaaccttgtcaaaaaaacttagtaaacttatacagaagaagcttataacatataacactaatatacagtatatacgtttatacatgttttgatgaatttacatagtccattaatagtaaaataaaactaagttactttgttttcttaaaaacggatcatatgacttaccaaatgtagacggttgattaaaggcttttggatcaatcataatcaatataaaccaacctttgatagtttgtataaggattcactaaatttacatggttaatgtatgaattttcacatgtgatttaattcatgtacgaatttaaagagtgatcatagattcatagttcatttatgatgaattggttttcccagtggtcgggtatttaaattattttgtactaaacaattcatttctgtttgtaaaacaaaacaaaacaaaattaaacaacattcatatacattataatgaataatgtactaaatgacaaaatgcaacaaacattagttttttttgcctttttctgtttaaacatccagtagtagtactatgtatatactaaaagcattgaactatttttttgtaatgatccaactgtagttcgatctgaaaacattgaaaattctaaggtgcagtgtataaaagcatttagcatatgtgcaacatgttcgacgatgctaaactttcttaaaaagaaataaaatcagagacataaatataaaatataattagaatgtatctctttaacccaaaacgttgggggtgggaacttagctttattcctggggctaacctgtctttaagcaaagaatgcttcgaacagagggacaacaaaactccaaataaagttccaagacatatatgaaaataagaaatttcatactatttacgaaaataaaatgaaaagcagttattgtaagaagtgttcaccactagatataactaattattattacaaataaacaattgtgatttaaaccttaataattttgtagaaattcatccaaaacctaaatttatagtatattgaaaatgttctaaaaatataatatgtgtatgaaaaggtgtataaaagatataaacaaatattttgaaaataatataattttatggtggaatacaaatgaatgtgcaagagttaacttttactatagtttttttttgtaacatgaattttattatagttgagatttaattaatgtgcaagaaaagtatagtcaatgtctccaaaacgcttcccatcctgtcttacattatactttgtcttttggatttgttatactcttttactaataaaaattacaaacatgttcttcagctttagggcttttcaattttattttatgttcctttttagacatcttttcactccatagttagatcacattccatttatgtaaataggaaaatatttagatttcataataattgtgtaaattaacaaaaacaattcctaaactaccattttcctaattatggtttcaaactaccatcaaaatcttaaaattccaacatttgtatattgcgatatacaattttggtctcaaaacttgctgagtttgctggaaacgagtgagagaagagttgtcgttctagttattgctgagaggatataaaaatgttacaactaaacttttaaactcatcaatgttcttgtgaacgtttgtattgtgtacaaatgtagtataaagcagtttgtacgtccacaatgtattatattaaatgtaagtttggatacttccaaattttattaacttcaaaacgtaattttgagtgatggacatgacaatagtactgttattattaaatgtgtcgcgactctagaaaaacgaaacgagaattattaatgtatagacgtgtatcatccaaaacctttaaacacccactatcacacgttttcataagtttgggaatgacacaataactacaaattaaatcttgatcgtttgttcttagagctataagtttaatgtgtttatgtatattgttaaattaaaaattacgtttatctatatacgtataaccagtttgaaaaattgataaagaggaaattaaagatcagtttcaaatcatgggctatgtactttcctaatgtctccccttttccttttaactattaaaacagtgtttaatttgaattgacatattcgtaaacagtgagattatggttcgattttgtttttcaatttcaaaaattcttaattgcagaaagttttttttagagagaacaaatactatggatataaatttatccgaaaatacgtttttttttatttaactcaaaatttctcttagtttaatcaaaacaatagacaaaattaacaatttgatgaaattacaatgtatcagtggcggacacattcatggagaagatgagtcagttgacccaggttaaatctacaaatacaatttaatgcacgaaatttattaaagagatagtacaatttaatacaatttaatgcacgaaatttacaccccataaccgaagttcgaacatccccggtaccccactacaatgtacgaaggtattatgtatttttctttgaatttccatatgaatttatttaataatgtataattgcttactggcgtcagaccattctctatgttctcgtctactctggtctctctatatataaggaccgttactccatcccttaccttggacttcaactgtgtctcagttaataaccgaaaaccctttctcttttgcctcgcaaatctttgcgaagcttccaatcaagaccgttttccacaaccgagctagcaatcttctcgatcggtattcaataccgaagaactcttccctgaactcgatcggcatctcattctatcatatatttctttataatcttcttcctaaattgaaaatacaattttctttaaaaatttatataatcgaatcaaacaagctttcgaaactatcagttctagagaatagtactaaagttaaaccagttattaaatgaataatgaataatatagccctacgtgagaaaaggtaaaagcatcatcaggtgattattcccacttccaaagaagattacgtaaaattccaatccctatttcctaggtttccttaatctatttatttttcaaaacaccaaattaagttttttttagcgcattacgcaatactttaataaaccaaaaaagcatagttaaagtaaaaaattgtttccaagtgaactagtttttgctacaaccaaaatcaaaaatagacccacgtcttagaataaacaagtgttcgtatatttgagagcgtgtacaccctttgaagaatttttttcttattgagagatgttgattcaccaccaataatcaaatccgatgaagtaatttaatttcacaatgacaaattgacaacttggaaaacttttcgtgtccataatctgcaaggaaacaacataaaacccctcaaagggcctcccggcccatacaaaattcccgaacctaacctttaaagtaataagcattacacaacaatgagtgattagcctggcccgtataaagttgccgaatctaacctttagattacatgctgcatcacacaagtaacaacgatggttcatcatgtttgatttaacttacaactttagaatttttttctctctttattcgggaccacttcgatattgttagaacaaatttgttctacaaggatgtttcaaagaaattcagattgtattcaattcacagttagtttagatgatcagagaaaaagatttgaaagtctaaactaaccgagttctgtttttgtaccggtttctcaacgttgagtttggttttttactggtttcttacttaccggctgcatcagacagaccggacaagactcaggccatactagtatgtatagttatctcacatttcaaactagaaccagaattcaaacttcctcagtttagaatggttatctcctgaatcaaaccacattttgccgaacaaaatctgattcacatgtctgcaacggaccagagataagcctctatttccgttgctttcctctcattggtcttcttaatcagatccttctcagttcctgaaccaatacaccaaagataaaacagatcagagaaataatcttctaaaggaatctttgaatgtgaataatgaaaagaaatgtattagaggagcttaccgttactacggtcgaccccatcccagtgtctacccggtttaatcccataccggtttgatgcagcttccaaccgtctcgtcaaccaactatgtttaggcacactttgtggtataatgaacccagattttttcatctcctcatcgtctcctagatccacaagagttgtctcgtactttcttttctgcgatataaaaactcggcaatacgttaggataatgctgttatgacaagataatcatggttattcataattttgtcgtaagcagaagtattttcaataccttgaccaaatgagccattggatctccaaatctaactctttccttcatcatttgatcaagctccggatcatccctgaaacaacagagataaacactgtgagaataaataaccaagtaataacagctcaaactcgagctcaagaagaagaataaataaagtaccttgtccgagcaaatggcttatccttctcaagctcaagttcttgtagtctagcttcagcttcacgcttctgagctaaacctttgccccattccagttttatctcctacaagaattagacaatacattcgtaactctaattttctcagattcagattatatacatattttgaggagtatagagttaatgacacacagtacctttggcttctctatcacttttttttgcttcgatttaagatattcctcctttgatatacgcttccctgcaatatcaataagtatctgggtgtgagacatgagattatgcattcttactgcaacttataacgactagggacctatagtcctcacctgtgatcttgtcacggaacactgcttctgcgttttgaccagttagctcggaatccatatttttaaacctgtagaagagtataatttgtcagaaagatggtagcctaaaaacatgcaatcgcgaatctcaaatcatcgttactgaagactggtctctttatgaattccctatttaaagacacagaagacaaaatcttagaaacttaggaagtaggcaacatgaaacttcaaggaaataggaaactactcttggcccaatactactgaaactgaaacaaacctgatgcctataactaaaatgcagtaacagattctaaaaagcttagtctactttctgataattacctcaatttttcatcctcctttttctttcgatattcacttccaatgtctttgccactaatcaatccggtctttcgttgctccttgcttatttgaggaggtgatgaatctctgcgtggtctccttgggggagagctatcaaaattggaactcctggacacattttcagaagaacgtcgcaaatctgcggcttttctttgaggcgaaagatctgagtcttgagaatccttcatatttatattccggccgggtggagataaatcagcattcgagccaaaagattttgaagaccttctagctggttcaggtgatggagaatgatatcttcttctccgtggaggagatagatcattgctcttcttttttacatctgagacaggtgaaccatgtaaatctcttttcctgcgaggcggagataaatcatcgtccaactcaacagaatctgaacgctttctgctagattcacgcgatggagaatgaacatgtctcctacgaggaggagatagatcttcactcagatatttagcttcaggttctggtgaaggcgaatcattcctggcttttcttttgcgaggtggtgacatatctgaatccaaactaacaggcttggtatgttttctgttaggttcaggtgaaggcgaattgtgacgttttctccgtcgtggtggtgacatatctgtatcaactctatccgcaaccgaccgtctaggcccaggctcaggagagggcgagtcattacgagtcctttgtctacgtggaggagaaatattagattgtgtgtcttcacggtttagaggtaacgttacccacccacttccatcctcagcaatggcattatgagcacgccttgccttaatttcctccaacctcctcattcgcttaacttcaatgtcttcatcaaccagaggtgtttcctctatacgaaacaaatgaaaagagaacacaatatgtaaatgtgaactgttattagatcagggaagtgaaagcattacagatgcacaagtccaagaaacaagaaacagtcaagcaatttacctgctgaatcatcttcgttttcgtcctcttcaggatcaacctgcttttgccaaactggatcttcgtcgacaactaaaacacctcttggttcaggtttagatggcttcttctgcttcttcttcttcttcttcttctctacaacatcactactttcatacttcttcaagtaatcttttaaagattggtttcctgccatctttgagaatttggagcctaaataccaatgataaacttgaaaaattcagtcaaacataacatctagacgaagatatattcaattcaggaaccagaggttcaagcaggaattaatggcaatgccaccgttcatcatcttaagagaccgaattatagatatagctttcaaaaccaaatctggaatcaacaattagttgctaaactcaaattagcatcaatcaagccctacgaaaatgagactgaatcgagaataacaaaagaatgcttagtcttatatcgtcatcaaatccacaaatttgcatctactcaaaagcgattccagaaaactagaaagctaaacgaagacaagcatacattcatagaatcgtaaaattactaacctgatcggaaaattaacgccggagatgaccgggaaaatatcagtaacccaacgcgaatagttgaaaatgataactcggagagctagctcttctagggtttttggatctcctggagacgaagaatagagaaaaacttaagttatggcggaatttgaaatttcaagcaattaatagggattgcttttgtaattcctaatattaagacataaataggggcattttagtatttgcacacattgctgagtcggtctttaaaaagcccttcactatcacattgacttcagaacaattagggttaatctcttccgttgcttttttttttcaatccgccgccacttttcgtttctcgtagcgttaaaatggcggtatcgtacaatgcattagctcagtctttagcgagaagtagctgcttcatccccaaaccttattcctttagagatactaagctgagaagcagatccaatgtcgtattcgcgtgcaatgataataagaacattgctcttcaagctaaggtaaacatcttctgtgtaatcttaacttatagatagaatgttctgcaatggaatcgtgttaagtttaattgttatctaagaacgattagaatttagattgaatattgaaccagacattgtcaggtgcttactctttgacatatgagtaattactgttacatgtcgggtagagaaaaaagagagaaggaaaagctttttaacctgagcttcatttttagagtttggatttcttttttaagatgctcatcgtttgcttggtcatctgcatttggtgatgcctgagctacatctgttcatcacattttattaaagcatttaagtatattgttatgccaaaagtaatttagttctatgaacattgtctggagtaaattgtatatgtaaagtttggatttttgccagagatggtcaggttcctaccctttgacatgtgggtttggactgttacatctctggtatagaaaagagagagaaggaaaggctttttgatggtttccatctttaggtttggatgtctctttcaaggtgctcatcgtttgcttggtcatctttgttacgtgatgacttggctccatttgttcatcacagttgatatcttttcaaggaaatatgtattgtcttgcgctctcagagttggattaattcatcactgaattactgtgatgccttccgaagtaacttatgttttaatttagagaaaaggaggttcatgtaagatgtgtcatttgttaatctattttagttacgtcatgtacaattgagatttggccagagatggtcaggttcctactctttgacaaatgagtttgaactgttacatctctggtaaagaaaaaagagagaaggaaaggctttttgatggtttccatcttttggtctggagttttctctaaaggtgtacatcgtttgcttggtcatctgaatctgtgatggcatgggctacatctgtcctccacaacctgaataatcttcattgagacatttctcttttggctttaatatctagtccgataatgcatttactgtttatactattagagaggggcttgtttgattgaaatgacaatgtttttttctgtgttggtagtgttgccattgtgccttttattactgtctcaataagcaatgtatatgcggctgttgtgttccctggtagctaatcatggtttctgttgttttcttgtgttaggtagataacttgttggaccgcattaaatgggatgacaaaggattagctgtggcaatagcacaaaacgttgatacgggagcagtattgatgcaaggctttgttaatagggaggccctctccacaaccatcagttctcggaaagctacattctttagtcgatcaagatctaccttatggactaagggagagacatccaataacttcatcaatattcttgatgtgtatgttgattgtgatcgtgattcggtatgtttgcgtggaccacagatatgaatcaatgcagtgttattcttcataaactcattggtctctattttctcagattatttaccttggaacacctgatggacctacctgtcacacaggggaagagacttgttactacacatcggtttttgatcaattaaacaatgatgaggtttgcctttgttgaatttggtttttaccttttcctgtatcaagagacgaattgaaatctgaagaatatcaactactttcttactgaatcacaggcttcaggaaacaagctagcattaacaacattgtactcgctagaatcaatcatttccaagcggaaagaagaatcaacagttcctcaagaaggtaaaccatcatggactcgacggttgttgacggatgacgctctgctttgctcaaagatcaggtactttgtcggttatctgtataattgaatttgagctatagattcttatgaagcttattgggatattcggcttcagggaagaagctgacgagttatgcagaacactggaggataatgaggaagtttcaagaacaccatcagagatggctgatgttttataccacgcaatggtgcttctatctaaaaggggtgtgaagatggaagatgttcttgaagttcttaggaaacgcttctctcaatctggaatcgaggagaagcaaaaccgtacaaagtaaccattttcttcgattgtctgtttagtatttgcgagaatttttttagttactcggaacttatactgttgttcattgtgcaactttgtattgtataaatagatatcctttgtgataaaagaaataaatgagtcctttttccatctttctactttcattaactttttcagttaacttaaaagatataaatgagtcgcttctctccaaaatgtgtcaaccatctctgatctagttatgctctatttgacatcatggttaaatatccttctaaaagagcaccaaacttgagcttccaatgccgatcgtagtttggatcgagtaacccataaatatgatcttaagtccttagtggcagtccagcgaaaagaagtcatttgatcaaacttgcatgcatacttgctctttatccaccctgaatctggtcatatccattcatcttccagatagcattattctgccaccaacatataggtgattttcgggtttccttgaagacatgatacaacttgctgcgtcagtcaatttattaatcaagaggtccttactccaacattttttaactcttgcaaagcaaatctttaagaccttgataataatagtgtttaaaccacatactaatatatctatatattaaaaatataattaaaaaatatataatatcaatctataccgtgaaatacccaagaaattaaagagaacaaaaaaaggagattgtttatagagctatatcttggactcaaaggactagatccttctctctgtagtgtgcatcacaggagatgataaacactatgatacaggtggtctcatcaagaggtttggtttgacgaaaaccatagctttttctggcaaaccagaatcttctcacttttgactgcatactcagtctcctctctccggcaactccaccttatccctttcgctaacgttgtgattgcgtccatgaaataactcgattctcggattataacatatccactcggccgcaagatcctgtccatctctagcaaaatgtacttcatctcacacctgaaaacattaccatatggttcaacaaacacattaacaccaaaaccaaacactttctaaggcattctttaaaaacagtttacattttcttcctattgagtgatattgaccaatgtatctcatcattcataacgtacctgtgactctccaaggtaaaaagactgtcgaggtgaagaagatcatatgttcttggatacgttgagaaagcttcgcacctacaatttcggttttcaggttaatagcacaaagatcaaacaatgaacagagtgtttttgacaaaaagaaatgttaccagtcgtggtaagtcccgatgagaccgcgatcaaagacaacaggaagcgaatttgcgctgtacgatgatacaacgttcatgacccaaatgggatcctcaatgagggccgcagagaaacctccataaacagtgttcatatccataacatttcttatcttgtctgtcccaagagctggtaaaactttcttgtaatgcttaactctgttcttccatttaccatcatcgtgtttcaaactgttcgcactccctccgtgaacatcaccgattctctcgggcgcgacatgtaacctctcgggccattttgggattgatccgagaccagacttcttgactttaggtgtcggggcaaccacgcaaggacggagtggagtgtaccaagcagaatcaggttctatactgtcgtcacatttgggagggtaagcttccatgttcttagcgattttgtcatagcaagatttgtctgagagtttctgccacacggctatgtcatctttttgagcgtactttttgaaacacatggaggttagaagtgactgaagcttgttgtagtcagatttctgatcttccatggttgtgttccatccacgccatcgtctattatagttcacaggtggaccagaaagaacccaaaaacctccaggtcgaactatacggtgaatctcaagtaaatagattccacctgcaagatcggagaacacattttgatgattattcttagttcaaatcacaacaactcaaatgcattggtaggtagatattagtgcttaccaaattctgtccagggaataagacatcttgaacaatgagccatatcaaatgcatttgaaggaaaagggagacgttgcgtagagatgatcccgagaatcgcaggaattccacgttcaagagcaaattgaacctgagcttcatggttatctcttggagcaagagagagtgatagtatcccacggtccaaaagatcgcctccccagctcgcaacctaccaaagaaaccacggaaaattataacctcgaccgatcagaactgattagagaacttgagtagttgaagagagactaaccccacagccagtatcaatggcggtcctgactgttccgtctttcatttcaggaatcagatcttgcatcaaatcaacatagtgactaactccacgagggaacatggtaccaccaccagggaaatggaacttatctccttctttcttaagccaatgctggttagacttttgcttattgatccaatcataaggcacgttcctgtaccaacactgttctcggctcttgggccatcttataggcggtttatacccgtctggtggtggaatcaaacactcattcttttcatataccggaggacaatgacgctccaagaaacttaagcgatggacaccatacttcttccacctctgagaacaagaaacacaacaatagttcaataatatgcagcagctagaagtgactatacaaagtgagagtgaatctattttacctttggatcggtgcacggggtgtaatcttggaactctgacccgcactccgggaaagaaacggatttgatttgaataggagtagctgtaggttctttaggggaagctacagcctttgtagtcgtccttgtgacatccttggctacaatcttgtctctctcagagcaaaatataccaccgaggtagaaggagaaaccgcaaaatgcgataaacaggacagtcagtgacaagatcctggaagtacccttttcaggttgcgaagattgcttcccgctcttcataattctataacaccaaaaccaaacctcacctgtacattcagtgaaaccaagtatataatcagatcaaacactcagtgaatcaactatagaaggttcttatttatttcactatgaaacaacaaaaacatgactttgtaatgaatatggaagcctaactgaagactaaaacggctggatcagcaatgaaagtttggatctttgatcaatacaatacacacaagaattaagatttagaagaaatggatcgatgagatctgaaaataaacactttaacacaacacagtgcaagttctgttgcattatcacatttttttcataggtgatttgatttatgggtccccaaaactaaagcatcccctaaaagcatcccactaggtcaaaaaagttgaatttggaagacatgagacgcaactactctcatttgttttaacgctaaaaatatagctctcaacatcaacagttgttgatttcaacaacatcagtttttccaaagatcgaaactttgaatcaaaaatttcgagttcgagaaaagttgggggaaaaaacagttgtgcagaaaattcatcgaaagatcagatctttgagagatttacaagtgcccattagcaaaaacaagtctcatatatacaatggtcacagctcacaagctatagagaatggatctgacaaacacacaaacaaaaaaaaacagaggaatatgaacagaacttacttacttgcagtgttttgttttttactttggaggaagagaacaagagttgaaatttgtgggaaaatgtggagactggaaatagagttgaagtagatttgagataagaagtgagagtcgtaagataaaagagagaagatctctctctaaagacacactctcaagtcttttggttttgggacaggaagtgatacttaaacagagagatatagaaaggctttagagatataaataaatatctttcaattttctttcttcttcatcggtaaggtttgattcattcgctttccttcgtccccatcttcctcctctctctctcacttgatttttcggcttttttttttgtatttttattttatttggtggagtatatttgtttttaatttgtgacagaggtaaaaagactttcccttttttataatttagacaaattgttaaatctctttcacttctcctttttctgtttctcacttcctcattcggctttttcttatgtctcagaataggctttggaattaaaaaaataaatatatatatatatatatatagacagagaaattttgtaaaaatagtctacaatgtgattgattttcgaaaaatacacttcttctgcttattttttaggctaaattataaaacaaaaaatacatactcaaaaccaaaaaataaactaatataattgacgcttataaagccaaatagttgtggcaaagagatcagcttgtgggctattttaatttgagttcaatatttggtaggaaataaattaatgagagttcaatattttgaatgctaaagagccaaaattgtgaagctcggtgacatgtgcatatacgacatttgctctttgtgaaagttttttcagttggagataaagctattgcaaatgcgttcaaggaaacaaaaatggttgaagactacttcggaattttttctcgatttgagacgatagtgtacatgaaaaaactatgtgttgtgaccgactagcaaatgtttaagctcatagcgttaaagaaagcaaaagtataaacttcttctggattcgtatacgtagatagccattctatttggaacgaaaaaaatcatttataggtatgccactattatttttgatggagcggtttcattgataaatttctaacgaaatatcaacgatgtctacttttcttatctcgcctacttttgacttgagattctagtatagcaataaaaatcataactaatgattactactctttgtgagacttctttgaagtaacccatttcttcatcatttatgtttggaacctccatcacataggagtgtggggtgggaccaaatgttatttttcttttttactttttcttgtccattgttttttcacttatctctaaatatatatttttgtttttgtttcttacttatctctaaacattataaatcactaaattacattgagtaaaatacaattgatgttgatagattttgtaagcttgataagaatatagaaaatttaaactcatacatgcataatattgatttcaaagataaatcatgacacgattatagtgtttatctgatatcatactcagtttaatttcgattttttttttttaaatcctggaatattattatgaaataaattatttctcacttttagtgctggaaaaaggtcgagatctaactttaaagtggaaaagaaaaagaaaatacgtgcatgggatatgtagatatacgattcagagcaaccaattatcatttaacaagtaatccaagcaaaagtttgagactctctttggtactaacaccgaaatgtgttttcatgaaagatgcaatttttagtctacttcattcagcgtcaatcagtgctataattttttatttttcgaggcttgcaaatacttactccattaataaaaaataaaaattaaattaaattatttaatgtcggctgaggaataaagagcaccgacagaagaatgcatctgcctttatccttttgctttggaattttaaaaacaaaactttgtgatctctctttctctcaaaataaggcccttgacctcctcactgattcatttattgcttataattaagggtgtcaaaatgggtcaaaattcatggtcaattcaactcaacccatgaattctaatgagttgaaaattttgactcaaatgagttgatgggtcaaataagttgatgagtcaattagtttgatgagtaaaatgagttgggttgtaatggttaatgggttcaatggtttacccaattaacccatcaagttttgtaaatttgaattaaaccaactaaaatctctaaaccaatgtcaatttaagtttaaccaacacatctaaatcaatttaataaaattaatatttttctaaaattcttaaatatacaagcgataaaattgagaaaaagtaaactcgtaagttttccaccaaaaaacataaacccgtgattttcccgccaaaaacgtaaacccgtgattttcccgccaaaaacataaacccgtgattttcccgtcaaaaacgtaaatccgtaattttcccgccgaaaatgtaaactcgtaattttcccgccaaaaaacgaaaacctgtgattttcccgccaaaaacgtaaacccgtgattttccctccaaaaacgtaaatccgtgatttttccgccaaaaacgtaaacccgaaattttaacaaaatgagttgagtcaacccataactcatttaaccttaaactcattaaattatgagttgagttgagttgagttaaccattttgacacctctacttataataatgagtatttgcagtaataataaccctttgaaaaataatcagaagtactaagatttagtggaccgtatccgtatgtgactttgttgaatcattagaaatttagtccaaacgtagatatcaaaataataacgttgtagacaaaatatgggtcctgtagctaaaaagattagctaaaaagtttgatgcggacatttattatacactcaagcatctacaatgacatacacacatggatgactgatattaatggtgattacttgtttttataaatattaataatgacttacaaaaatgtgtttgatataaatattcgtatttaaattttaaaataatactagccagattaaaaattgtcaatataataacatggtataattgtgtgtattaaatgtatctcataaatagataattatacaataattcttaattcaatcgcaaaatacaaacaaaataattcatttttgtcatttgcaaataatgtaagaaatacaaatgttttctttagttacctaacgctaacagcctaacactgtatacgaggcccaaaccgacatgacttaactccggcccggttcacaattgaggattgaaactacataatttcaactacttatttgctatttgcatcaagaggcggagcaatgaaaacccggtctcaatcggttgagtaaaaccgggccaacagatctggcacatagatggtcaattgccattggtttcgttaaataaaccgggcgaggagttctggtacggtcgttatcaatcaattgtagtaacatgacaatgtggttaaagtttcaaactttccatatgggtgtgttaggattttcaccatttgacttttgttcatagattagtagttactggccaaactcttttatgtctgactaaaagctctaatcaacattatttattaattgcttctccttagaacttcacatggacaacaacatcgtacgttgattcctctgtaaaacaagatgtatttaaagaactcacaagtgactcactgatgtatctcgaaaaactcaatgtgactgttttgtttgagctgagagacaagaggcatgcaccttgatgattgatgataggaaactcctgaaaaaacaccaatccatatgatcatattcatcaaccatttgctctaaattccttaatcaggcatcggtttatcgtgtacccagacccctttgctcatcaaccactttgggggattatattctgaaagggctcgttgaagcaaatcatctggtttgactccgtttcttaacatatgttcatacaacaatgcagcttcaacgagtcttccaaccttgcaataaccacggataagaattgcgtaggcaacaacatcaggcaataactttgcatctatggcctgatggaagatatttgttgcttcatccactcttcctcgtttgcaaagaccgtcaattatgatgctataacttactatgcttggagaaatacctttctcttgcatttcctcaaaaagcttgaaagaaccttcgatatcgacggattttgaaaaccaatccattagacaaccgtatgtgacagcattcggtttagagcccttttccgccattatggagaacatccttatagcaccatccatatcattattttgcagagtacatggataagtatagtcaaagtaacggtattgggaccaaaaggtgtaacttttagcagctcgaaaatcctctctgcttcatctaaccttctcaaagagcagtagccacatatcattgtgttatatgtcacaatatcaggctccatctttccttcaataagattattgaagaacttagaagcatcctctatgcggtgacatttgaaaagcaaatgaatgacgacattacataccgcaatatctgcagagattttattcctctgcataagatcaaacagctgaagcccaatggttggcttcatatgcttgcagaatgcatctattagggtacagtatgctaaggcatcaggttccaaacccattttgaacatccggaaaaacagaaataatgcttcttctaatctaccttccatgatactcaccctcataaccgtggtgaatgtggctacatcaggttttataccatatatccccattaatctaaacaccttcaaagcctcgtcaaaacgatttaacctacaccagccatctattaaggaattaaaaactacaacattgagccggatcgactggcctagcatcttaacagagaatctcatagcatggagcatgagcccttgcttagaaaggccatcaacaagcacaccataaatgacaacatcaggtggataacccatctttatcatatcctcatataaagcaaacccggatctcaagttcccacacttgcaaaaaccatcaatgagactgctataagttacaatagatggctccataccacgtttcaagatctgaccatacataccaaaagcttcgtaaatcctaccatcctggcacaagccttttatgagaatggtgtaagtaaccacattaggggaaatcccttgacacaacattctcttgtacacaacagaagctgttgctaaatccccagattttacatatacatcaatcgttgaactgaacacaaccacgtccaacttcacacctttatgtaaggcctgcgagaaaagcttatgacccattcctaacatccctgctttgaagtatccatcaatcagagtactgtaagcgatcaagtctggctctatccctctctgttccataactttaaaaagatcgaatgctctatccatttcacctcttttgcaaaacccattaatcaacgtgcaaaaagtcaccacattaggtgccggaccacaatccaaaaccaaacttaacaaccgagaagctacctcaatctgatcaactgaaagacccttcaaaaccttattgcaagaaactataccaacacgaaaacctctctccatcactagtcgatgaaaatctaaagcctttgtaacctctcctttgcagaaaagagcatccaacacaaatccatgagcactcacacctgaaggctcaattcctcctctacatagtttatcaaaatgatcagctattaagtcaacacgatcagaaccaatcaaagaatttagcatcctatatacagaatcctgcggtataactacacccaattgagtactatacacaaatatctccagagccttatcaaccataccatatctacaacaacattccatcaaaaacttgcaaacatcagcatccaatgacctatccctaatcgaacccagaacgttgaaatccttcccacgattggtgatcatttcatcgaacaccttatctgcaacatcgaacatcccatttcggatcaaaacatgagcaatggtatagaaagaaggatcctttccagagatctctgcccatcgaaagtacttaagcgcagaattgggttctgattcaagcgaaagaaggaccaaattcgtctcgtttcgttgcaaatttgaaccgtagacagaagaatctaacaagttaaagtttccttctttgattgctttagagataccggcggcgagggctttagcagaatcagacgaaaacccacgagagttcagaaagttcagcttcacgaacacagagaaaatccgcgggaagaaaatctcgcgtaattgcaaagacgatgaagaaaaaagtaacatgtttcacagatttcccattcccgcgaaaaacagagtgaaaaacgcaacccgatttgtctaaattgacccggtataacccgaaccgacttacgaaagagcatgggcttctagtggacggcccaattgattatatagttgaagcgacgtccttaatcgttaaaccctaattttactaatcacgtagtagccgccgtttaaggacccggtttatcgcaactcgacccggataaattaaaacactatgggctttattgggtcagcccaatagattgatgaatacatttctgtatttaatggaaccctcttctcttctcttctcttaaaaccctaattctccactcttgtatcagccgccgttaaatgtcaaatcctgcgtcatagtttctttcttagatgggtgttgctctaatttacagtatatcctgaatcggtagcaaagtttgatgctttttgttttatttgttcaaatttatggtgttgagctttgtgtgattggggttaagagattgatgagaaaattgcactatgtatcgaaggctatgtcaaattacagtgacatagtctttaatgcaaaagtgcagaaagagagagctgttaaatcagcaagcggccagacaaccgtcgggatagatccacaggtgaagcggattgattcctctgctttcagctactaaatctatcctacatacttgttctcattaagaatctcatttttgaatacttgagtttgtttgtgttattgagttgttgttgtttattgcaccttgtatcgaaggacatgcctcgttctgatggcatggccattttcgaggatgcgtaaaggaatagctgttaattcagtaagcggccagacaaccgttgggatagatccacagttgttgcggtttttctctccgctctcaactactaaatctttcccacattttttgtatcaatccacaattttcacgattgtttgattctttttcaatattgtttttagttcattgagtttgcgactttgcgtataatatccctggacatttgaagacttggttttggtaaataaattcactgttgaactttatcctttgttaccgtgacactgatggttgacattgaacagtacgttgagtaaatgattggagtttgaacttgttgaagtaaaggaatccaagtacaagaaaagctggttgtttcactgcaccattaccaagtaaccacctttaggacttgaacaactctgtttacatatagaaatttcatagatttagaaatttattcataatttaagctatgagaaatgtgaacaacggttaattacatttgaaaccggttgaggttttttcaccactccagaatagtgaactaattccaaatcttaatttataaaatgtcagtttaaaaacagtataatcaatgttaaatggttaattctcttgtgcccacaaaaaaaataaagtggttaattattataaagaaaagccaacccaaaccggttgagactttgttcgagagagtatagagagacgactagtgttttattaaggatatttggtattgatttgtagctttagggggtgttattagttaatggattttaatagaattgaaatccaacactaatccactgttatttaactaatgattttaaatccagttttaaaatttagtgttattagaactcatttttgtaaattatgcttaatagattttaaagtttagtgttattcaattaagattttaaatatttcattaaaatccagtgttattcaaaactaaaatactggtaaaatttttgtatattaattcatttgaaatgaaatctctttgtaaaattcttggacatattgcagagattttaaaattcatacaaacatatttttaaaagcaatatcagaaaacaaatctaaagtttaaagaattgactttaactctataattgaataacaccactttaaattggcgaaaagctaaagagaattagttggaacaaaagccacaatactttgtgtacagattaaaagattattttttccagttgtgaaaatccaaaactctttaccaaaaaaagcctgccgtatgtatataaagaagagaatttgttggtgataagatttctttaatttgaggctacacaaaaggaagatatttgaagttttctcttgtttgattggtaagaaatagttgtaccgtattatcacgacatacggcaattgctacatgtgtatcgtggtacaaacccaattaaaggctagccactacccacaaacaccgatccgtatataatttagtttttgaacacgtgcctaaatttaatcatgtattgttgtccttgtccaatttaaacaagggacccatgaattcaacaaccaaaattctaattttttttgcctgaattactttttttttggcttgttcaattatcatttgggtaattatttttcaaaatacagtatatataatataggctttgaaaggttggttcatatgatgcaaattagaccatgcgtagttgcgtatattattttggtaagtaaaatgtttgactatagtatagaacaaacaatagacaatagtctgcactacaacatagaatggtacattggtgtcaagtttatgatggggtacaatgattttggagagtgaatgcaaaaaacaaaccaaatagttattatatacaagtgcctactagtatgaaatttttaaatccccaatcttacatattggtccgcaattgcgaatcatgaattaagtgtggattgatctaactttaatccgatccgcaatacactaggtaaccattcaaagtttaatagtggtatatgaattccatatcttttgttgggttaaaaaaaaaaaaaatctcatactatatttcatatattatgtacattttcattttggtttgaagtttctaaatcatgtgtatttggttattttctaaaaaaaaaagcattagtgaagagctttcttcctcaatttatagcaatttagtaaactaattaagactctcaattagatttttgtagtataaaaagcacatacgcaaatttgagatccagattccatcttccatgatctctcacacattgtaaaaacatttcttccgagaagcaagaatctttttaaaaagccactcgatgacacgaggccaaatatatctgtttttccaatatataaataattgtaattcattcttttgaaatctgggtttattcgacaaaaagggctttgttttgttttcttcttcaagtatctctggatcgttccaaaagctttcattattcatcaacttaacgaacgacggagatctcaagacacgaccctcgattctctcacggttcgtgcttcttcacctctcgtaaagatttattcttttgtcatcgttcactaattttgacttttgagtgatctagttctgagatcttttagtctaagctcctttttcgttcttttggattttgttaatgcatattgaagatacccatctgagaaaagtaataaaaaactgtccttttttgctttcccaattacaacgaaccctaaattcaaaattcagaatctgtagcaaatttgagtaatttataaggattgttgcagataacgaaaaccttattgggatgtgggagagttctaatccgtttaaaatctggatgacgttatgcagaagcggagaatcatcactgtgaacccctccgcgtctattgagatgagtcagtacgagaataatgaagttccttactcaagtgtcggtgctgatgaggttccatcatcaccgcctaaagctaccgataagattcggaaagtttccatgttgccacttgttttcctcatattctatgaagtctcaggaggtccttttggtgtagaggatagtgtgaatgcagcaggaccattattagctcttctagggtttgtgatctttcctttcatttggagtatccctgaggctttgattactgcggagatgggaacaatgtatcccgagaatggtggttatgttgtgtgggtttcctctgctttgggacctttttgggggtttcagcaaggttggatgaaatggcttagtggtgttattgataacgctttgtatcctgttctgtttcttgactatttgaagtctggagtcccggctttaggtagcggtttaccgagagttgcatcgatcttggtgctgactattttgttgacgtatctgaactacaggggactaactatagttggttgggttgctgtgcttatgggagttttctccatccttccgtttgctgtgatgggtttgatttcgattccgcagctagagccttcgagatggcttgtgatggacttagggaatgtgaactggaatttgtatcttaacacgcttttctggaatctaaactattgggactcgattagtacactagctggtgaagttgaaaaccccaaccatacacttccaaaggctttgttttatggtgtgatcttagttgcttgttcttacatcttccctcttttggctggaatcggggcaatcccgctagagcgtgagaaatggacagatgggtatttttctgatgtggccaaagctcttggtggagcgtggttgagatggtgggttcaagcggctgcagctacatcaaacatgggaatgtttatagccgagatgagtagtgactcttttcagcttctcggaatggctgagcgcggtatgcttcccgagttctttgccaaaaggtcacgttacgggacacctttactagggattctgttttcagcgtcaggtgttgttctcttgtcttggctaagctttcaagagattgtagctgcagagaacttactctactgcgttggtatgatcttagagtttatagcgtttgttagaatgagaatgaaacaccctgctgcatcaagaccgtacaagatacctattggaaccacaggttcgatcctcatgtgtattcctccaaccatactgatctgtgctgttgtagcactctcgtctcttaaagtagctgcagtgagcattgtgatgatgatcattggtttcctgatacatcctttactgaaccatatggatcgaaagagatgggtcaaattctccatcagttctgacttaccggaccttcaacagcagactcgggaatacgaagaaactctaatacgttaagaatgtccttagttatttccctcgtctatgttaagtacagagcttggaagctatagccaaaaaagcttaatttctcatagtctgtactctgttttattcacagcttgttctaaagttgtagttttttcgtaaagttaggtcatcgttagcacggttccaataaaatgtgcaatgtttgtatctctgttatgtttttgtcgttgccattgtcgatttgaaacatggctttggaaatttgaagtctttgaacaaaaccttcgatcaaagtctggtcaacagttgcaaagcttggatctttggataagttttcatcaccaatgattggaaagagagaaaaaaccctcacaaaaccccaaaaagcagtatcagtgtttgacacgcaaacaaaatcgctatagtctcaattgatcggaggttctatcaccatcgtctccatctgcataatttattaaatatttaggacttgtcattgatatggacactctcaaaacagagaaccacaatttcttcaatcctttccaggatatgacaagtacaacgatatgggtgagttttgttttcttcttaaagcatcgctcaatcttcagacaaccctagattctctcacggtttgtacttctttacctctcgtaaatgtttagactttcgtataaggatccaagaatttatctgattgtttttttttctttgtttctttgtgttgattcagaagggaagtatcattagttcattaccatgggagactataacatgaatgaatttgcttatggtaatctttacgatgatgatgatggcgatgttggtggatcgtctaaagaaggaaacaattcgattcagaaagtttcaatgttaccactcgttttcctcatattctacgaagtctcaggaggtcctttcggtgctgaaggtagtgtgaatgcagcaggaccattgttagctcttttagggtttgtgatcttccctttcatttggtgtatccctgaggcactaatcactgcggagatgagtacaatgtttccaataaacggcggttttgttgtttgggtctcctctgctttgggaaccttttgggggtttcaagtaggttggatgaaatggctttgcggtgttattgataacgctttgtatcctgttcttttcctcgattatttgaagtccgcggtcccggctttagctactggtttgccaagagttgcatcgatcttgatcttgactctattgcttacttacttaaactatagaggactaaccattgttggttggaccgctgtgtttatgggagttttctctatgcttccgtttgctgtaatgagtctggtttctattccgcagctcgagccttcgagatggcttgtgatggatttaggaaatgtcaactggaacttgtatctcaacacgcttttatggaatctgaactactgggattcggttagtacactggccggtgaagtggcaaatccgaagaaaacacttcctaaggctttgtgttacggtgttatctttgtcgctctttcgaacttcctccctcttttgtctggaaccggggctataccgttggatcgtgagttatggacagatggatatctagctgaggttgctaaagccatcggtggaggatggttacaattgtgggttcaagcggctgcagctacatcaaacatgggaatgtttttagccgaaatgagtagtgattcctttcagctacttggaatggctgaactcggtatacttcccgagatctttgcgcaaagatctcgctacgggacacctttactagggattctgttttcagcctcaggtgttttactcttgtcaggattaagctttcaagagattatagctgcagagaatttgctttactgtggtggaatgattttggagtttatagcatttgttagactgaggaagaaacatccggctgcatcgagaccgtataagatacctgttggaaccgttggttcgattctgatatgtgtccctccgattgtactgatatgtttggttattgttctatctactattaaagtggctcttgtgagctttgtgatggtggtcattggtttcttgatgaaaccttgtttaaatcatatggatggaaagaaatgggtcaaattctcagtctgttctgatttggcagagtttcagaaggagaatttggattgtgaagagtctttgttacgttagggatacaaaggtaaaaaagcttggaacctatagtcaaactcaaacaaactgtatatctttctgctcgttttttactttttgttcaaattctttgttctctgtttaagatcataagcacaagaagatatgtgtaaatgttgtatcattcagtttttcttttgaaatgaaacccattggtgatagcccaatacgtttatggaggcccatgagagcccaataagtaatacaaaattcatttgtagatctaccgtttatgtacgatgtgatcgagatgctcacaaatgtttgaaagaagaaaaaaccctaaacccccaaaatttgcttcgagaagaaaatgaatggtgtctctcgtcatcttcgagcttcttcacttctttcattaattcgcagctatggtggaatcaattcggtctgtcgattttcgtctcaatctgatggcttctctggttcgtcatttcccatttttatctctcccgatccatattttgcttcttcaattttgagttatgacccagaactatgattgaatcgagaacaattttcttctgggtttgatctgatttatgcatttgagttgtacaatcaatattttggatttggcgtttaagttttccactatcgtcaagtgatgttgtcctccatgaaaatgtgtaatttcgttattaggtattgttcaggattctaacctttgcctagaagtacagaacgaggatttgaatcaattagtctcaaggatcagcttcttatggctctttaacaatttgctgtattcagaaattaggcaattattgcaattggtaacgagatatctacaaatcatgaatctggaaaacatttctttggagcagcttaggctatatgcaaggagggaattataatgtatctgtattgattgattatttatttcgtggattcttcttgaacaggagggagattcagagagcaagtgccagtttctggagagtctgcaaataattcaggcttatcaaacacgggaagaatcggttcctctccggagcctaatccttcgactttgagaacttttggtgatatgaaagcaggcttgttaaacagaggagtcaatggtttctcggctcctaatgctcctcctaccttcaaaagttcactgagatcaagattaccaaactctctacctgatcagttcggtcagacgaatccaggcttaccaaacacgggaggaagcggattctctgctccaagtttatcaagctacgagaatttcactcaatcttcttcgcttcttaaggagaattcccgcagtggagggaagtcaagcgacctggattttgttagagaagtaatagaagatgaaggaaggagaaccgcagggatattctctcatttccaacgcccaaacctcgaaacgaatgctgacatcattcacatcaagatgttgaggaacaacacttttgtcacggttacagattccaaaggaaacgtcaaatgcaaagctacatctggtagtttacccgatctgaaaggtggaaggaagatgacgaattacacagctgatgcaaccgctgaaaacattgggagaagagctaaggctatggggctgaaatctgtggtggttaaggtgaacggatttacgcatttcggaaagaagaagaaagctattatcgcgtttagagacggtttcaccaactcgaggtctgatcagaatccgatagtctacatcgaggacactactaggaaagctcataatggttgcagattaccaaggaaacgtcgggtgtgaaaagaaaacgtcccatgtcgtcgtctcttgttattctatggtcactatagaaaccatttgttttggcaagttatatcttttcttggttatgttttctccttcaaatccgaggaaaatcgggtttagataattggaccaaagcgatttgattaataaaccggaattgttttcctgttttgacccaatagaaaatttgacattttaatcccagaccatataagcctgtcaaatatagaagcaataaagttattcaaaaatagttattttgctttggaaataaatcgctctcttggtctcaggaagtgagtcgatagattgaggaaaatctggtttagataattggaccaaagggatttgattcattaaccggaatcttaagccttgtcaaattctgttcacatatataagcaataaagttttttttaaagtagtgattgatttggaaataaatcgctctctcggtctcagagattgagattccgatacggcggagcaaagcaatttaataaacctagggttcagattatgacggcggcggaatcaatcgccgcatcgattaatcaaattgatgagaagaaacaaaaattgaagaaagctttcgatgatcttcaagctcatcgatctctcctttcaccatcttttaacctctcatggtctgagattgactctcacttttcttctctccagtcttcattgtttaaccgcctccaatcagccgtgactagttccaattccggtaatatcgaaactcccacggcggttacgacggagacaccagtcctttggccggaattgagaaagttttgtgagaagaatgatggaaaaggtttgggtaactacatgattgagaattcgaggaagcgtttatctatcaatgaagagcttcctaatgcgattcgatgctcagagaatccagcacctttggttctagatgcaatcgaaggttcttaccattgctcatcaccatcgtcgtcttcctcggcgagagcgatcgatgtgaagaggatcttcgttttgttattagaagctttgattgagatcaatgcgaatctcacgaatgatttgagagaaagagctaggactattgcttatgattggaaaccaaatataggtaacaaaccatcagaagcgttagggtttttgcatttggttgcagcttttgaattagggtctttatttagtactgaggagatttgtgattacattttcttgatctctaagtataaacaagcaacaacgatctgcaagaagattggtttagatagaaatcgaataggagttctcgttcagaagtttttggatactgggagattacttgttgctattagattcatttacgagaatgagatggtgggtgaatttgaaccagtttcgattttgaaaactagtttgaagaactctagagaagctgctaagagagtttgtgctgaagggaattactctcttaaggtgcagaacgaagctactgataaagaactaagtgctttgagagcagttatcaaagtcgtgaaagagaaaaacatcgagtccgagttcatggaagagaaactcgaagaatgtgttaaggagttggaggatcagaaagctcagaggaagcgtgccactaagttcaattcacctgctaatccccaacaaccacaagaacaaaaggtcgataataagcgtcctcgagttgctaatggttcaagtatggaatataatttgacaatcccacctctgaggccgcaacaacaaccaccacttttgcctactcctagtcagattttacaagtgaacccatatggtcttttaagctcaatacttcctggtgttgctgtcccatatggcaacccaagggctctatttggctcggttccagctccagcttctcgacccgtcttttatgtgcagcaaactggttatgggatgccaccacctcagtaccgcccaccgtactatcctcagtagcatctctctattggtaagatttattataggaatgcaagcgatattgagaagatttctgctcgaacaggtctatgctctctatgtgtttttgatgttcagtaatgaatatcaagtaaatttcgagagttttgacatagataacacttgatatagtcgctgtttgggggataacataagagcaaattgatccgttttttctttttttgtttacctggtgaagcgactatagaggattttgccttgattgtacagttttataacctaaccttaacctctttttaatttagtttagtttacttgtggaggaatggtctttatggttttgatctaacatttatattccttgatttgttaggtaatcttccaagatttcctcccttttttcttataatcaccaaagatcccttttggtttgatttgttgtagtgggaagaaatctacgtgtctggatatctaaaatgatccaaaggataatattcaactagcacagaaacagaaatagtttttttttcattaaactatttaagtttacaaaaggatatgcttatggtttttctgatggaacagaaaattaatattgtcatttcaatggagaaggaacatgttcgatgagcaaaaaaaagaaaaaacagaacatgttctttgttttacagttgtacccatactgatcagaataagccaatcaacggggtgtctgaatccacgtatacagtatctatctctaaaaatatttatttcctttaaagaaaatatttaatagttatggcttatgggcctgagaggtttatcatgacgcccatatatatctcacgcgttgtcctcgtcttctccgtcttacactgatttaattctcctaccaatctcaacttccgacgtctattcatcatgggtttgaaggtacgttcagatccaaaatgaaccaaaccgatctcggtttcggtttattactactcggatcttagttttgtttgtgttcaccattcctgaattctatattttctgtgttggtagccttgtttgatccagatttgcagatatataggttccttatagttacgaaattgaagcttgtatagtcaagaatgatcactttatggaattgaattattactgatcacgctttttctctgtatgattttgtccatttactgttcttataactgatttgttaaacactgtttgctgatgggtaatatagttttgaatctgagctaggtttggttttattgagttttgtttgattattgtatcccgattgagaattttaagtagtaatatgtttgatggtgtattaggctattaagaatcttttcttcgaatttgttgtttcactgatttatatatctgcaggaggaatttgaggagcacgctgagaaagtgaatacgctcacggagttgccatccaacgaggatttgctcattctctacggactctacaagcaagccaagtttgggcctgtggacaccagttaatatttttgtctgaatattaacatcctctatttttgcttcttagttcacttttctgtaatgttgttaataatgtgtatttgtttattgattgattcaaaggtcgtcctggaatgttcagcatgaaggagagagccaagtgggatgcttggaaggctgttgaaggtacaaaaacaattcaagtgatcaacttttttagcttagtgatttgtttgtaatttggattcttgtctcaagttcaacaattttttgtgcttggggaattgaatttgaacttttctttgtttatgatgtcagggaaatcatcggaagaagccatgaatgactatatcactaaggtcaagcaactcttggaagttgctgcttccaaggcttcaacctgatgaatcaaatcctcatctgcagtaactttatcttaagcatcaaaataacattgcataagacttgttcttgctcttgtgtttctatcatatttaagctatctactttgtgacatggtgtgatctcttaaaaatgcttgatattggttaaaacagagaatcatgatgcaaactaaatccataagttatttttggtccgtcctcgatatggtcttagttaaaacagttgaattcaagatgatatattcgttctggtccgtaggtctttttcttcatggtccatcgcattcaccactcactagaaaactttcgttttatttcaatttggagtacataagacaaaagctggaaaaaaaaagaacgtggcagattttttatttatttttttcgtctcgaacattggcagaattgttcaaattgtatgtggtttatttaaagtcaaattcgtaaataaatagacgtttagttttaaagtgtctacaaatttgaggtttataatttggtagatgacaaaaacaatagtttttttattgagttgatcataattacttttattttttattgattgtagattaacttccttcccttaatgataatctcttaaccgtgattcaagaaattaaataatattgtagaatattaaaataattaattgtatgttgaacatactaatatttagtattatgataatctctttatcaaaattatacatctagaatttttatattaaatgcattgtgtttttcaattgaaaattaaacgatataaatatatagtatatgcactttaacataacaaattcttttatatattttaatataagtgaaataattaatctatatatacatttttgtaggaggtttttgaagataatgttgaagatgtgaaccataattcaacaattaattcaaatgggtgggttttacccgatttaactctattcggatcctggataacatgtttaattctgttctgatcttggataacattaatttttggaaaagttacctaaaaactaataattaaaaacgaaattaatgatttaattacataatataaacaatatctctaaactaaccatatttcttatttaccttaactaatttcctaaaatatttctacctaatttaaacataaatatataattcttctttcatttttatttgatcttatactttatttattttgaatttatataaaatatatatagttaataaaatattatattttttctgaatatgatgtaattcaaattttttaaaacggaaatatattattcaacctatgaagaaataatatgtgtacaatgtcccacatcgcttagaaaaattggacaatagttcagacccatattataaaaggaccaaaatgattctgattacgaatgagcaggaagcttgatttatcaggcgtctaaaattaaaatagttatccgattttactcggattttttattttaaagaattgaaactttaaaatgtttcaagaaattataaatattataactttatcaaaagttaaatattataattttaaaaactttttataaagtttatctttaaaaaatgctttaaatatttataattttaaaacttataaagttttaaaaattataaattgaattttacaagaaatttaaacattataaatatataaaaatatattaatacgagacgatatattacaggaaaaatcttcaatataacaatcaaaattcaatgatgatttttgggtcgatattgtatttttgtaagtttcaaattttataatattgaaatttataagaaaatgacaaaattatgtttaatttcacgggactgggttatatggtaggacgggtttgggtggataataattacgattttagaatgtcccacatcgcttaaaaaaattggacaatggtcaagccatactataaaaaggaccaaaatgatttcgattacgaatgatcatgaaacttgatttatgaggtatccaagattaaatggtttgtttactagggttatttattttaaaaaattgaaactttaaaaagtttaagaaattataaattaaattttacaagaaatttaaacaatataaaagatattaatacgggacgatatactgcgagagaaatcttagatataacactcaaaattcaatgatgaagtttggatcaatattaatcttttttgaagtttctaattttataaatatttgaaatttataataaaatgacaaatttgtgtttaatttcacgggacggggttatatggtgtgacgggtttgagtggataataacatgggatagtatgctatggaaaaaaacatataataacaatcataatataattatataatcttaaacactaaacaaaattaacaatattaaaaaaacacacttaaaactttattttttttaaaacacattttgattcttttataaaaaatttaaacattataaatatttaaactttatactacgggtgaaattttagaattgactgtttgggttgataagaatttgcgatagaactaggagttaaatcctagaatgacaatcaaaatataattatacaattaaatactaccacgagtgaaatcctagaattgacgagtttgaatcgatattaatatgggatggtgtactacgggtgatattttagaattgactggtttgggttgataataatttacgatagaattaggagtgaaatcctagaatgacaattaaaatataattatacaattaaatattaccacgggtgaaatcctagaattgacgggtttgattcgatattaatatgggatggtgtactacgggtgatattttagaattgactggtttgggttgataataatttgcgatagaattaggagtgaaatcctagaatgacaattaaaatataattatacaattaaatactaccacgggtgaaatcctagaattgacgggcttgattcgatattaatatgggatggtgtactacgggtgatattttagaattgactggtttgggttgataataatttgcgatagaattaggagtgaaatcctagaatgacaattaaaatataattatacaattagatattactacgggtgaaatcctagaattgacgggtttgattcgatattaatatgagatggtgtactacgggtgaaatccgaaaaacaacaatcaaaatataattatacaatattaaacatttaacaaaataaacaaatacaacttaaaactttaaaatttgagttataaaatttcgtctcgcggtgaattatacatttaaataaaaaaatagcataaatttattaaatcatcctaaaaaatattcaattatttttatttaataaaaatataggtccgcggtataccgcgggttaatatctagtactaaactaattaattgtatgtagaacatagtaataattggtagtgaaagcaaatagatttggtgttatagtgtaatataattatctgataatctgaattagaaattttaaaaaatcagaccacatttgaaagtttcagaaagtagaaaaacaaaatattaacaaacatatatataacaaaattcgaaccaaatttgctcatgtatatatttgttctcagatagtgtgtgtaaaaggctttttagattaactagctccaattcgtagtcatattagataaaatatcgggtataaaaccattattcattgtgatccattaatattatcatgaaaaatcttaaatctaaatggacatataagtaatggctttagaacctcctcaagtgtgtactatgacccgtaaaatgacatgtatatttttagataagaatgtgtttttatgtctgacgctttgcagtaagaatgtgttcttatttttagataagaatgtatttttagataaatatcgggtataacatgtatatttttagcagtagccaatccgcgtctttacctttttaccgtaaacaccaagccatgtcacaaattctttctttttcatttacaatatttttgtgtcacatatgttaatcttttattagataagaatgtgtttttatgtctgacgcttagtttaataaagcacaagctgtgtctagacgataagtatttggaataattaagaaaaatgtgtttttaaagtttaataatttcaaggaaaaaaaccacaataacataaatcataagtatttgagtgttaaatatgtatttagtcaaaattgttcaataaatatttggtttggactcaatttttaatataaaaaatctttatagaagttatcttatttaaaaaattgacatatttaattttggttaagtttagttaataagaataagtagtaaaagtgtttgacataaattggataataaaattaaataaatgaaaactaaaaaaattgaataattgtgggcttaacacataaataccaaaaattctattttaatatatagaggatcaatcgttaccaaaaacaattgacaaaaatacgaagataattattaattggtgtttacatagaaaataaaacgagtctcattcactacaaatttcttttaaatcacgacaagaaaatctatttcatctactttaattttattttgttaacgaaaaaggatatttttataattttaaaaccaaatttcttaatattctaacgtccataaaacgttcattacaattgtcacaaatgcatgaacaagcttggcatatactactgttcggctacccccaaaccaaaatagatattattaaaaataggatatattatagtattatcataattataattccacaaaatatatcagaaaatttaacagtttgaataatttttattcgattgatgagtacttttatcaaagatgcaaaaaacataaaagaactgggaaatgttattttaaataaaccgaaaaagcaatccgtctctggttttgtatctgtctctcctaaacattattcaaaatttgaaaaccaaacgttcccgattttcatccttttgtcttctccaccggaagcctttgcgccgcaataccgccgcctccgccgcttcagctgcatcggtgattgtaaatagccgtcttcttattctaacaaggtaagtcatcggtatcttcatcatctactttttcgtcttcttcttcctcctcttataaaccctaatttcgaagggttttaatacagtcgcagtgtttacaaatcctcaatttgatgctcatgttagattcacctccaatttgattttaatttctggaattttcccccattttgtttgattcgatttagcttttgactttgataaaccacaataatcagactaagtattttgtgcatttcgttttttgattagtcgtatagcttctatttagctgatttgttgttgttgtcgtctcaggttcttccaatgtctttgttaagtagattcttttacaagagaccaccagatggattacttgaatttgctgatagagtttatggtaatcatcaccatttcttttcttaatcatgtattagtgatttaacaatttagcttaatagacatctaatattcaaaatctgtgtgtaaatgtacagtttttgattcatgtttttgcacggaggtgttggctgatagcttgtatcagatcttcttgcatgaagttatcaatgatttacacgaagaattcccggaatcgtcgtttttagcgtttaatttccgagaaggggagaaaaaaagcgtgtttgctgaaactctctgtgaatatgatgttactgttcttgagtatccgaggcagtatgaaggctgtcctatgcttcctttatcattgattcaacattttctccgtgtttgtgagagttggcttgctcgtgggaaccgtcaggatgttattcttcttcactgtgaaagaggaggatggccacttttggcttttattctagctagttttctgattttcaggaaagttcatagtggtgagcgtagaactcttgagattgtgcatcgagaggctcccaagggtctcttgcagctgctttcaccgttaaatccgtttccttctcaacttcgttatcttcagtatgtagcgaggaggaacattaattctgagtggccacctcctgaaagagctctttctttggattgtgtgataattcgaggtatcccaaactttgactctcaacatggctgcagaccgattatacgtatttttggaagaaactatagtagtaaatctggtctttcaacggagatggtgtattctatgtctgataagaaaaaaccccttcgccattacagacaggtgggtttgatcttatgttttatgatttgtttgacaccttctataaagtatcactcttctgagtaacgtaaatctgtaccatatggctccaggcagaatgtgacgtaatcaaaattgatatccagtgctgggttcaaggagatgttgtactggagtgtgtgcatatggatttggatccagaacgagaggttatgatgtttcgtgtgatgtttaatactgcatttatcaggtccaacatactaatgttgaactctgacaacttggatattctttgggaggccaaggatcattacccaaaagggtttcgagcagaggtatgtaccttaatatccatttcttttgatttcatatgaatgtaaaggatatgagaaaatatgggtgcggaaaggttcaaacacacacaaaatgactaaccttacattggtggataaagctagtcaatactcatgctaagctacacttgtgcttttttctaactccattctttttgcattcaggtcttgtttggagaagttgagaatgcatcgcctcagaaagttccaaccccaatagtaaatggtgatgagactggtggattgcccattgaagccttttctagagttcaagaactttttagcggtgtggatttggctgagaatggagatgatgctgctttgtggttgctgaaacaacttgctgccattaatgatgcaaaagagtttacaagatttcggcacaaagggagtttttattttaattctcctgactctgaagaggagacaaacacatctagtgccgctgatagttcagatgaaggctttgaagccattcagagacctcgtattcatataccttttgataatgatgatacagacgacattactttgtctgtcgctcacgaatcgtcagaggagcctcatgaattctctcatcaccatcatcatgaaattccagcgaaagacagtgtcgacaaccctttgaatcttccatcagatccaccatcttctggtgatcatgtcacacttctgcctccaccgccaccgccacctcctccccctctttttacgagcacaacttcattctcaccctcacagccacccccaccgccacctcctccccctctttttatgagcacaacttcattctcaccctcacagccacccccaccgccacctcctccccctctttttacgagcacaacttcattctcaccctcacagccacccccaccaccacctctccctagtttcagcaatagagatcctttgacaacattgcatcaacctatcaataaaactcctccaccaccacctcctcctcccccgccactgccatctagaagcatccctccgccattagctcaaccaccaccaccacgtcctcctcctcctcctcctccgcctccttcttcaagaagcattccttcgccctcagcaccaccgccaccgccaccaccgcctccgtcgtttgggagcacaggaaataagcgtcaggcgcaaccacctccacctccacctcctcctcctcccacaagaattcctgctgctaaatgtgcaccaccaccacccccgcctccacctacatctcattctggttctattcgtgttggcccaccttcgacaccaccaccacctccacctcctcctcctaaagctaatatttcaaatgcccccaagccaccagcccctccgccacttcctccttcatctacaaggttgggtgctccccctcctcctccaccaccaccactatccaagacccctgctccgcctccaccacctctatccaagacccctgttcctcctcctccaccagggctgggtcgtggtacaagtagtggcccaccaccactgggagcaaaaggttcaaatgcaccaccaccacctcctcctgcaggaagggggagagcttccttgggacttggaagaggccgaggtgtgagtgttcctactgctgcacctaagaaaaccgcgttaaaacctttgcattggtctaaagttactcgggcagcaaaaggtagtttgtgggctgatactcagaaacaggaaaatcaaccacggtgggtttctctttgtgtttttctttcttttaaatgttttagcttgacatacatgatttccgaataattcactgataacaattatgaaacaaaaatgaattgtctttacagttctgtcttgcgattttacctgtttcccataaagtactatttttgttgaactaatccgatgaattttacgaatcttcatgacagggccccagaaatagatatatcagagctcgagagtcttttttctgcagtttcagataccacagctaagaagagcacaggtcgccggggttctagtatcagcaaacctgagaaagttcaattggtgaggcagctcaatttcacctctgtacacatataacatctatatatataaatgacagtttggtaaaccaaatattaccaagagtggatctattaagtaggtatcacctacagctatatagtgtacattaaccagatggattcttcgatgatctaaagttaacttcggttgctagaagaagttgacaattgatagacattgcaaacatcatttattctctcaaatggatactctataactataataaatgattacgttcttgcctcttagtttgcttatctttcagttctaacccccttttttttttctgtgtttgtattaggttgacctgcgaagagcaaataactgtgaaataatgctcacgaaaataaagattcctttgccagatatgcttgtaagttttgctttcagtatcttttctgctcatcattttggcattgtaacaatactgtgaagtggttgtttagagggaataaacatacaagttttggattttggtgtttacataattacatatcttcttcatctatcattttgcatagttaaatctcttttcaatgaatgtttacagatttctactaattgagactttcaaatctatttcttatcttagagtgcagtgctagccttggattcattagctctggacattgaccaggttgaaaatctcatcaaattttgtccgaccaaggaagagatggaactgttgagggtaatttcaattttcattgtcatatttctctctagcaccaggttcataggttcttcttgcttggaaatcctactttccttcccttctgaatggttgattaatgtttctgaaccaaagaaagatcctgttgactaaattcctttcaacactttattattccctgaagttaaatcatatgctgttcttgttttcagaattatactggtgacaaggaaatgcttggaaagtgtgaacaggtttgtttagttgctaaagcgttggattatacttgtatatcatctctgctctgactcttaaccttgcaaatgtaccagtttttcatggaactaatgaaggttccacgtatagaagcaaagttacgagtgtttggctttaagattacctttgcttctcaggtagaaaagtcaaactctccgaatttggtcgctcctgtcgtcacacatgttgtaatcgttgttggttttttggttcttttcaggtggaggagttaaaaagctgcctaaatacaataaacgctgctactaaagaggtatagtggatggtgagatcttctaagtcatggcaatatatctccatcttggtaattaagtttcattattatgtaccaggtgaaggagtctgcaaagttgcgtcaaattatgcaaacaattttaacgttgggaaatgctctaaatcagggaactgcgagaggtatcatattttcctattgatttcaaatttgatattctgaaagcatctgctcataatgcctttgtgttgcagggtctgctgttgggttcaaactagacagtctccttaaattatctgatactcgtgctagaaataacaaaatgactttgatgcattacttatgcaaggtatcaattttctaatcactatttcaagagcgcatctttgtgctagaagtgcatcatactgtttatgcagttagttgtctaaggtgctgtttgaagatgaacttaataccttatttcctttctactgtttagcttgttggtgaaaaaatgccagaattgctggattttgctaatgaccttgttcacttagaagctgcttcaaaggtatgcttgttattcatggttacttctgtgagcttccaccttcttgtttattgcacctgctttattcttttcttaaaaatgcagattgaattgaaaacgttggctgaagaaatgcaagcggcgactaaaggccttgaaaaggttgagcaagaactcatggcttcagaaaatgatggtgcaatttctttgggcttcagaaaggtgagatacatgtgaaaatatgttcttagtttcctcatatgggcatcttgattaatctaaattggcaaatgataagaactacaaaatcttcgtagctgtttcaagtgagatcgtttatgttttcaggtcttgaaggagtttcttgatatggctgatgaggaagtgaagacgcttgcttcgctatattcagaagtggtgagttatatttaacagctcatcagttacttaaacactttttgggacaagcagttcaaactcatgttccaatcctaaaattaattgcaattcacagggaagaaatgcagattctttatctcactacttcggtgaggatccagctcgatgtccttttgagcaaggtacattgacaaatctcttcttctaaattgtctaagccattgtgggacaaatgcaaatattcattgatattctgaccaatgtttctatctgcagtgaccaagattctgactctttttatgaaaacattcatcaaatcccgagaggagaatgaaaaacaagccgaggctgagaagaagaaactggagaaagaagcaattaaagagaagtcagcgacaaagaaagatggcgtcgataacgacaacgatcttatccagcagatccatagacatagaacatgaacaaacatcggtcttgaacggaagacccgaggttttcagatcgatcgataaaagctttgttttataggactcaatgttgcacatacggaacaagagcagagatctttcctagatcttagacaaagtagtcaacgtctatgatgtttagatggaagtgttttatctctgatcacttcattgatgtaaaatcagaggttcgtatttatgtcctagaaaatatttgaacttacatagaacccagaagttatattatcttcactgtgcagacaaaaacatttttttttccaaagaataataaatcttctcattttacttgtctgcattttacagtgcagataaataatcagaaagcattggtcatgttccaacaattcaacatttgctgttctaacacaagatttttgcttcttcatctgagcttgtttgttttcagttttgtaaagatgaagacttaagaaagagcagatgaaacttcatcccgtgaagtatccattggaagtatcggtacggatggtatgtccagaggttttgtcctctttgttactgtcaatttcaatccttctgtggtgtgtattgtagctcctgtagtcattttcacctgtacatccacaaaacgaatatcgagaaacgaattaactgttagtgatctttcagtttacatttcaagttttctcttagttcagctttcaaatatttgtgtcgtattgagactgaacagaaagagttaccggaggagctcctggtgcaatctgaaagttaaatcttcgaataagcattgcgattgctaccacattctacaaacagagatttctgtcactacaagaacatctgaagcaggtactcatatgtcacaagtattgatgtcaactaactctttacctcaaaggaagcaaacatgtcgcctatacatttccgcggtcctccaccgaaaggtaagtaactggagaagaaaagtttccagatataatcaaatcataatgaaatgagaagtgacaaacaatagtcttttacctgaagttttggtttgtctcatttgggtttggtccatccaaaggccatctctcgggattgaacttctctgcatcatcccaatgcagaggacttcgatgtagattccaaaccgagatgaagatatcctctcccctgttagtttttttaaaacacaatctcttatcagaactcagaagttacaaacgaaaaccacaatgttgaaactttcgtgacctttttatcggatactctccaagtatatcattatctatagaacgacggatcagtactggtggttgtggatataatctcaatgactgcacaacatcaaagtaaaaaggtaaatcaaataagcttttacctcaaccagtagtgaattttcaattgccttttacctcattcatgactcgagtagtgtatttcagctttttcatatcttgtatggttgggaatctatctccaattacagaatcaacctaaatagaaacaaactcttcttttaacatgtgaatgttcctgtaaagatcattttcaagaatgatgtattcatacctcttcttgaagtttggcaactacacttggttcctgcaataccaacaaaagttacaaattttctttgggagtaaactaactgtttgatttaggttgatatgttcactctctaccgttgttaaaaggtaaaaggtccatgttaatactgccgccgatgtttcatgtccggctataagcattgtcatcaagtcatcacgaagctgcttactagagacctgaaacagaatttaagatccgttgaagctgatacctattagctatcggattcgaaaaaagaacagactattacatcatctcctgaagctaaaagaaagtgaaggatgctaggatctctttcgttcatatactcctcgtgaaactgcaactcctcttcttctaccattctctataaagacaagaaaatggaatcaagatccaaagagcaagaacaattcttgaacttaaactccgagttataccttgcatgttgcaatcaaatcatcaagtgtgtcattgattaatttcaaggaagtagcaactttcctctgacgtggggaaatatctttccaaatgggtatgtcccaaacaggaataggtgaaacacttctgtcttcagcttctcttagaacagtgtacactgcctaacaaagagaacacaagaagcatttcatctttactgatccaacacacaaaaaggtaaaagaaaactgaaggcaaagagggatagtcatgagggaacctcgatcacaccggtatcattagtaagggagtcaaagtcgtaattgaaaaccgccttgccaataatatcaagtgtcaaacgagagaagagtgattccatctctacttcttcccctttcaatgcagcagcatcaagcttctgacaaagcctatctgaagcttctccgaataaactaatcatagctgctacatactataaaacagtagaaaatgtaaacaatgactatattttcttacctcaaaaggatcatactttttatcctttttcacgaattgattaccttttgatgcaatgcaggaacaatggcacgccttcgtctacgccatatctccccatcagcaggaatgagtccttttcccatcacaaaatctagaatttcagctaaaatcccctaagatatacaaatagataatgatgtataagaaaaatcacaaaacgagaccattcattggtaaaaaatgttggtattgctagtggttattaccttggagtaagcttttgcattgtccttcaatatatgtttagcaatagaaggatccgacacgatcaagaatgactaccaatacaaatagcaaacacaaaatgattggattctttaaccaatactttttactctgtagttaagaaatcagaagataaagaaagaaacaaaccttaggcccaaaggtcaacctgaaaattccaccataagtaaggaaaagctcatacaaagggatgaagaaagcttcgttccggaccgcctgaatcgagcctttagcctcaggaaccttggggtagtcttggtcagaaccagtccaatcaaacatgaaatcaagaacattgcttggtattccaatcttagataaaccattcttcactgtagatggaaaacttgtacaaaccaaaacaaaaacacacaagaaccaaaagagaatcaagacaaaacatttacagaatcaatgctccattaggacaatacatgcttcttgatttggtaaatgggaattcacctagatttccgtacagtgaaagctccagaagcaatcctagcagataactcagcacgacgcttctcttcttgaagcttctccaagcttttcacaccattaggtactgaattctcctctaaaggatctcgtccattagaactcgacgagaaaactacaaagttcgatctccgagagtacgttactggtttaacagtaatcgtcggagtataagaaagaggaaaggccatagccatacaacgccaccgcaaaataaaaactcaaatcacagagctaaaaacagagactgaagtggaaaagaagaagaagaagaagagatgtgacgtgtgcattttactaacgtacactcattatctctttaagaggtgtcactattaattacctttgtttagtacaaaatccaatggatttttattttaattagtttccttaaacacgtttatataacacataaacaaacacacgcgcctgcaaacataagcaagttttgtggcagtgatgtacacgcgcgaaatctgtgcgtagttcgtcatatttaacgttaattagtggatttataatcaaaccggacctaaaattatttcaaacaaaagaaccgaaccggcttggcttttgtagctttgttcatcttcttcttctacaaaatattcgttatgaatctttcttctctttaagctctgcgactgcaaaagaaaatttcagatgaaaactttggaattagctttacctccatctccaccgtctttagttccttcttttaactacaattccaccgcacgaagcgtcgggaatgatgtcagaaccaacttcgatgttcaactttttctaaggaaacctaaacaccaaaaatcagaacctgtcgtcgttattcaacaacctcagattcaaccgcaaaatccaagttctcgttgttctacttctgatattctcagactaatggattctctttctttaccaggaaacgaagatatttactcttgtcttgccaaagaatcagccagagaaaacgatcaacgtggagctcacgagctacaagtgcatatcatgaagtctagtattagacccacgatcacttttatcaatcgtcttcttttgatgcatgtttcgtgtgggcgtttagatattacacgccagatgttcgatagaatgcctcacagagattttcattcctgggcaattgttttcctcggttgtattgaaatgggtgattacgaggacgctgctttcctttttgtttcgatgttgaaacattctcagaaaggtgctttcaagattccgtcttggatcttgggctgcgttttgaaagcttgtgccatgattagagacttcgagttagggaaacaggttcatgccttgtgtcataagctagggtttatagacgaagaagattcatatctatcgggttctttgatacgtttctacggagaattcaggtgtttggaagacgctaatctcgtgttacaccagctctctaatgctaacactgttgcttgggcagcgaaagttactaacgattacagagaaggagagtttcaagaagtaatccgcgatttcatcgaaatgggtaaccatggaatcaagaagaacgtctcagtgttctctaatgttctaaaagcatgctcatgggtcagtgacggtgggagaagcgggcaacaagtgcatgcgaatgctataaagctcggatttgagtcagattgtttgatccgatgtcggttaattgagatgtatgggaagtatgggaaggtgaaagacgcggaaaaggtttttaagagtagtaaggacgagactagtgttagttgctggaacgctatggtcgcaagttatatgcagaatgggatttacattgaagccattaagcttctctatcagatgaaagcaactggaatcaaagcacatgacacgcttttgaacgaagcccaccttcagatgtaactaactgtagataaagaaaatgattgaacctgatatgtaaatatatataagagtatttagatgaaaagataaattgattgtttggtttacaagtatgattacgaaagataattgaaaaaaaacaagcgtacattcatataccaagaatcgttcggatctgatctggtggatgtcgggcgagagactttggatctggatatccattttgttgatctgttacagcttggtatataacttcgtaagcttcagctaaagttttagcgaccctgacacaagcttcagacctgagtttagggacctgtatctgctcaaactcaggaagagagccttcgcttcccaaaacgaggccgaagaatgccttgaggcattcggatagcatcgcgggtgaagtgtcttgtcgttcagataagggaagttcggatgtggaagagcggaagatttgcattttgtctgaaagaccgcatttgtggagtagtgtgtcaacttcattctggacgaggaggtttatgtggttctcgatcattaatccaatgttggttacgtattgggacgcaacatcgtgtcttagcaatggttgttggatcgcgcataaacagttgatgaggaatatttttgagggtgtttcgttgttctgcaaaaagatcataagaagaaatgaaagttaggataattttttgggctatgaacgttgacgtataaactgtactggttttatataggcaaatgatacctgtggtggggatgggctgctagagagtagagcatcgactgaggttaactggcttgagtcagaacttgttctgcttcttctgggtaattggccgctcttctttgatttatgcgcctctgctgcttgctcgcacatctgcggatttgagaaagttgagaaatctgcttcaatgcacaatcatggttttcgatgcacacgatatttcataagtttgagctttcatgtaccttaataatagggtcaagcagtgcagagaggacgggatcaaaagccggtttctctcctgaagcagaaaccatcatactgttgtaattctcgataatctcaagagtaagagaaactccttctcggacagctggaggaggagagagatcaacggctacaggtggagggtatcgtagaagtttctctcctcgggttttaagaatgtcaaagaaggttttctgtgcagcatcctttaccattccaattgtattacacagtgcagtgtctcgcccaagtaaatctgagatctgcaaggtggaaaagaaaccaatgaggcaatgattaaaccaccagattgataaatgtcatataatatacagagcgacaagtacaaaaagaggctatgtaaaactcacagtgtagctgtagaactccaaggtgttggtgagtttgtaagaaataataagacttggttgtgactgcagaacttgttcgactctcactttaaatggacggcaaactccttcaaaaattctatccagaacaaatgtaaagtcagattctcctgcctttagggcaatattctcagaggtattttttgcgtttgattgatggtcagctgagtctatatcaaataaagcatgaaccaattctctttctgatgccaaagcctgcagccaaagtaacattttacattaggaaagaaataacaaataaaaggatatttagtctaatatagtaatgttcatgattatccggtactcaattcacaaacatgattatctattgttgagtgtagtaaacaaatcatcactcttacattagtcgcatgaggattaaatgagggtaccatatgagaagaaaatgtggtcacaaacctgatgtagccacccaagcatgtctcccacgtatcttaaggggtcatgggcatgaacttcaatgggtctaggcattcctccaggccctccacgtgtaagagcgctaataaatcttctaaataacgcattgtgcctcagattccctacctgaatgatttgacatagttcataaggagctcgacaaacatgccccatatagctgtatcgtagcagtttcacagagaattaaacttcagtgacgccaaaagactaacctcctctgcacaatatttgaagagaacgggtctttctttgagacaacgaacagcagtcctcaaaagctcactcacctctggattatccgtatcaccgagtttcctacactcagcctgaacccacctagaaaattcaaggttctttggttacaattgatacctcgaacttctatgaactctaggctcacggcaaaaacaaaggcaataataatgaacattctgctttaacagccagtactgagttttctcgttcgccctaaacgaatttagaaaaggtgaccctttttgaaaacaaataatcgtcctacaagtacaaaccatgaaaaacagtttacattcacccaaactatctaggttccaaattagcaatgaggaattcatgttaaatccaacactaagtttctaccaacaagccttcttggaaagaaacggatttgtaaagagacattgcagagaagttcaggatacaccaattatcaatacggaggtcatgctaaacccaaactctaaatttctactaacaagtcttctaaaaaacaagcagatatgtacctgcaaaggcgctcatatgctccttcttgatacacagccatcatatccatcaattccaaacccgcacgctgtatacaagtcccatacactcaaatactaaccacaccaatccactttgcacaaaaaaataaacacaattcgcaaaacacagtgaaaatatagcaaatctcacctgatgatgcgtcctaagaagtaatttgcaattggaatgaatttcctgaacatgagacaacgcttggaagaaattctcattcaattcatcttccctaagcgctttaatctgccaaaattgcatcaaacaatcaacactcattttcatattccagagatctgatcaccattaagttaatgattacactcacctcttcattcgaaagctggtaatcacgaagaaaacagttaacgatctcttgcctctgagtagtaacctcaagctcttgctttagcctctcagtagtactaataatatcgctagtggtagccgcggaactacttagcgccgccgcaatcttatcgcaacaatcagctaaagcattcacttcctcctccacgcgatccaatgcgatctgagtcgaatcagccgcgttaaggaactcactgttgatctgaagcgctcgtttctcgatcgtcgatctgagatttctccgtgcgtgagcactgttctcgtcgtagaatgaggataaagcgttaagcgacgccaccagatccggactatctgtacgacaatccaataccttcttcaatttccgggagagccccggtgctaatcccaccgtcgaagccattgttactctgcttcgtttggttttcttctacaaacgatcttcgagcattgccttcttcttcttcttcttcgatctctgatgatcttcttcctcctgcagaacggtcggatctcaaatgattctatgggtcaaaaactcagtaagtcaggcccagattatattttatttatgggcctcttataatggcccattatagatgacatcaaatgaggcagcaattttttttcaccaaatgagacagacataattccacattggctatatacatatactgtttcaatatatataaacacaaaatgtgttaaataatttattcttaaattatatgacaaatctcgatattgtgattccgatgtgattgtgaccttacaatgttttcgtcaaatctttattccaaaattatgccaagtcgtggttctgctatactctgacgcagacattgtaacgtcaaatattgatttcaatgcaaacttttgaactctacataagatcatatattagtggttttctaacgttaatttacgatttttccagtttgaggcataatatgaatttgtggttcggatggaaaacctcaaaatgttatgatgtgattcaaaagcaaaacattagtgatacgtaaagtcgggtttctactattttcaagcaaaatcatgattctacagccaaactatcatgttataactagttgaattttatcagtccatatcttacacgcaatcatttgtattagtagataaagctcatttacacccaaaaaaagttccataattaacttcgttggtaacaaaaaatgaatctactaattttacaacttaaagacactatactatggcttgaaagccttgaatacttaaacataaaccatcttacctataaataagcattacgtttgatcaaaccaaatgctttataattagtttttgttaataatgggcggtgcaaagttattaaggattgtgtaagagtgcaacgaaataattaatcgaaaaaggaaaaagggaaaaaaacaatggtggacgagttgtgctagctacatcacaagatgatgattaagacaaacaatgattagcgctataaatactcccaagtgggtttacgggcccgaccaggatggtctaatatcctcgaaaacacacacgcctatgaactagttatatgactaattaggcatttaattatcaaaaagaattttgctagacaaatcaaaaaagattttagagagtatatatattaatggcatcaatgtcgcattcatgatcacgacaaggatcgatcactgtaaatatatacagcatttactacaaaggatttgttaaaaatgtgtaatctgatttgaaactatatgactaaggttttgcatgctgatgactttttattaataccatcatatatatcttttttttttttatgattatcatatatatctttattttgggtttaaccctatatctttattaggggtaacttggtttgtctagttggaagctaaatatagttcaatagaatcaacaataggaaaaggaaaacaatcaactcacagtaatttagtggttaaaaagggagttggggaaacaaaattcaaaatttcctattgcacacttttaattatggttagctaggtcttatgtgataaaaattcaatttcttacgggcgacaacaagtttcaaaaattttcttgagatcttcttgttaccataagattaaacaaaaaaaacagatatctataaattgaagtgataagttttacttgtaaatcctagtcgaaaaccgaacatatatacttttcatatatattaattattagtatatgtgtgtgtgtatagcacttccacaatgatatgatatgttaagatggtcaacctcacaatgatatcaaaaattgtatcaatactttcctccactcacaaaaagaattgtttgggtaactaaatcattgaacacatatttttgtagtaatgactttttactatagtagctagtattaactacccgccgtttttctattcgtggaattatattcgattctattgtgcaccatgagtattgaatgttatgggactttaggttgtttttgttttaaataggtttgtctgaaatcggatgcattaactaaatcaaatattctatttttttaagaacaaattacgtcaaaagaacataagtttaggactttcagaaatacgatgtatgtgaaaaaagaaaaattaaaaaaattgggctggctatatatgtttttgaaaggttaaatctattaactaagaaaaactcaacaaattatatattaaaatatacagatacccttgacacaaagagtggaaataaaatatttaactaaaaaaaatcgaataaaatcagcaaaagaaccaaaaggtatactagtgatttgaccataaacatgaacgtaatcttctttattcgagagtatatttataaaaaaaaaattgagtataaagatgcttagcacaagaaaattgtattatgaattcttacaaaaaatggaaaagtagaaataaggaaacaatccaacattgatcacatatagccacactaattaaaatatacagaaaacatgaaaactcaaaatcttgattaattttctgattaactcatttggtcatatttattttgagttactcttgatcaaattcacaaagaagtgtccacactccataatatatactctttaagtccaggttttggtggacgtataaatcatattttgcgtgtcctgagtagaatgatagcatgagtttttctgtttgacaaataaacatatcaaatccttgaaaaataaatgtaactttttggtgtagcatgatagtaaaggaacaatcacgtgcgattgattttccaacaatgggttgctagtgaaaaaaaggacaaacaaagacacattgatcggtctctcacgctttgtccggtagattaatttcatatacctttcccacaaaacaaaaacaaaaacaaaagctgttttacaatgtcacgatgaatacgaatctggtatagttggtttatatgagttgttgatttctttggatattaataaaaaaatcagttgagtaggtttaatagaatatgagagtaatgaggaacagagttttaggtaatacataattttttaaaagtcatcacgtccaatatataatcaacttttgtttgcagtcacaaatttcacatttgctgatttgcagccatagtatcaatgattatacgaaataccaaccattttatttagttatatttctgaaagtttatacaatttcttatttatgatattaatgagactctatatttacattagattttatatagacatattacgaagtttgatcatttgtaaactgattcaggttgatattcgaaagtattttatattattgtttgttaatttattcaaatttaatttaatatctttacagaattttaattccactttttgtaattaattaaaactagtctacttatgaaatcaatcctaaactttatttttattttctccaaaatagttttagtctaagggttatcttctctgttaggattggtgggttggatcattgttcaatttgtaattaactctcttaaaacaatgatataaagtaaatgaaaatatagaaacttggaatattttgtaattatctcgacgcttcaaagtcgtaaggctataaagtatgaacaagataggtgacacatgataataaacatagtaaataggaatgcgtgctttaacttccattcatatcatattctagctcactacgatgatatacctatggggttgaattaatgtagataatatgatttgctatacactaaattctatatagatgtctagatgataggcacctatggatttggatgttaattatcactaaaacatacgtacggtcgttacaaaagaaaacacttacgtaacaatgatcacatccacgttaaaatgttaaaattcatcgcaaaatctattaatagtaacagtttagcaaaatactaattaaaacatgcctgcaaataattgttaacggatgagctaaattaccttgaaaaataccaattgacacttttatttattcatcacttagttcgatttttcatgtaaacatataaatatttagatgagagtgttttaacgagtttagtaatcgatgaggttaccaaacatattatgcataccaaacagattgtctataagtagtgtacataatatatttaacgtcaataaaaattatacgtatatattaatatatatacatgtatatattcatacataatattccgttctctgtttatttttataaataaagtgaaaaaataaagatcaagtacaattatttagactgatttacttgggtctttatatataagacaactaatataattatttaatttaaattattggttaggggttaaggggatgaggggccagaaaatcaaatgagaagagacaaacattactttgaaagatcttcttttatcactttcttcacatcttgtctttcgtatgtatacgtatacacacatcatgtcatgttattttggcgtatgtacttttttcctatgtagtatcattaattctagccaaatttgtttcgtaaaattcgagacagtcaactatttgaatcattggcgatgaatgatatattattttcacgtgttcatgttttgaaaacgtatttctacttcttcttttttgctatcattcaaaagttaataataatatagctggttttaaagtataaacgtgtaatagaaaagttgatggattttacatttcaaatttaatcggcaataactacatttgtataaatataataccaatgttctttaaagatgaaagtttctctacctctttcttgttgaattaatatctgcttacaaattagagttggttattcatctcaattaaactacctcagtgtcgtctcctctcattgacctatcaaatgaacaaaaaaatcaacaataagaaaagagtaacatagtgtataagattatattatcataccagtagtccctaacagcatagttaattacttccatgtgaacagtattcttctatagcatctttcacaagtaaaggtaaatttgtaacagtcaagtaaaacttcttaatattcatcatgatacaattatttacagttgggaaaaccagtatacaaaaagatgatgtgaaatgaagaagataatataaataaagttgagttataaaaaagatagaagagacaatgattggtgagagtgagaaaatttctgatctcattttgagtgctttcttagctaacatcgaagattgcatcccaacgttactcccactttccacgcgtgtgtgtgtttgtttttttctttccatttcatttcacatcctctctttatatagtaaactaatactaaaaaaacatttcctaacttatatcacaaattcacaacttcgattaaaatgacctaaatgaaaaattataccaaaaacattaagtaaaactatatagtggatacagtagattgagtagatgcagatggtgatgcactatagatttaggcattcagctcaaaagttgttgagttttccgaaaaattcacggatttgttactcgtttaatgaaacgacttagtaattgtgggagacaatttcatattaagaatttggattaagccaatacatgatcccgttttgcaactgtggtgacaagtcttgagccgtcttcttacctaaattttgtagtattttttattatatgacttgttgcgactaattgtttgtcacatttatagtattctaaatactctatctagtaaatcgatttgtgattatttgaaaatttagatcaaacaccttgggagctagtcgtatatgtgtttgaaattgtttgtgtagatcatatgatatagatgcctgaaaatatggatgtttaagcttgatgagttatgtcttcaatgagtaatattgattgtatgaattgaatggttgatgagattccttactaaaaccttaaaacctagcgaaactggataattgtaatcacacatttttcctttagttctttcgtttttttaaagcaagaaaatataatatatattttttagaattaattacggatttaatattttttaaatgaatttactattttttgaatagtttatatatatttttttcagactataaaaatatgattaaagttttcctcctatttggtaacaaacagaaacatgtattttactcgttatgtttggatttactcgattccatctgtttttaaggttttagtatttagtataaagtatgtatttttacaactgaaaaaacataaatacgtatatttttaagtattaaaatgacaaatccttaaaattctagttgaaatgacatttttcaaaaacattttgatgaaaaatgataaaatcgaaataatctcttttatttactctgagacaaccttaataatggcaaagcttgaatgtttcatagatacaatattaaatattaagactaacaatatttcttataaccttgttcactgtgattattgactatacgtgtgtataatctaccgttttcaactataaatgttgcggtgcaatactgcaatggactagaacaggaattttttttgaaaatatcagaattagattaagtggagaaattacgtacttaatacttgcttttgctttttatagtaattagataaacaagttttagtagaatcaaatttgaattagtggctgggtcacatctaccccttgtttgaacaatattaagttcttaaatcaattattaattaattaatttgaacgtaatcaggacctgacatgagaacaagtaccccccactggagtgtcagagtgcgcaacacgtgtcaaattctgaactaatattcaaactcactaaatgacattttctccaccactacgacatatatcgacgactatcatcattttacattacttaattagttaattactgttttataattaataatcaattttttttttgttataaatgttaatatcatataaaatgaaaaagaaatatcacagaagagcaaatttagaataattttagcaaaaataaaatataaaatacaattacaatacgacttgagaaaacattgtaggaaattcaactaatccatctaatcatcaagttgtgaaacctctttagatgttttcttgaagatatggtattatgaattttacgatcaatgttcttgaaaatgatagaagaaaacagtcattgtgaattataagatattatttctttgtttccaaatgtggtaaactcatgcgtgtgcggctaatcaaattcttattactaccgttaattctccctaattcaataattttatacttctatatattgactctaaaattaattacgggtagaccaatgaaatagattctcatacttgtaaaatactctactatttatacatgcattaaaatattcatacatataattctataacaaaataatgtatatgatatataaaattattatattcttaatataatataagcaagttggtggcaaaaagaggtgccatcggagaggatgcgcaccaaagatttctaccaaagaaattattttaattagtaaaaacaatatcttatacaattaaaaatcagaacaaaatttgaaaagaagagaaagaaaaaaggcaaagactgtctagctccacttggagtccacactaaaaagatcaaatgctatgcgaagatctgaaatagtacacattattttatactatctattatataaaaaatgttaatatgtaataaaatctatgtaagtactgcgtatttaatattctttgaagataattagatgcccttttctttatattatctgtaacttaaatcaacgtataaagcgtttaatatcaaactcaaaaaaaatatgtatggaacttagaatcatgaattagccgttcgtgtgtatatatttataatataatgaaacaaggtgaatcattctttctttcttttttggttgaataacaaggtgaataggtctgtaatagagtcagatatatgtacacacgaatatgctatatactaaaataatgaattaagtcctggtaaatgggatttttatatatcaatggtatctcgtttttgaggattcgtgggtagggggaaatatcattttttaatttttggttaaagggtaaaacgaatgaagttgaaagtgaaaggataagtctctttcactaagattttcttaaacgaaagaggtacatatatatatctatatatatatgtatttgattcaaacttacatattgtgcaaacgattctagggtttagtacttggaccgtgaaaggggatgaacagattgagggtgtaacaatagaacaatatttaaactaaaccgatcaatctgttatgattggaagtaattgcatacttaactttataaaaatatcacaatataatgaaacatgcatgattaattaagttttaagatctcaaaggttaatccgtttaaccatttaaaccaagagtcctcacaactatgattggttttgaaccctatttttaacatcttaacgtcttcttcttcttctttttctttctttttaacaacgaatgtataattttaatgttacagttaaacatccaaagttacaaattctgatgtcgtacataatttatttagtcatatatgcatcaacaacccattaactcacgcaatttgtttcttttttttaaagttctgctagatcaaacatgatattacaaattttaggccatttgaacattaaattcttagttgctttcatatttgaaaaaacagaaaaattctggcatctttagtattcaaataatatatagtcttatattccgattcatgctagtgggttatataactcaaagaatgacattacatatatttgaattacataagaaatcaaagaatccgaattttttattggagaactttccacgcgagggaatcaagatgaggaggatcgtattcgaactatcattttacaccggccataagtaaatcttctttccaaatcatcttaattcccaatcttccaagatattataatttaatatggacaaaatttgctaatggaatatgggataagaaaaaaacattcgcaatgctcgtaaacgcaacgcgacatctcgaaacaaaacaagtagtacagtatgaattaatcttccaacagtttattctgcataaagctttggccttagtattatagccctaaccaagaaaaagtaatttaaaaaattgactgctaacctcagctgataagacaatacggaatagcataaaatatgcaaaataaaagtgatataaacttataattataatagattgggaaataaaattgcagaaaaagtaattaactcaacaaataatgtagttggaataacttggagaacgagaggtatcaaaatgaatgtaactttttataatatattatgcaaaagatgaacatttgtataaatgtctatttgttcacagtggataaatataacgaaataaccgtagaatatgataccatatgcataatatacaaactaattaacatgcaaatttaccaacgcatcttccaaggtatgatggtcacactaaaaaaacaaaacaaaaaaacttcaagctcgtccaaggctagctaattagagccgtgttcttttatctctttctaaaatatagatatttcatataaaaaatgaaaagttttcgatgttatacgagatatatccattatatggcaaaaagaagatttaaaacatggaagcaaaatcaaatagaccactgacatcgacgacaaaaacaatgacgctttcaaaataaatgaagtaataaaacgattttgaaacatatctaaatgatgacacctcaaagaaaaaaccttacattgtcaaacagtgatgattaattcatagaagactaaaatgaatggaagcctttcactgataacccaaaaaatcaaatccgtcaatggcattgaacaaaaacaaaacaaataccagtttcgtccgtgagctattctttaaaataaccatgagctctctcaaggaagaaccacacgaaccaaagcaaacacattacggtaaaaataacaattattatgcgtaaattcgtctatacatgtaatgttattgctatgcgaatccgacgttaactcatgaacacccccaactcaaataaccatgcaacgaacctctagaaactagtcgtgaacaaaagattatcatgttatccattttaaatgatttgctgaagcaaaacaaaaattagaaaatttagaaagttttcactattaatattttgaactagtctctttctatagataaaattaaaaaaggtcaagagaaaaataatgcacatggagaatattagaatacatttttaaaataacaagagaataaactaataaaagaaccaagaaggaatgtgttttattctcattttctacaattagtaataagaaaacttataatatagctccacatgcccctattgttctctgtgttggctcttgcattcaatggccaagaaggtaatatttgcaagaatcagatccttcttttaatccacatatgacctctacattgcttcgccgaaattgtgcaatgaaaatcataaataattaaataccagttgttgtaagagtatttgaagtccatgtgtaaaaaaccatcaaagtcgccaacccaacttatataactcgcgcgctgtctcaatttttatttatttttttccttttttcttcctaatttataaaatcagataaaaacaaaagtaattaataaatctttcttaatagagttgtggtaatattgataacaactagtaagcaatatataattatatatcctcatttgattatttaactgcaaaattaaagtttgaaaaagattgtaataacaaaaatagaaagaatgatataaaaatttcatgtgcatatttatcacctatgtgatatatagtatatctgtatctattttatatacagttgtcactataaataatacttcacagttgattattaaattatgtgttcatatgatagtagtggctaagggtataacttttaagttgggactccttttgtgctcgatcgcaagtttcaagtttgaaaatcaggtggaggaacgggaggccttttggttaacttatgtgttttaagcgatcatttacctgacatatacaaagacctagcctggttcgctcttcattactcaaattggttatcttatgctcaccggctatttccgaccatacaacgtttccacatataacgaaactgtctcttgtttcatcatattaacgaaaataaaatataataaatcttactcttcttttcaagtccgaatatatttcttaacatattaattagttttatcgttgaaatattaattctaagaatgagagaataacaggttacctaataatatcttacataactaaaattatttgtatttgttccaattcgatgacaaaaactaacttctgaaatgtttctcttggagacttggaccataggaaaaaaatattatgcattccttagttacaactatacaaaggatttactggatctagacttgtcttcttggatccaccgatccgggttcatcccctgtttacgaaagactacctccggatctagaaattaaatgcaccaaagagcttagaatattttgtaaacaattttttttaaagtaaagaaaaaaagaacacatagaattgctatagtaatgtgacgttggaaaagatgcctagagtgtcaacttctgtctaaaaatgtatcccctttggttcaaataacaacaattgaacaacgtgcgaagatactttgtcttttttatttggatgatggagaattcactagaggttaagcctgatcattctatatgcatgtctctatccatacattttaaccagacattaaagaaattctctatcaaactaacttaacctctacaaaatctagatttagtagtagccggataagacatattatgttttcaaaatccgagcaatcgcatatatacaataaatctctggtggttagacaagaatagtggtataagattctcaggctatcacaagaatataacctttggttttgtcgcgggcatgctgcaactttttcatgtgtgatatgaactcctacacgatatgacgaaccgaaagacatgagacactaaaaagaatgtcgttgtgatgtgcaacaattttgagtttttgcatatggatagcgaaaggaagagtatctacgaccacaacaccagatctatctactatttatatggtgtgctattttttttaaggcataaacgatttcttgacgaaacaaaagtgtttcacatgcagacaacatgagcacatgaaagcttgataatgcagaaaatatagcaaatgatatgagaggccatgtgagatatacatctaaagatatataagatattttagtcttttgaagatttagaggatcttcccacttggatcgggtgtgatagaggcggtttagagttctgaaatggtggagagcataattattggtcatgtataatgcaaaagccgcaaagtctcttccttttcatttccactttttgttttatgtaaatgtaaaaggcccaaatgtaaatcatcttgtgtgaaagaaacaagttcaagaagttaccaagtcgaatagttgaagcgtgtaggcatctaatacttatgcttgaagcaccttttttaagatcttggtaagttgctaacgaccatgtcactctggtaatctgcaatcacatcaaacggttaagagcttcgagagaacctgacaaccacagctgatgaattttcaaatagaaacaactttgtgtaagtaaagcgacagttcaaaactattagaatccaaaggagtcaagacttcaagagggtgcattatttaagaccttgaatgttttgtagattttgaaagagtttttggtctttgtatttttaaaaactcattttcataccaatcaagatttttaaattttggtttatttaggaaaactttatttgttgtaatctacagttcacgattttagattttcaattctcctataatttagggaatctagtgtttactccatttacgttatttttcttttatcaaaaaccaaaaaccgtttttgggggtttttaaaacaaaaatctaacaacaaagtctataactaaaatctaatagtcaaaaactaattaataaccaaatcaaaaactgaatttaaaaacagcatccattcatggccttaaaactatttggaattagaggtaagattctgataattggaacaaaggaagagataggtataaatatttggtaaaggagttagctttagaataaattaaccaaaaggaaagtgagagatagagaaagtgggaacccaccatagacgattgatcggccaacatagtaaagaaagcctttttttttgtatgtctctctctcttcctttttctgttcttacaacacagaggagtaattctaagtgtgtgtgagagggtgttttccatactactatatattcatgtgctcacatggtttccctttgagggagatcaagaagaaagttaccaaagccacttgctttttaagctttcttaccattaggaccattaagagctttccataaaagcatcacaacggctgcaacagttaacaaatacaaggacgagtacagaaactggttcaggagtcatcatgcctcagaactgcatagcaccaaggcctgaagaagatggtggagtcatggttcaaggtttgccagatatgtcagacacgcagagcaagtctgtactagccttccctacgattacttcacaacctggtctccagatgtctatgtatcccataactctcaaggtgtgtgtgtcttgatcacttcttgttttattttctgctgagcttttgagttgtacctgcaacaaatctcatcagaagtatttctttctcttcttcaaatagcttggtagttgattacaagacatgacatcattctaacgatgttttccattcggtttctttgtggttgtacagtttgaggaggttgtgtacaaggttaagatagagcagacaagtcagtgtatgggatcatggaaaagcaaagagaagacgattttgaatgggataacgggaatggtttgtcccggagagtttctagccatgttaggtccatcaggcagtggcaaaaccactcttctatcagctctcgggggccgtctctccaaaactttctcaggtaaagtcatgtacaacggtcagcctttctctggctgcatcaagcgcagaacaggatttgttgctcaggatgatgtcctgtaccctcacctcacggtttgggagactctcttctttaccgcacttctacggctaccaagcagcttgacgagagacgagaaagcagagcatgtggacagagttattgctgaactcggattgaatcggtgtacaaacagcatgataggaggaccactcttcagaggaatatcaggaggtgagaaaaaaagggttagcattggtcaagaaatgctgatcaatcctagcttgctccttcttgatgaacccacttcaggtcttgattcaaccactgctcatcgcattgtgaccacaatcaaacggttggcttctggaggaagaacagtcgtcacaaccattcatcagccatcaagccgcatctaccatatgtttgacaaggtggttttgctatctgaaggaagtcccatctactatggcgctgcctcttctgctgtggaatatttcagttctctaggattctccacttccttgacagttaacccagctgacctcttacttgacctcgccaacggtaagctacctttctctttaagcttctagaagatgaggaaaaaccaaactcctttctaattcatgaaaacttggcaaacctcaggaatcccacctgatactcagaaggagacctcggaacaagaacagaagacagtaaaagaaaccctggtttcagcttatgagaagaacatttctactaaactgaaagctgaactatgcaatgcggaatcccacagctatgaatacaccaaagctgctggtaattttcactttttgaagtagttttgttatattctgcttctgctcttttacaccactaataatctgatgttatctgttctttaaatggagcagccaaaaacctcaagtcagaacaatggtgcacaacttggtggtaccagttcactgtattgctccaaagaggagtcagagagaggagattcgaatctttcaacaagctcaggattttccaagtcatcagtgttgcttttcttggtggccttttatggtggcatactccaaaatctcacatccaagatagagtaaggctctcttcttctagatgctaacacacattttattcagacatcagtattctaattctaaccatcattctacatttattctgaatgcagactgctttgctcttcttcttctcggtcttttggggcttctacccgctatacaacgcggttttcacatttccacaagagaaaagaatgctaatcaaggaacggtcttccggaatgtaccgtctttcctcctatttcatggctagaaacgttggggacctgcccttggaacttgcccttccaactgcttttgtgttcataatttactggatgggtggacttaaacctgacccaacaacgtttatcctctcgctactggttgttctctattctgtccttgttgctcaaggtcttggcttagccttcggtgctctgcttatgaacatcaagcaagccacaacgttagcatctgttactacactcgtttttctcatagccggaggatactacgtgcaacaaattcctcccttcatcgtatggctcaagtacctaagctacagctactactgctacaagctgcttttgggtattcaatacactgatgacgactactatgagtgttcaaaaggagtctggtgcagagttggagacttcccagcaatcaagtcaatgggattgaacaatctctggatagacgtgtttgttatgggagtgatgttggtgggttatcggctcatggcttacatggcactgcatcgggtgaagttgcggtaaacgtgcagccgaaggtaacaacaactaagtaactccaagaagctccaaagaaaattttccccactgcaaccaaggaataatagtagtattagaaaagataaaagtcgtcgaattttggtcgattttacttacgtatccgagatatatatccgacgactttctttttattttaggctagatgatgatagtactcctaagtttgagaataaaacagtgagataatgtatgagataagaagggaaaccaagtatatactaattcccatttgcaaaaacagtgactaaactttcggtccactcttccatggaaatgattgttgtatcttttgtggggttccttaaaaagaaaaggtctactctatctctacacattactagtcacctgcaagtgcatatcaactggtgaaaatcaatgaaatgtatgtatcagataattaaacaacttgcggataataagactaacaacgacaggacataagcaaacacacctgaccatggctctccttatcatctcaagtaactttactggtactttgaagttttctttaccacacatatagacttttttcaactgcagaatttatgtcaacaatagctacaggaataatgtgctttcgctttcatgataaatacgagtcgaataattgaaactttaaatggctgttgttatacttcacatcgttactagctacacaataatttaaaaccaaaaagaagaagtggggaagctacagtgtctgcaaaacaacatagaggagcaaaaaacaaatcattggatgagaaaggcccacaagatatgcttacacattaaaacgtgattcactttagtcaagtggaagctgatgcaagaagagaaatccatgtcactctctactttgtcaagtgtcattatcatcacctagaagaaccatcttctaacccttccaagtaaaaacttgaaacgtcattcactaacttgtgttgctttctcagacctaaatacatcatcctttctagtgagtgatatacatacgaaagcaagagagatcatcatatgatctaatcatgctctttccccctttataccacatataataactacacaagttgccgtttttagtctactaaatgaccataagcatctttatcttaacaaagataagataaactaaccagagaagatgagcaaacatgtcatctcttaagtcatagatattaaccaagtttgtgaaaaaccttgtcattcaccactcagagacaagaactaaaaatctctagtagactaagacaactaaaatcaactaatacatttaacaaccactgatatcgattagggtttccactcaccacatcgttctccttttaagaatatgtctcatccaagttgacggtgacgcagcggcgaagaagactctctacggcgatgttgcgacggagcatccgccatgtacgaatagcgaccggcatcaaactattaaacggtgccgtttgtcaccgaagactaaaagttcattttaaattgcatattaacccttacattttacctttattttcgataaacatcctaattatttctcttttttctgaagcccaaataggcccaaactgaattttagctatcttcttaaattgcacattagctcttacatttacctttaatttcgataaaacatcctaaatatttcgttttttatgaagcccaaataggcccatagtttatgaaaggcccaaaatgagtttagcgatcttcttttaagagtctttcttgtctctctcgccgaatttttctctatttgactgttgttagggttttagcttcttctctagtcgttgtttgtttctcttttcggaaataaaaaatggcgggaatttctagggttttgggagggttcaggacactgatgtcgaaggcggcgactgttgaggccgttactgtagccggagaaggaaaagggatattcaagactcgtccggtgtcacagcagctagctagcttcgccggagaaagggaactcactcgtggttccgctctgaagaaagtttgggagtatgtgaagcttcacaatctccaggtttgtttgattttggagctttctaaggtttttactttgcgtagatctgtttatgaacttagggatttggttgctttagagaaggaattgttgcatgtaaactaaatcgattaagcattttagtggcggatgatttgattgttatgtagaacatggatcttgagtaaaatgcatgttatcttgtggttgagaatggattgtttggttttgactatatacatgaagcatcttgtgggtttggttgtgaagattacttggattgttgtgttggtcattatcttagagaacttggaattgtagtgttctttgagttttggaattagtctatttaatgtaatacacacagatgatgtctatatgttgaattggttgttcaatgtaaacaacaagcagctaatgtagaccataaacttctctgttttctggattattcatagtttctgtttgagtgattcatttcttgcctcattgtagaatccggcgaacaagaaggagattcactgcgatgataagttgaagacgattttcgatggcaaagacaaagtcggaatcacagagatcatgaagctcctctcaccacatttccctaaatccgtctgatttggtgatgtttatctaacgtagttgtatctatctaagaagaaatggtttggcttttgtggttcatttcgggttgtatatgaaactctaaacccgtttgaactttggtatgttaacaaaccaaaacaataactctcttttgatccatctaccggagaatattatgtagtttgaccattttatcttaatattgtttgattttgtgaaattactcctctctctaatctttgatggctttctgctctaatagtctaatgtgtcgtgtgagcaacgatttcgttattattgtttaatgcatatgaatggtcacaattattttatcctctgatggagaagaaacgtgtcatgatcagaagaggaataagaatgcgttgttaaaacgagcaagcatcaacgcgtccatttcggtttaaatcaatagctaagagcctttttcgctacacataaccaaatatcgcacacatgtatgtgtctaaacataacatagtatatagttcatttttccatatcttgtatctctctctattcatatcatcttattatctctcaagttcttgattttaattaaagatgggtaaagacgaccaccacgaacaagacaaaagattcttctcacatcataatcatcacggccatgggtatccgccaggagcttatcctcctccaccgcagggagcttatcctccaccgggaggttaccctccgcaaggttatcctccaccacctcacggctatccaccggccgcttacccacctccacccggtgcttatcctcccgccgggtatcccggaccatccggtcctcgtccaggttattatttaatcaaaaatgttgtcttatgtggttatgtctcttagtcttagttaaacgcccttgctattaacaaattagtccgattggtgtttgttttgagtggtgttttatatagtatagttctcaaaaatattatgagaagacaaaatgtttctttaaagggatgcatatagttaatcttggttcattcaaaagccaaaataggttctttaaccaaatcttgcgttatgcgatgtgcaattccaaaaagtaaagcttggttttaacgaaaatgataataaatgatttatgctttgattttctaagtttttcaaattcgaacaagaatttaaagaaagtttcttgcgggttatatcaaccaaaaagaaaccaatagtaaaataattaatgtcttgatgaataattgattaaattctttttatgatataatatatgtggctttttgttcagttaaaaatgtttttttgttttgtttaatttagaaacatagaagaatgtggcttttgttcagtgttttttttttgtcaacatggctttggttcagtttagtatggattataaataatgctacaatgttttaatatggattataaataatgttggtctagttttataagcccaatttggtttgataggttcacatgccaagtaacctttgattgaatgctctcctcatgtgaatataacagggtttggaggaggagttgggggattgatagcaggagcggcaacagcggcagcggctgcaatgggaggtcaccatgcgggtcatcacggaggctacgggcaccacggccacggaaaatacaaaagagggtttttcggaggaggaaagtacaagcgaggaaagcatagtatgtttggtggagggaagtacaagcgtggcaagcacggtatgttcggaggcaaaagaagcaagcatggcatgttcggagggaaacgaggcaaaggcatgttcggacgaaagaagtggaaatgatccattagcatcctctctacatatattatcgtaacaatttaacattaagcttaatataaaaatgtggatgtataatttgttttatatgatgtatatatagctatatgtatctatgaagagtatttaatatggttgaaatatttttcttactgattaacgttgatgatcatttttttttcttcttttttttttgggaaagttttgtatatatgcatgtattggtgaatcagtttaataactttttatgtggagtgtttctttttgtttgttttttttgggggaaaaaacgttgagaataatatggatttagataattaaaagtttatgtgaattttcaagaatttgtttgtttgggagagatctacgggttgttttttttttgttttttggaatattgagaataatatggatttagagaaatctgtttaaattttcaaaaataatttttgggaaagatatacgggatctccaacaacaaaattgttgtaatcgagttctccatcgagattaatataggtgtataattccaatgaacaatatcatttggaatttgtaagaaagaaaatctattaaaagattattttcaaaatctgttttttttttttgtgtttaccaagtcagctaagattttttctaagtgaaaaactaaatggataaataaacccacaataatagggataataagctgatttttttttttttttcgtcagaaaaaaatactatgatttcgattttgaagtggaaatgttgttgaagttggggagtgaaaggtatcgcagaagcatatgacgtaaaatatatatttttcttcaaaatcctatcaatatctaaacaattaaaacttacaaaatcatatttcaacaaaatctcaaataatcttttacgtcaagattttttccaatgtctatatataccattgttctcttatttcttttccattcaagaaaaagaaaattctacataacaacaatggtttctctaagttttattttgtgttgtgttttagtaagtagttgtgcatacgccacaatcgtctctcatgatggtcgtgccatcactattgatggtcatcgtcgagttcttctctct

SEQ ID NO: 1156 - DNA, 90132 bp, Arabidopsis thaliana
gaatttctgcacttaatattttatttataaattatttacattcacatgctgatatcatatacaagtacatataaaaaaatgcaaaccatttatacaatagaaaatttagctagttggttaatgatttctttttggggtttaatttcaacagaaggaactagatggaaagtgctcaagttatgagagaatatcatcagaagagatgagctcatcaagcatctcgggaacaagccctttcaagccaaatcttgagtttactctgggtcgatctcactaaatttattgttgtagctaggtagtaattaattagtatcaattaacttatattttggctactgactagtttcgatattcatatcaattgaataagtttttttttttttttagcttaaaatcttaatgtcctatcttggtcttggaactttgacacacactgttctttttccttctctattgagaagagctagtgaaagaatcaactattagaggcacaataaatgttcagtactctttggttgaacttttattttacaatctgataataaagatatataaatatagataaagatttgccaaaaaaaaatatatatagataaagaataataatagagaaaaaggaaagacgtaaaagagaaagaaaaaaaagtagaaagaaaaaaagaaaagagagaaaaaggtgtaaaagaaagaatgacaaaagaggacatgaatgaaagaaagcaaacatattaaaggaatgggtaaagttgtaagaagaatatctactttttttatacaaaaagaaatgttaatcagttttgttaagaaaagaaatggacgtgaatgatagataatatatgattaatgattacctttatgattggccttaaggttttagagtaggtagaaagcatatgaactgtctatcaccataagcttttcgaaaagataattaacttatacaataaagcaaaccatatctctttattctcgtaaaacaaatcttgtatatgtttttaggtccaaagtataaattttgggacttgttcttgaaatatactatatggacgacgtaccacaaaagttcattgaatatatgatagggaaaaagtaaaagacattaaagagaaaaatagaataattctaatgtataaggtagattcccaccaaagaatatttagttcattgctttcacttaggtttttgatgtttccttagtcgtcaacactctattctcagcattttgtcttcctcgagcacacataattatattaagcatgacgattgccatccatatgcgacagtgaaaatgaccaacacctagctgagtaaatagagataaaataattgctaaattgatatggtgttagatttgaattgacggtagacgtttgttttcaaagttttcattatctaaataaagtttactatgtgtaattttatcatttcgatacaaatactaaaattggaaatagaaattccatagttaaatattcaaacaaaactaaaatgatgatgatttgtgcctatatattttatattttgggctccttatatgtttttcactcactgatattcgaaaatatatatgactaatttaagtctaggttaattggataataatattattttggttgatataaattttattagaaaataatatttacaaagagtaaagagcgtttctgttattttttaaaaagagtaaaaaagcacttttcaacaaaattaaatggaaaatttatgtttttcatacaactagaccgaaaatgtttaacatttgcatcctgcaataaagatatcaggttggtttggttaggacaactaagtcatgttcaaaagaatgatcgaatactgggttaatttgtttttaaaagttttgggctaatcgaatagactgagaaaataataattgaatcgaacttcaaactaggagaaatctgatcgaatgatagactaagtttaaatttgatagatgatcggagaacaagtcatcaaagaaaggttttgaaaacttggccaagtgaggattgtatcagagctcaatatcacaaatatgattaatctacttacatagtactaaccgttatcacataattattagacattttatttgcaattagataatcaatgagcattgcaatacaactccaattagttcagtactaaacatcatcatcaattctcattagttagttttgtaaagctcatgaatgtttgatttaaccattttcagtaatattttcaaagcatgaaatgcataaggtttaaagtttgagtgaacaaatcaaaactaccattaatcacaacttaaataaatgatctaacaagaagcaacatggtgagaggaaaactttggttaaaaatgactaaaaacttgcttaaaataggaaaaactttggactgggttaacctaacctatgacaaacccgatcgagttcgtgtctaaataagctctcgtgaaggtgtagccggtacataagatcatagtaataactttaagtgagaatttaagataactcttacaaatgctgaccggaatgacctaaacctatcgccagtgaaaaaaaagcaaacacaatttacaatgtcataatcaaatttgagctaaactccaccgtgccaaggcctcttgccggatcgatgtttatgacatttttttttggggggacattttaaaatgtgatcgatgtttaagaattctaatattatctattatatgatattttgtgtatatagaattgacatgaatatatctccgtatcagttggtattattataattcttaaatctagatgaatttaatagaattcaacaaaatttagcttctatctaaatgaatttggcgaaaataaatttttgggacaccatttacttccttagttactatgtaagatttaactatcattgggcaactaatatgtactcgacaaatgatctacgaactattcataaaccaaaatatagattggaaaactcaaaatcattcaaattcttgaagaaaataactaagaatttgacaattgaaagtatggttgtcttcacattgtatgggtagtcgcatttgacaattgaaacacggccttgtgtcattgtcatgtcacgtgcaacgtgaaacatcccaaacattatatatttaaaattattattatcgttttcaagttccgaaagcaaaacagaatataaaaggcatgcaaaaggtagtaatcattcaccaataattgcaacatacacccacccactcatcaaaactattaaatgctatcacatatacttattttgcaaacaaaacttatatttatataagctgcaatagatttacattctaaaaactagctaatcatatagtcaacacaaactttgattagtttcttttacatgtatataaacgttcaaagtttttggtgctaagatgatgaatcatcttatgataatatgtatgcatatgttaatgacataaagagagatggcacaaattagtagatccataagaatcagaaggagaattatgggaaaaagagaacaattggtcttattctctctccctagctaaaagtctttcatctgtcctttctcattgggctaccccaaaatttattgactttcctcttaaattattatcactttaatcatacaatttcataaaataaagtgtactactaaagtttgaaattatactttttgagtcaaaaaagaaagtttgcaattatatttagcaactcaatgactagtaacaatgttgcctaaaaatcgaaatcatctccctttgatagctagagataaccaaatttatgtatatttaagtaaactcttttttcccttgacatgaagtaatagttacatgagctatatatttttgttaaaaagctaaaagaaataaaacatttttcatatatgtaaattgtaatagtataattatattttgagcttgcttctgtcactctctctctttcttctctgcgtttgaggcaaagactgaaacactggtcgaaattatttactgtcgtacgaacagaagagcacgaagtccacagaatgtcaaaagcatatattattaaaccatcattacattatcatttcaactttggatctttcgtacaaacactcactcatccacgtgtcgtaatcataacggttcgattgttggctctctgctgctctgtcagccgtcagatccgatattgccaaatgttgcaaaggtgttatactgataaacaagaaagtgaccagtaaagttgacgctccttgttttcacccttcaagagacatctctttcttattcctttctctattttcttttcaatatatagcctgtaattccaaaaagtacaaaaacaagactattatgagtttgcattttgaattttttgaacactttcttcctacatgtacagtatcattatatctattgtcaacacatgtataatcttatgctatacagtagaagaagataggaactatgaaactaaatgtaaaaacaaacttttaaccaagaagtgtaaaacaaaacaaaaaaaagtgaaaattaaagagcaaaggaagagactattttcatgaagtttgcagtgtttaattgagtagctcgaggaactttttgcatgggaagaagctgtgttgtgggtcctatcaacgttaattcaaacgtcaatgtgtgaaaagatttcatgaaactatggtatatataatttttgcagaatattaataaattaattcagtaatgtcaatcaatttactaatatttgacgtagagacattgtttctttaattaatgtaatgaactgatgatagtttagtaggtgtataaaatttctgtagagttttttttgtataaagaaaaaaacaagagaaaaagaaaagaataatgcagaaaagtggagaagacaaatataacaaaaataaattattctctaagaggacaacggataataaggcgaaattctcgcgggaaccaacgcctccctctttctctcccttccgtattaaataaacagccaaattacatacctacaaacacaccaaaatatactctcatacacataaattatacattcacacactgacacacatatatataaatatatataattgtttttgttaaaccatacatatacattctctttacttgtattttaaatgtaaattacaaagaaaaaacttgtctagtgtattaaatccactatagtctattcaaccgagtagagaaatatgtaacaatttggttgaagaatataaatcagtaacagcatattcaatctagacacaaaaactaccacattactatttctttttaatattcccttgaaccttatcacataaattattaggtttgaaaaatagggataaaatcagctacttttgtttggttaagatttaagaatgttcagtttaataatcgatataagaaaattaaggtccgaatagtgactgcattttgtgatgtgggagaagtacggtacggttcaaatagtaacaaaaatatatagatatatatgtatatgtaaaaattttgacactgcttcaacactgttgtgatacgattttgggtgcggtctatataaccatttatagcctcaatatgattacaaaaactactatgatataaacatagaaatgtagtcaatttttggttggctaagattaagaaacaataaacgaaacataatcttagtaatagcgaaaacaatacttagaaaaagagtcaaaagggaccagaaaaaaagagagagaggtgttgagaaaaatgtcagacggtggcgaaggaagtgacgtgtcaagaggaaggaggtaggaccttaaccaaatggtcaaaaaaacgaagttactgtcacgagtaccagtggggaccaatcaacgacaaaactccccccccaatcggttttgtcatttattgtgccctctttcacagtcctgtcactgtatcacttttctccctttctttctttctttttttccccattttatttacaaagacaaaaattcctaaattcatacataagaattgtcaatttgttggaaacaaacaaaacgaattgtcaattcaagttaatcatgttttttgtattctcttagttgttttttcgaatatttatatttgatgaaattctctatagctaactaaacataataaaaccatttattaattttcaagcccattacaaggcccaatcacaggcccataaaagtaaaaatgacagtgcttattttaacttggattggacatgttatgcatttgcaatctacatatgttccaacttgagtggagtgttggagacatgttaactttacgagatgtagtcagaacatagtctttctttcctatattgctctttataatttggatttaactttatcgtagatgttgtctgatgtaatgggtttgtagtatcttaaagtcaaggcccaaattgaatttatggaatgttgtattatcttaaacctcaaggcctaatgtgtttaaaccttaccataacatgtgattgtatgggttttgaagaatctgtatttgttaattcgacaagaaaaatgatattcaccatctacgagtatttcaaacgaattagatatggaagactctcatggaagacgaaactttgtatcggaggcttcaatggtggaaaaaattgttcaaatatattttgcttaagaattcgtaaatattttttcttaaagtatcttatgttatatgttagtatattgttcacaatattatcacagtccactttcgtacggaactccggtggaaccaagccacaaatctctatttatatgtttttattgtgaaattcgccgttttctttagatccacaaaaaccacatctacttccctatgttgcttgtatttgttcatgagcctttgtttttgcattcatcataatccaaaatagacaaacgtccaaagccgctattccatggaacccaatccactggatcaatgaggtatccatataacattgcaataaaaccactatgtagaacacacttcattgatactctttttattgctcttctcatggcaagattgaaaaaaatgtttaattttccaatcggttttcgtgcctcaatttggcataattagaatacaacagttgtttcatttttgtattgttacatcttattagttagttgaattcacatttaataatcatatttttgttttaatatctcaaattttaacgtacaattgaacattttatcacttgtctcttatattgcttatattttgcttatgttttgattattatttgttaacttgttttgtttaatctattttagttttatataatcacatgtgataaagtgatagttacaaagtcagatgttaaaaaaagtgatagttacaaatacaattttctgtaataatagttactagtacaagtactaataaaaataattactatacaagtatgtattactatcaactaaccatgtatgtatttgtagcaaatattaatgcaagttggccgaggacttcttaagcgggattaaattagtaactattaggaactagtaagtgggtaatagtatacatatgatgtaaaaactttttagtaattgtatataattgataatttttcttaaaaaaaaaagatactcggtctcgttatcaaatgaggttatcaaatgaggccactgcgagtttgtgatcaatcgacgagatacaattttagatacaattttgttagttgtagaataatggaactttttaataacaagatatatatatatatatatatatatatatatcaaccaaagtcattatggaacttttttaataacaaaaaatatatatcaaccaaaatcattatggaacttatatatatatatatatatatatatatatatatatataatcaaatcaccaaatcgattaaaaataaaacatatacagtacaagttggagaatcctgttattattaaaagggaagtacaaaatgaaaaatagtctaatttgtcatcaatttcaattttaattttggattttgtacattattaatcataatcgtcaagggtaatttggtcatcgctctatattccttaaacacactatatttcaactttaaataatatttcttaaacacactatattcaatacttatcacctatttattgatttttcaaagatttcaaataactaaatataaaaaatcaatctaaaataaaccaaatatatagttattaattttacatattttttattaaaaatattatgaaaaaatattatgttggtaaacaatattaagagctcgcgaatcaagtaatggagcggattagaatttacaataattcataattatgtatatggaaagaaattgtatttaaaaatcaatattcgatatatcaaaattttgtaaaatcacacattttccggatattatttaaactaacaatcttaactgtccattaagactttccaaatcaaagttatttccaaatcaatcatttgatggatgatttcttggtcaaaattaaaaacaaataccgacctgcaaaagcgggttagaatttgtatttatttaatagagaatgagtaaaatggaattgttaatgacctttgacacatctaaaattataattacaatactaaattggacgcaacacgggttaaactaaattatataattcaaatactattttgacaactgtttaaataaaaaatctcccgcggtaaaccgcgggtttaatcctagtgttattgtaaaagatacgtacatttgtagctctattgctacaggtttcacgaacctaatgataagagcacatgtgggaaagaaagaggaaatcctgcgtgatcaatttttacgtgtaacaacaaacctgcgagttcgttagagttagagctgcgtgtctgtcatggtatagttaggaattagagttcttgtattcaccattgttgatcaatagagaagtacagagagttaaaggatagggtttatagttctaaattctatcaatggtgcgctcgtgattaaggatcgaagcaatcgcaatgtgtcttgagggatttcccaccttcaatgccgttgatggtgaactgcgatcatggatctcatggctagctagaagatttctttgttcaggaagtgtgtgaaaagatgaatcttggacagtcttctcgaaggagaagctgagtcttggttctatagaagacaaaagatgtttctattccgatcttggaacatttgaaggatcgtttgttgttgataggaacttcctgtctaccggctttgccattgtggattatgtcgaaaacacgagtatataccggctctccatggagtctctgattcccaatcacgccataaatcattgaggattgcttgggtcactagcttacagagcgtcgaggctagacaatgtacatataagctcattaaaggtagatgagagccccgaatcttgtaaaggtagtgagctgtcatagttgtagtacgaagtccaagtgaaagatacatggctccaatcctctgtaatatgcaagagttaggctcatcatcaattcctcggttttaaattcgtttaaagctaaaatgccgactcacaacacaaacaaaaaggaataaaataatgcttcagattataaccatgaaaagaaaacagccagaaccattgtacttttgggtgaaccactcggatcagattccaaatcgctgttatagagaaagagatcccaaactgaccgtttactctactccacagagactccataaaatcgaactgattggacctagaatatcgagatatccactagcttctcatcgtcagaggccaagcttactcagtgcgcatcatatagagctctaaaggggaggagaggaccaacactattttctcctggtattcctctagtcttgatttacccgtagtacacaagtgtcaaaggaacccagaggtgaccagttatcatactcttaaataatccttcacacaaatgtgaggcatctaataaagctaacagaataatgagaaaaagtatagtgaagaaaagtttcacgcgataggcttaacgaccaaattttcgtcaagattcaacgacttccacaacaatgttttgcttgcagctaaagaaacaaagacccaacgacatcattgactaagtagaatcatataatatagtacgatttttcacgacagaaagaaaagtcgacacattttaaactctaccaacgacccgacccaaaaccaaaagtctaaaattagaaaaagtcaaaaggagaaccacaaaggcaggtagatagataaaaagcagcttccttttgatattcgtcatcatcatcatccactttacttacaatccacctgcaccttcttcatggtctctgatgcttcctggaatctccttcgactttggctgaagttaaaaccaaaaaacctttgttgagcatttccgtttacaaagtaaacttatgatcaacaacaatatctctactactactatcttacctggttttgaagggttgttatggtggaccttagcagatcatctcctacaatcacccgcagtttcctgacaaactccgctctcgtcatcttcttatcctgcacaacaaatttcttatgtattccagcttatgcaattaccaatcataaagcaaactctcagaatcagtttttttctataccctcagttgttggtagtcagcattgatcaacaacatgtcgttctctgcaaccttatgtgagattgctgcaaacagagtaggaaatggcatccatggagatttgggtcttgtagtgcttgaaccaacactgtttgcacttcctgaacctcttgctccctgctttttaaacacaacaacaccacatatagttgttcagtccctcttctttaataagatcatacaaagaaaaactgaagtaaccaaactcacgtttgactccaattgaggaggaagatccttaggtccttccaaagtgacccctgagttatcacgcttagcaatcaaattacctgcagaaaccagtgtatgtcatcggacttctaatactacacaaaacataattttgatggatcgaaatacccattaaggcgtgagtatcacatccgacccccggatgatgaatcagagacttgtctcttgaaacccaaatgtgttataacaccggaggtcgttaggtttatcattatcacacatggaacttttttttctaaatttatcagttgagacctgagcttcagccagatctctaagctgtctccctttcaatgcgtcatcagttgatttgaatgggggaagatagaatgtgaggaacaaaaaaaagaacaaactaatcaccttcagcattggggagattagacagcttgaacctaacaacaaattccgggaatatatgtgtgttcatattgatgttccagacaatgtaattctttggactctcaatgtcatcgactccattgtcatattcttctccaccagaaaagaactgagctttatcaccacgaagaagctccatattccccataatcacacggcataaaaccatgtaacgtactccgttttcgtcaacatcacagtatctagcactgtaaacaagttcatagttagtacttgacacacaaagaacctattgcagaggaaggtaaaatatacgatctaaacatgaaaaaaacagatgaatacgaggcaaatacctgaaataagggcagtctgcagcggttaaatggatcccaacaccatagatggactttctgataaatgctccaccaactccaagtccttgcatcatcactgctgataaaacttccctctttgcaggaagccaggcatacctaacgtttgcatcccctcgatgtttcttagtgatctcaacctgcttctggaaaagtgctagacgagcttcagcaatctcactggaaaaacggcccacatccagcactggtacatgtcctagagaagctgtgcctacagcaaacattttttttactgcatctttatcaagtacttcgcttcccgtaagcttggcaccagagacgactatagcatcagtctcatcccatttcgaaacagcagcttcgagcttgcggctgcagctatcctccgtagcctcgtcatagtgctcatttgaagatcgttgagcaaggggaacatcgtccatcatattatcaccagactcatcactgcactcctccaaatttaacctcggtgtctcgccaccattaacatcaatctctaggcgaagtttgatatcatgaggagcattctgttttgggtcttccacacatttatgatggcagtaattggtcctttcatcactctcataaatttcagggaaaaagcactttcctgcattgtcaatccatgcaagaggggtttttgctcctgtttccatgtctagtctttgcatgtgcaagaagtccaaaataaaactgtgaccgcataacttgaactcaattgcggcgctcttttcttctaattcattctggatggcgcatataacgtgctcaggcaaatcattccattcgccattctcatacatcataacacgtttagcgattccagtcttcttaaaataagtgtaatatctgaccagcgccttcccagagcgattctcgtaagcgctaagcttgttttcaccttccagccttcttcttttgtcaggaatttggcactgcccgttcggtgggggcacattttgcagctttgcacacgaaactccagtaacatatgcagcatagcttgctgcgcgcttcctcttttttccgaatccatcttcacacctactactatccaacaccttgacgatcttggcttccatttctatatattaacaatactaaacctataaccttgatagaaaaagtcaactgtgtaacctctaaactccctagcagtcctaaagatagtgtcttgccgacagcattagaaaacactgcacaaaagaaatggaaaaggcttaaaatattgaacaactatattacagagaatagagtcaaacaaaaactcctcacagtttacatgataaagaatcagtaaacaagaaagaatcagcataactatatgagacctatgatcctgtaatatcattccttcacaaaagacatttgctacaatttccatcagtaagtaacattatgaacagtctttcattacttcttgttgtatcttgtgttataaagagcacaaagatccattacaaagacggaaggtacaaatcaacctacataggaatgaagcaataagaaatgaacatcacactcaacaagaacgatcctatgagacactaaagataaacacagaaacaaaccaacaaaaacaagtaaacccaatcaccaacacagaaaaatgagaacaataaacccaagccatgagcttgaaactcacccaacagtaacagttagagtctgatagattacaagtgtgttcatcttctccgtcataaaaataaacacaatcagagaagaaatgccacgtctttttataacagccgtcagcaagataaagttcctgcaacatccaaaccagcaactttttagctttcaataaaaattaaaattcatctctcaagtcaaaatagctctgttgcttcacaaaatccacaaatcgaaccaaatcaatcgcagtttcactgattttcaaaataaactaaaatcagagacgaaaaaacacagatcgtaagcataatcacacgaatcatccaaaaactcaatcaaaacaacacaaaaccactcaaaatcaaacgaatctaagccgatctacaatcatcgacttcaacaaaaaaaaacaattcaagataaaaaaaaaaatcctcaaatcgcatgagaagaattgaaacaaaacgaaaagaaactgaacatgaacatgaacatgacggacctcttttttcagatcgatcgcaggcaacaagggtaatctaaaagcaaaagctgaccagaaaaaacggaggaaaaggagaagataagatttgcttatagagaaaaccctaagccggcgatgacgacgaagaagaaacagaatcgaagagtcatttatatataatcggcgatattggagagatgatgaagaagaaattcttaagtcggcggttcctgagtttttttcctctttctctaaccaaaaatttgcttggacgaaaagcaaatcatgtgggctttattaaagctacaagtcggtcagtcaacgtcgaaatcttattgggtggtgacttaattgaagaggcggtcaatacacgcagatagatatggtcgaatacaataatggaataatattatcatgaggagaacaaaaatattacaattaaatgtaacgagggcaacaattataaaattgttgaaattagaaaagtgtgtattgacggaacatgattgataagattgtgaatcgatgaatagactaggggggccattggaatggagatagctatcgacattgaaaaatattttctttattgcgtacaaggtctaacaaagttttagttgtattgcaagtggcaaataaaattttattagttgaggatagtttagaagtttttgaaaatattattttacaaagttataagaatatttaatcaatttttaaaaactttctccagaaaaatgtttgttaacaaaaaataattttcattatttcgatagccgttatttaaatttgccgcgattatttttaatggtttttattttttctgtttcattgccgcgtttatttgtaatgatttttatttttccgtttttctataaacaatactacaatagcataaattttgaagtgatatatggtttataagggtaagaatatttaatcattttcaatacagataactttcaaaattagacatactaaatgagatataaaaaattccattgatatacttccaataattatcacatttctaaactagcaaaatttattttattttaaaacatagaagatacgcataatagtcaatgaactattgacttggaaaagatatcaccttggatattaagtctggactttttgcgtagttttcttataaaaaaactatcaaaattaaatttctacaattattcattgaaaacacaatctttggaaaaggctataatttgaaaacaatatttggaattggctaatttgaggatggataaataacatttcgattggcttaagaaagaacactagatcgatatctcttggagagagttagaactcttttgatgtctagacggatgaagaatacttagttgataaattgtacctcgcaatttttttcaactttgttttataatgggccagtttttattttttgggctttagacagcatattaagatggaccggccgtgactacgggtttagttggtaccgaaaacggctgtcttcccaatcttgtaagatctataaaattcaagactaaacttttatcatatacacgtttgtactattcggtggaaaaccaaaggatctatatatacatgcattcatgggaatattattctgtgtatgatatgtcacagctatatagtttgtgtagccatggctcatattgaataatgaaaatgtcacaactatatagtttgtgtagccatggctcatattgaataatgaatatgtcacaactatatagtttttatatctcttatttttctagaatttaccaacctacgattaggcctgttacggatccggatatccgggttttttggagtatccggatccgtatccgtatccggcggatatgtagttttaggatccgcatccggatccgtaaacctcggatatccggatttcgaatatccgtgaaaaaactggatatccgcggatattcgggatccgtttatttttgggaacaaattcaatttcctatttcaccaaccagattgaattcaccaccaaaagagatcgacgtgtgcccgacatcagactttgcaaggcacataccaccaagatctcgtctttaacggtgtccaatctgctcctcctcattcatctccgccgtcgacactttgaatcccatgtatcatcattcccgtaagtaaacttccgtccataaatttacgacggtggaaccgagatgaatatggtggggagacggtgatggagattagatggagatgagatggagatagtgaaggaaatggtgatggagaaaacattcacggcggcagaaaaaatatgttatgaaaccctaatagttaagtcccaaacaaactcaaattccatcattttgtcgtagtgggctaatattggactattgggcttaacattgataatgtgtatttgattaagcccaggatacaaatataatttaagcccataatacaaatatgtagacatattgaacggatgcggatattcggctctgatttttttcataatccggatccgtatccggatccgccggattcgtaaatgctttacccgtatccggatccgtcgcacccggttattcggttttctggatcggatcacggatccggattcgaatacccgcggataacggattttagtcccaggcctacctacgattactctcgtcgtagaagtaaataatatatacgtttacaaatgatatacattacaatttgacaaagggagagctattcatgtaattattaatacttttcgcatacaattatacaaaccaataaccactccttggtatctatctaaagactcttcacgctctcatttttgcagctgcttctttgatctgctcaatagtgaaaatgccaaagaagtcgtcatctttaacagcgttgatcacagcaagtgctaaatcatcgacgttaaccggtggagccaagatgagatcagatgcagggagagacctcaatggtctaatgaacctctctgctgaatcatagatcttgtctagtggctccccgactagatcaagcgggacctcgattccgttcacttttcgtttcccgtatatgaaaccgggtcttagcacaactcctttaagaacaacaagaacaaaaataagataaaagaaagttggtaagctttctgataggatatttaaaaaacccaaaacgttacctgaggtgggatacttggaaagaagttctgcctccgcgttacgttttccagtgaaatatccgttggagagaataaatggcggaagattgtaatcgtgaaccgtgatcaagacgaacttagggacccctacaaacgataaaagaatcgaaatgaaaaaaccacagaaatgcgaataataactctggtgttcagctaaagagatactttaccaaaatccttagcagcattcacagcggtaacgttagcttcaccattgattcttttcatctgttcttcatttccaaaaccaccaatggttgaaactacagcagtagcaccaagaagtacttcatcccaattcaaatagaaaacatcacctacaatgtcccacaaagacaaaaaaacacattaataatccacacttggacatgtttatgtgaatctttgatataaccaaaacagaagtgattaccagtaacccatgtaacctgatccaaccatgaatcttcgaagttaggacgacctgacctaaagaatcaatcaaggagatcggtcatcgataaaaggcgagactggtcatgacttcaatgaaaaagcattctgttcctactttttctatacctgctaacactcacaacctcaataccattggagattgctgctttgcagatagctgagccaacgaaaccattcccaccaagaactacaacctaagtaaaagaaaaagccttttcaattgagacacgaaaatcatatatacacacaagtaaaaaaggctcgttctttcactttcgtaccctttcggatttgacatctgccacaatgtcaataggggctgaccatgaagcgctgcttaatccagcttcagcataagtgcacttaacacaagacttgaacaatctgtaaacacaaaaagaagcttcatttaacttctcattatcaactaagcaaaactttcaatttctctaatctctcgacttcatggattcactgattacgcaattctgcaaaagatcctgactttcaaaacaccaatgcagagattttgatactttatcaattatatacattaatctatgaaattcaatgaagaaacatagtttatagagagagataatgaccggggagagaaagagcgaggacgaaatgaagcgccggaaaaagtaggtggatgagctgaaatggcggagaaactaagaaacgaagtcatttttcccggtttctgatttcaatatcttccgacagaaaatatgattgcaacaaccggagagaaaattagtgtctgaaaatcgccggagaagacggcaaagcgagaaaaatgtggttactacttactcggcggaattgaagcaagaatttttgtggttactgtgtatttattttaaatggtttataagtacaatagaaaaacgacgccgttaatatattcaactaaagcccaaataaatctttagataggcccgcttgataaacgacgtcatctagagtataagtttgttaacagtgataaacgacttgaagactcgtgaagacgaagaagaagagcaatcgaagaaaagagggatttgtgtttgtttgttgttcttcgattgaaaatggtgaaatcgacgagtaaggatgctcaggatctatttcgatctcttcggtctgcttattctgctactccgactaatcttaaggtccgccattgttgttttctcttaaaccttcgtttttttttgaaggatcatcggtgatttacgaaatctgttgaaattgaatttcattgtaacttatgattgcagatcatcgacttgtatgtcgttttcgctgtcttcaccgctctgattcaggtacactctaatctgtttgtattatggcttctctagatctgcaattctcgagtcattgtttagtaaactttagatctgttgtattgtttcacgcgtccatggttaatgaaattttgtagattaggtgatcgatttagatctgcaaatctaccctacgaaccttttaacttcaaattgcaatgtagtattcatagcattggtttgcaaatgggtttgttctgttacgtgtggaagtgtcaagcttttgtctcgctttaaattgaatgaaatggtagatgtttcagtgtgtttctaaggattcaagacaaaaatttccagtctattcatctgaggaaatgagacatctcttgttctctgtttcttgacttatttctcagtagtaaaaaaatcatgatggataagtaaattgacttccctgtgctgatgagtagcatttcactgaaatggtgagtgagttttaatctctatttttcactgaataggtggtttatatggctttggtgggatcatttccatttaactcgttcctatctggagttctctcttgtatcgggacagcagttcttgctggtaagtttatctggattttattacagacatgcttataccttgagaatgtatgtttaaaactaacagtcttctctattttgtgtttatagtttgcctccggattcaagtgaacaaagaaaacaaggaattcaaggtaatgctatgatgtttccgaaaacattagatgacaagtttacttctcttcagtaatcataccgctgtttttgttataacaatggcagtttttcatccctcctctttttgcatctaagctgtagtgacactgcaattctaatttttaaggtgttcctgttagtgtagtgcaagaggaagactattaaaactaaactaggaggatttttatgggaatgtggctatgtttgaagtcagttttcagctgtatgagataagagtttgaaagggaagtaggcagaaactgtttaggcattttagaatttcttagggtttaggttggggatgtgggagggttagagattctcgtgaccaatcacttggttagtacattgattccatcgaagaaatatactaggctctggacatatagatgataaaaaagaacttctgaaatctgaacatgggaatcaattttctgagaaacttgtcattgatctcattttcccttgggagttggggtttatatacaccccaatagtttcattagattcctgcaatgtactattgtataataaccgaaatatcattttgaaaactgcaggatttagcacctgagagagcttttgctgattttgttctctgcaacttagtcctccatttggtgatcatcaacttcctcggatagaggtttcactctcctgtctacaagttgctttcatgctttaatgtactggagtttttaggtgtcacttggaatcaaaactctagtttgagatatttttgttgttgtcgaagtatcaaacttttattagtgtctctctcactcaataacagagtctcctgcagtaatggcctaatgggaccctttgattcgattcggttctctcggcctatatataaaccactcagactctgacacttgtcataaaacccaatcctcaagttggtggaattgagttttgtgccgtttatgtcacaaacaaactcacgatactctttaaatgagaaaaaaggagagaatctgatatcataattgaagcttatctagtcagtgtgtgaaatatcacgagtgaatatgaagtgacaaactgtaaatctaattttacagtttaacttttaaattttgtcaactatcttaaaatttataactgttgtacacgattttaaaatatcattacgtgcacgagaacaaatatgacttctttaaattccaacaaatttaaatactgacgcaaccaagggaaaaaagatacataaactttttaatttatcgactatttccacaatctataatttaagaatcgttacgtgatttttcgttgtcgacgtcacatgatttatatttagataattcattatgtgtacacataagcatgactacttcttcaaacaaacacaaaggcaaatacaatgtacggacgcaactaacaaaaaataaaataaagatgtgaggttataatttggtcttgagtcttctttaattttattaaatttaaaattaatactacatagtatcattataattatgagttcttcaatgaaataagattactaaggggaaattaaattaaattattaaaaaaaagagtatttaatttggtgaaaaataaaaaataaaaacgtgaaaaagagggactcatgggataaataaaaaggaaggaagagatctccgtcacacacacataaacactccacacgctctgcttcgtccaatcaccaaacacgctttaatgactctcacgttttcctcctccgccgcaaccgttgccgttgctgctgcaaccgtaacctcctccgctagggttccggtttatccactcgcttcgtcgactcttcgtggattagtatctttcagattaaccgcgaagaagctgtttctgccgcctcttcgttctcgcggcggcgttagtgtgagagccatgtctgagcttgttcaggataaagaatcgtccgtcgcggcgagcattgctttcaatgaagccgccggtgagacgccgagtgagcttagtcattcccgtactttcttggatgcgcgaagtgaacaaggttagttactcttcttcgtcttctttcctgaggaatttgaattgacttgtggtagcaattcggaaatggaatttagagttgtggagattgttcgattcctttgtgttcataatcgatattcgagtttgtttcttgtttgactggataaggttcattgaattgacttcttgccttttgcttctgatcttgctccattcttgttaaatggataagaacgtctttggaattcttaggttgtgttgctcttgatatgctttcgctttctttaagaagatcagttcataaggatgcaatcagataatttcctttttcaaaaagtgcaagtaggagtttctggatggatgtgtaacaatgcttgtattaacattgtgtttatcttcatttccatcgtcagatcttttatctggtatcaagaaggaagctgaagctggaaggttgccagcaaatgttgcagcaggaatggaagaattgtattggaactacaaaaatgcagtaaatgaatccttttatcactcactagtttgtacgattagtgctatgctttggaattaattagattaaagaacatcagtccactgaacttttgcattgttgtcttactgatggtttttaggttttaagtagtggagcttccagggcagatgaaactgttgtatcaaacatgtctgttgcttttgatcgcatgcttcttggtgtggaggtacttcttctgtcaatctcttggaatgatttttctactaggagatgtcatctaaaaattcttttacttgagcttccttgcgctgtgaatatttcaggatccttatacttttaatccatatcataaagcagtcagagaaccatttgactactacatgtttgtccatacatacatccgtcctcttattgatttcaagtaagctggaatatgcactcttagttatcagattttattcataactgaatgtaattagaaagcaatatcgtttggttagtatcattggatcttctagttttcttcttgccatcaagtgttcatctactaacaacccttgaatatgttatgcagaaattcgtacgttggaaatgcttctatattctctgagctggaagacaagattcgacaggtcatcttccctctttcttgtgctctagttaatgctgtttgctttcatcaacagttaaagttctttccattcaggactttaatactcaactgtttaattacagggacacaatatcgtgttgatatcaaaccatcaaagtgaagctgatccggctgtcatttctctattgcttgaagcacaatctcctttcataggagagaacattgtgagccttcgagccttgttctgagctattatacgctattgtctctgttcttatttgtttctttggttgcagaaatgtgtggctggtgatcgagtcatcactgatcctctttgtaagccgttcagtatgggaaggtatcacgagctttcatttgcaatggtatgctacctgatgggctgaagtgtaatcttagcaaccttgtatgacttccgggatttctactgctttcaggaacctcatatgtgtttactcgaaaaagcacatgaatgatgatcctgagcttgttgacatgaaaagaaaagcaaacacacgaagcttaaaggagatggctacaatgctaaggttaatggaactaaatagcgagtgttcttatttgatctcataggaacagacattaaaggaaaacattgatgtttagtctgctaatgttgatgaaccctgtaggtctggcggtcaacttatatggattgcaccaagcggtggaagggaccgcccgaatccttctactggggaatggtttcctgtaagttatttgatggaatacagagatcttatctgagtctggtagatatgcaagtactaatctagtaatgttcaggcaccctttgatgcttcttcggtagacaacatgagaagactggttgaacattctggcgctcctggacatatatatccaatgtctttgctttgctatgacatcatgccccctccaccccaggtattgattgttttcttctctctgtctctcttctccgttttgggctaactctggttgactttcctctcatcatcacttcattgtgcatctgccaggttgagaaagaaatcggagagaaaagattagttgggtttcacggtactggactatcaattgctcctgaaatcaacttctcagacgtcacagcagactgcgagagccctaatgaggtctgtctgtaacactcagcacaccaatgactttagtttcaagatcgagtaattcatcatgcatataaatacattcttgtggtatggcaggcgaaagaagcatacagccaagctttgtacaagtcggtgaatgaacaatacgagatcttaaactctgcgattaaacacagaagaggagtagaagcatcaacttcaagggtctctttgtcacaaccttggaattagtctctcgttttagggtaacactttcaaaactcataaatcttctgtctcagaagttttgttgcaactgtatatatattgagagagagagcattgttctttcatttgcaggatacacaaacacaatcaatggaaaatactcaaaaaaaaaaaaaatggagatattattcacacgttgtcctagggagttttttttttttttcaaacgagttccaaagcctccttgaaacaacaagaaaaaaaaaaacaggtacgttgttggtttctaacgtaggaagaagaagaagttggtttgtgtacatatgaatagtgagagaaaacaaactcttgctaggctcttagatctcacatatggtttcatatgtaatattcttttcttttttggaggtttcctactatatagagccgaataattcacaatcccaatttatgcctcttccttctctctgctttctcatatgcttcatgattttattccaatttagttttccatatagattttataggctttgatatatcagtcagtaacacaattttgcggaaaatgggttttgttcaattataccaccttattagtgacaattgacaaacagtatctcttataattttgcagaaaaaaatctgagaaacaattctaccattagtcaaaagtgtttacgaaataaaagagttattggtcaaaacattccatttcactattgaaaacaattttgttgtgatctctaaatttgaagagcgcgtagagagtgttttgtgtgtgggtactatttttgtgttacttggcaagttgacagagatgatgagtgtctggcctgtttggatccttatgtcacatagacacatactactatctctcaaagcttctgtccctgtattcacgtgtctcttctctgttttcttctttccactatctcccctcactttcttattttcagaaacaaaatcactcgagctttattttaaagcagtaagataaagaaaaagaaaaaaatcttattttatttgtctatttattacattatgacaatgagcgacattagtaataaattattcaaatttgggttctatttgtctcagtaattacggattatatttggaaagcgacaacaccactcacttctactctgtttaagtcaacaattaacactttcttttagtgtttaattagtgatcaaagttaggattacagctttttctcatcattctaatcattcctatctttatttcaagttgatgtgatatacgactgtttttcgtactatcaaaatgatataaatgttcgaaataaaagaagggaatcgtgtgatcaatgaataataacaactatctaatctgtctcttctttttcttattttctctgcatatagatgccacattctatgattcgtaatcgtaattaccttattattcgtttctcaaactacaacggagcaaatactcttgagatggaagtgaaaagttactgtggttttcacttttcacggctcgatatccacaaatagttatcacgagtaccatcacctctttcgtgtcaacctcaagaaacaaaagttcttcctttatattttttcaagaaaaatgtgtttttttttaattcttgaaaaaaatccacaattcactagatgacaaaagaaaatataaactgtttgcaatttggataattaatcttggtaaaaaggcttttctattttaaaaagttatgttttgataagttgatcttatttgtttgggattattatgcattaaaattgaattttaaggtttttgttattttacatttgttatatgtaattttaaatagtagatgttgtcttatcctcacgtcttttgcgataaaccataattacaaacaaatggcatgtcgaaatttgtgagtgcacgagtcccagcgaagggcatgcacccttaaatttatgttcatatttaatatctgtacacttttattagtttcttgattcaatgcgatattcatctcacgtggctctcgaatcgtttcacattctcagaccttgtttaattttttataatagtccattgtcagtttttaatttgggagtatttagttgctcgattatcgaccgattagtttattcagtttgtttttgtttgtgttattcgcaattttttcttggatgaaaacaaatgtatcgatgttggaatccacgttgtaaggagaagagtgacgtttaagccttcctagacagacgatttatataaaagaaaccttagttagaacttacatctatacacacgaaatactctgtgaaaagttacattaaaatacactttactggacaagtgtatcattgtttgctaattaattagtacattgaatatcgattgttttgtgtattttcggtggttaattaaccaaaaagatttgcaaaagtttaggactgtcacaatcttggccaccgtttttgaattttgtttgtaaaggctgttataaacataattatgatataggctctaatcagtactaaagcatgatttgatcagattaatagtacggtaattaagtgaaaatattttgtttcttagtcgtattgtttgtccacttaatttgcgttggatttactaatggtgccttccaccttcgggtatctttataattcatgaactccctaataattacctatcattattaatttcacctttgtgatttattgatatattttgccaaaattgattaacctttactagcttttcttgatgtatttgctacatgatttacaacagccaaatttttttatcggttactatgaaatgtttgttatctccgcaagtaacagtaagcacaaatttttacatataaaacctaaaaatttctccttcgagcattatcaattttacctttgtacatttgttaaaagatgaagccaaaattgattagcctttactaccaccctttccataaaaatttactcatcttaaaatataatttcttacttcaaccaaacttcacttttatcgattacaagcaaatgttgttttacctatccaaataattaacagaaaacacaattgtttacatatgaaaacaaaaagtgcctctattgaacattgcgagcaaggtatcaacccctagtattatcggtctataactgtcgtaaatcaaccactacttaggaaaccaaatttttagagattaaactcatacaatattatggtgcaaaggtttgcttattgtccaatgtccactctgaaaccattatacaaattccattgaataacttcataaaatatggttagtacatataatgtcttatgaaataattacatcacccaaattaaatttatataattctgaatgaagtggttacataccaataaatcatttgtaccatggtacttcccttatcgcagatggtcctagcgtggtctttccattactgacatggtattcaacatgatcttccaaattggccttgaaccaggcattgcagttcttttaccacaattccaaacgtattcatgagagaaaaaaaattcctaatggtttaaattttacttgttatgagccaaggcaaccaaaaaaataagacaagtaacaaaacattttgtactttaaaatacaataaatttgtatcagagtgaagcacgtggcagagcaggagtggagaggaccacaaaagtagaagagatttgtacaaaatctaaaatagtaagcaaactgattaagcttgtgtggtggtgggactcacttacggacaaagagtcatacagatctcttttagagccaaagtcaaactccaatcgaataacttgttgagtttgtttctacatctttaaacatcacgagatctatatttcacgcgctcgagagctcttctttcttcccacgcgcctccgtagagtaatctgcgcaaatgcgtagcttggtgacttgtcggactttttggtgttccttgaaatattattttagtatcgatcacaacttttccaaagaaattgcacttatcactactttgatataaccatcgattaaacttgtatatatcttgtttttctggccgacatcttttaactacgaatatagttttatctaaatgcatttggtatttgacaaaaacaaatgcatttggttcacacgttttattatatttgagttgtgatcaagtgaaaaacaaagtgtttaagtcgtaaggaagtatataaatattagtatttattggttaagaaaatatagttagatttgaccaaaaaagatatataaatcgaaacatattctttgtttttcttcggattgttagttaccatgtttgttttcctctttttgatacatagttaccatgtgcttcttagagtatttttgattactcgaaatgcgattcaaaggagaagttcataatgtatttttttaatgacagtttgttagaaaaaataatggatgacgttacttatgtgaatacccctaaaactcgtgatttgatttactatgatcgttctcttcttcttctttttttttatttttctatttataaaagaatatgcattattgtaacacatgaataatcaactttaatgttaatcagaaaataatagattactaatacttatacaacctagtaatttgttctaaactaaataccaatttcgtgacctaataattttgtgtaaaatcattaccaaattcaagtaaatgattgttggaaataattttaagttatgaaaattaagaaaacacaaatttttttatttaattcatttctttttttataaaaacatcattaactacaactaaaccaatcaataaaaaaatatgatgtaaaatataattggtctaaaactattaaatacatttaattattgcatagaaaaatgaaactaaacatttattttgcaaaaaaataaaattttaaaactacaaataatgtaaaatagagggagtaagagaatatgcaagaaaaccttccgcatgtaaagagtgcgaaaacatgtagcacagaaaattggaaacacattaattgtcagacatatcatggacatatgtctttataatgtgtatcatcaccatcttgtgcgacactgcgactgataggttacatcacctaattatatcaacaagatcagcggttatgagaaggccaaacacgagattcgaaaaccccatatccgaacatggggatatatctttctatagacaattagacagacttcttaagttctatcaaagaggatcctaaaaaaaaaaaaagcgcatacataaaaacatgagtattatagagcttcccaactgctactttgcacaagagttgtttattccccagaggttgatggacctgcacaattatccatagatacaaatttcattcgagctaaacataaatactcttcgtggtatttgtaagtttttgttgtagattttaggctttatgtcttctttgtttcctctgtaaccgcggttgtaaatctgaaaatggtataaatacttaacaatttacaaaaaaaaaattgattatcgaaaacagaaataaatttagattttgtttttaattattggaattatatagtatttgttgttttcaccaaaatacatatattattatttgaaagtttttatttataaattttcgtttggatagcttttacttttacatttcaattcaatcgactgattaatttttatattataatacgaaagacaaaaaacatgcaattattgcatgtgtctggacgataggtgaacaatgaaaggtcccgttacatgcttcgtatcaaataacattaataaatgtgggtctgtcactctgtattttttatatcaaactcaaaaacacgttacataacataacataagttttaaattaaatgtagtctatagattgatgttctagatatcatcttaccaattactgagttcccaatgttttagttctcgatattgattaatgatgttctagatatttgcctatataaacatatttttcgaaagaaaatcacagtcctaatgttaaaaaaaaatataaaaaatacatcattaattatctttcacgaaaacaacgtctataaatgttttggaaattctttcaacccctattttttgcgtttaatattatgtatctagaattttagttttaggggaaattttaaattttgatgtaattactaaagtccattactaaatccctaaattacaattagcaaccaaacttaaacaataattacatgtaaaaaattaatgaagagaaaaacacaaatagttataaaaaaaagaaacgaagaagaaacagtaaagacagagcactaaccaattacctaggaaacgcacgttcactttcacacgcttcctcacacactcacacacacacactcttctctctcttcttcttcctcctctgtactctctctttctcacataaccagagcctctctctctctctctgtttctcttcagtctctgtgtatacccctttctctcctcctctgtccctctctctagcggcggactgatgcacatacctttgtattctccgccgtaactaacttacataatggggtgcatgttctctcacctcgccgccaaattcgccttcttcccaccctctcctcccacttaccacctcaccaaaacccccgacggcaaactctccgccgtatcctccgcttcctcctcctcctccacttttccctccgccggagacccatctctcgacgtcaaagtagtaaagacaagacgcggcaacaaagtcacagctttttaccttagaaaccctaacgcaagactcacacttctctactctcatggaaatgctgcagatttgggacaactcttcgatctctttgttcaactcaaagtcaatctccgagtcaatctcatggggtctctctctttctcgctcagatgttcataactcctaatacgtcgtcgtttcgtatttagtatttatcttactttataaattgcttattgagatttcttgaaaatgattgtttttaatgcttattaggattgtatacacagatttatcaagaactataattaaattaagcagattttgttaagctaatcataattaagcatatttttcctagcttttgttgtttttttcctaagattttattcgttacaaaaattgttcttttttggttaaaggttcacattttttaactccttaaagtatttttcaacttcttgagaaagctcacgcttttgggaaatgggttcttgtctcgttgcccaaaaagctcagatttggtgatatttccgacaaattttctttttcctttatttgtgtgtaaaatttgcatggttttagtaaaatgtttggtgttttctttttttttgttttgtttagtgtcgttttagtttcttgaatttgacctttttgtttaccccagaatttcaattcgaaatttctcacctaccaccgttcaatttgtatttactcttttataacgttagatttaaatctgaacataggtaggtgatgtaatataagttgtaacctttcattgttataatcaatactataggtcagtcaatttatgagggttcatttatacttttgtcgcttcgagttttgatttaattttttgttatctttgttttatttttcaggtatgattattcaggctatggagcttctactggtaaggtgtgtcaaaatgcatcttctctagtaaaatgcttaatagatttaagcccaataacttaatttcatcgaaaatgttacctagaaatcttttcataggttgttggaatgttctgtattaatctcatagagtctaggaatattgaatttttaggtgatgggattgagaattttctccggttttcatttgactaattgtggttttctatgttgtgtttgtagccgagtgagtacgatacatatgcagatatagaggcggcgtatgagtgtttgcagacggattatggggtagggcaagaagatttgatcttgtatggtcaatctgttggcagcggtccaacgctgcaccttgcctctaagcttccacggcttagaggtgtcgttcttcatagcggcattctctctggtcttcgtgttctatgtcatgtcaagttcaagttttgttgtgacatttattcggtatgaaaactcgttgctgcttgttgttttggcgatttaagtgcttcaagtcctagtttaggaagtgtgaatgacaataccatgctactttagttaaataagaacagtttcttttggaaccgtgttttacttgtggatagtattttacatgaacaacatttcgtataagtcctatggattgatgaaagttaagataggttatgaaagtggctaaggtggaagcttaccagtttagaagtggctgtggctaatgtgaaagctaattggtttagaagtggctatagctaatttgtaaggtaaccggtcttggggttctaacactatcctcttactgatttgtaatgtttaattgcagaacgtaaacaagatcaagaaggtgaaatgcccggttcttgtcatacacgtaagcaaaatctgtctcatatccatgtccttagcctcggccctatttgaatccgtaaaactttaccaatcttactgtctattgttacacagggaacagaggatgatgtggtgaattggttacacggaaacaggctttggaaaatggcaaaggaaccgtatgaaccgctctggattaaaggcggtggacattgcaaccttgagatatatccggactacattagacacctataccggtttatacaagacatggaaaatacaaccactaagtctcgtctcaaaacgatttggcaagaaatccgtcggcgagatgaatccacaggatgttgttgttccggactgtgcagacctagctgcagttgtcccaaacctcggtgtcccaaacctagttgcagttgcggctgcggttgtggcgactgcggttgtttcaagtgttcgtgtccgactttgaagggatgtttctcttgctgcaagaaaccgagctgtgttagtagttgttgctgtcccacgttcaaatgcagcagctgctttgggaagccaaaatgtccgaaatgctcttgttggaaatgtctaaaatgccccgacaccgagtgttgccggagtagttgttgttgttccggttgttttagctggttgtgttgctgcggtggagggaggaggaaagagggggagaggagaggatctactacgttggagaagagtgaagggtgatattggtaatttgtatagattttgttcaaagatttggtaaaaaacattagaagattcatggaaagagactgagattttgaagctaaaagttcatttattattccaagaatctatacaaatacgaaaaaaatatgaaatcttgaaccttgaaccaaatcaagtttaatgtggctcaaggatctcgaactcaactaccgattagttgtttataatcgagttaattaatcggattacggatatttagccacccttaagaccaactccagcaatagtttattgaaaagttaagaaacagatgagagagaatctctaaaattcctaatattagaatcgtttctattactcatatacgttggttttttggatgtaaaagtaaaatattaatactttttgcttttttagaaactacatgaattctatacgctggagttgctctaattattaaccatagaatgcaaatggtattattagagaacactactcagcttgaactgcaaatttgggcctattagttatgccaagattctaaatctggcccaatatcaaacttgacctctactgtatatttgaatctcaatgctcttgacatgttccttagccttttgacttgaccatacggtccataccaaaccaaacaaaaaaaaagctatctagaagaagaactcagctacacattatatacaaatcatacgtactccatatataaatataatccttattaatttgatatgtccattacgtgaaacaatattacaacggaagaactagttagaagctatctcgagagaagttcatgcgaacggcacttcacttatttttgggttcataaaaaataacttttagtttttgtaacacttaaaaatgcatagttaagccttatccacactatgtttagaaccacatttcgtgcaagctttgtttcgtctaattagcttgtttggtatggcccattccaagttataataactaatttttattttttttggagctaaacaagttataatactaaacatatcatacacagaccaaatgaaaaactgtttatgtctttcgatttttttagttaaatattcaagagtcttttgttgagtataattttggattaacaaggttttgataatcatactattctttagaatcgttaaaccgaaacgttctaactcgtggagaaatattcaaatacaagtatttataaattcaaaagaagaaatatacaagtgtttataatttcaaagtcaaacctaacatactttatatcctttccgagaatgagtatgaaatgtagcatatatttctatttaggtgacattcttttattaatgcttctaccaaaccatatacttttcatttgtattttgtacgactaaatatatagtatattcgaaaaatcaatcgaaacttaacaaaataaactgttcaaagtttcaacgaattgatgcatgcctacgggatcgattaattaataaatatatcaatacatacaaataatataatatatactaaaattattttgaaggtgtaactaaaagggttataaaataataaaaatcatcaaaacatatatttcctctatttcaatttatttgtattttaagaattttacacacattaaaaaactacttagattatgtaaatagttgatttttatattaaaatatcattaaataatatatttaatatcaataatcaaaaataataaatttttgtatagaataatgagaacaacacttattttgcaaaaaaaaaaaagaaatcttttaaatacaaataaataatgcggtgtacttgtggcaaaaaaaacataccttacaaacttttagtgatacaatttttcgtcaactaaattagtagtacaagggcatcaactggcaagtgagaatattataggttggaagatttagcataaactgaatacattattcatcataaactcgacggttaagtgtatctacatttaatacattatgcatataaattctcccgggttttctttttggtagtaaaattctcccgggttttagcgatagggttatgagaaaaaatgagaaaatgggagagctcaaagctccattaagttcagtgaattccattaacagtgcttacttcttaaagatgtatcattaactctttactatgaatagattgattaattgaatcaaaactactaaagacaagagcgaaggtgggctgatggataaaattttgacaatgcatgacactcactagagtaagaaaatgaagatggaagcctatgtgaaaagaatgttcgacaatttatcatctcaagtagattaatgaaggtatttttttttgttggatgcgttcttcttcatcgatgccaagaacaaaaacacttcaaaaaaagaaaaaaacaaagacactttggttcgcgacgaatatatcttaaaaataattaaaatgaaaaaagcaaacatttgtcaatctatgaacgagtaaaccttataaaaaaacgtagtgtgttgcttgttcaattatgatctttttatttattatattaagttactttttactgtagtgttgttatttttgaatgctatttaactaaaatactaatgaaaatatttcaaataatattttgaataatttattacaaattaaaaaggatatatcaaatttaatttccaacgagaaaaaacattttctacattcattgtatgagtatcattaaagaaagtcttttaaaaaataaaagaaattatatcctgatttaatacattcactgaataaaagtgactaatttatagaaatttaaattcaattacaaaattacgccatatttagtcctaatcttttccctttctcagtcagcgcggtcatgaatcagcaccaaaagtgtcaaataccggaaatacccttactaattactcgaatttcccaattccaccacccccttggtgtacacttcttcgtttcttgctgcagcattaatagctgttcaacacattttaattaataactatttccacaaattttcaaagctaatatatgcgattaaggaaacaaaatctcctctcacaccaatttgttgaccattcaattagattttgtagaaaacctcaatagcataaaacccatatcttcacacaacactccaaattcataaagttttgttcttagtgaattcttcagaattttccgtttatggtaaatgaaaaaacaaaacagagaagaaagtaacattttgaaaatctcatcactgattctgatttatatcaaaaagggtaagagtttcttttggatttgattcccaattaattttcttcacacacatatttcattaaaaatcgaaactttgattctccaaataatcttttttactcagtgccgttttttttttttttcatttctccagattccggcgacggaaaacaagagatttattgaaaatgatggacggagaatctcctctaagacatcccagaatcagccacgtatcaaattccggcagcgatttcggaagcagctctgattacaacaagtacctcgtccagatccctccgacgccggacaacaatcccggtccggcgtcgctttcaatcgttctcctggaaatcgattccaatcaggagtcggttccgtccgtttccggagacatcgtttccggctcatctggtaaagacaacgaaccggatctaaccgatgtgagaatcaacgtaggtgaagaagaagaagacgataccttgctttccaagatatcttattctcttactcgtgtcgtcaaaatctctccgatcatcatcgctctttatcggtaataataatatatatttaaaaaatctcagtcgtgtctgttacaaacactttgatttgtcataaagcatgatcttttaaggatgtttttctgatttaggttttgtttttttattacaggattctaatagttgttcgagtagtatctctagctctgtttctcttctggagaatcagaaacccaaacaacaaagcattatggttatggttactctctgtaatctgtgaactctggtttgctttctcttggttacttgaccaaatccctaagttgtttcctgtgaaccacgcaaccgatatcgaagccttaaaggcgacattcgaaacgccaaacccggataacccgaccgggaaatcagatcttccggggattgatgtgtttgtttcaacggctgatgcagagaaagagcctccattagttacagccaacacaattctttcgattttatctgttgattatcctgttgagaagctctctgtttatatctcagatgatggaggatcgcttgttacgtttgaagcaattgctgaagcggctagctttgcgaaaatatgggttccgttttgcaggaaacataagatagagccgaggaatccggagagttactttggtttgaagagggatccttataaggataaggtgagacatgattttgttcgagagcgacggtatgttaaacgagcttatgatgagtttaaggttcgggttaatgcgctgcctcattcgataagaaggagatcggatgcgtttaatagcaaagaagagattaaagctttagagaaatggaagcattggaaggtgaaagttgaagaggatcaaattaaggaaccaaggcctgctttagtagctcctaaagctacttggatgagtgatggaactcattggcccggtacttgggctgtctctggaccgcaccattcgagaggcgatcacgctagtgttatacaggtaatttatacacgcacggtttgatctccgattcgttagttatagtgcttgtgtttgactctgtgatttgtttacaggtgttgcttgatcctcctggtgatgaaccggtggaagggaaaggcggtgaggggcgcgcactggatcttgaaggagtagacattcgtttaccaatgcttgtttacgtgagccgcgagaaacgtcctggttatgaccataacaagaaggcaggagctatgaacgctttggtcagagcctcggctataatgtctaatggaccgttcatcttgaacttggactgtgaccactatgtctataactcaagagcttttagagatgggatctgtttcatgatggaccatgacggcgaccgtgtttcctatgttcagtttccgcagaggtttgaaggaattgatccatctgatcgctatgctaacaagaatactgttttcttcgacattaatctgcgagctctcgatgggatccaaggtccaatgtatgttgggacggggtgtctcttccgtcgaaccgcgctttacggtttcaacccgcctgatgtttttgtggttgaggaagaaccttctggttcctactgtttcccgctgatcaagaaacgcagtcctgcaaccgtagcttctgaaccagagtactacactgacgaggaggataggtttgatattggtttgattcggaagcaattcggtagctcgagtatgctagtgaattcggtaaaggtggcagagtttgaaggtagaccactagctacagttcactcaagccggctaggacgcccacctggctctttgactggaagccgcaaaccgcttgatttcgcgactgtgaatgaggcggttaacgtgatctcgtgctggtatgaagacaagactgaatgggggttcaacgttggatggatatatggttctgtaaccgaagacgtagtgactggttttcgaatgcatgaaaaaggatggagatcattctactgcgtgacagagccagacgcattccgtggaagcgcacctataaacctaactgatcgactccaccaggttctccgatgggctacgggatcagtagagatcttcttctctcgaaacaacgccattttcgccggtccaaaactcaaactcctccagagaatcgcttacctcaatgttggaatctacccattcaccagcattttcatcttaacctactgcttcctcccgccgttatctctcttctccggtcacttcgttgttgaaaccctcactggatcattcctcatttaccttttgattatcacattgtctctctgtggattagctgttcttgaagtcaaatggtcaggtatctcattagaagaatggtggagaaacgagcagttctggttaatcggtggcacgagcgcacatttagtcgctgtactacaaggtatactcaaagtcatagccggagtcgaaatctccttcaccttgacttcaaaatcttcaacaggaggagatgatgaagacgacgagttcgctgatctttatctgtttaaatggactgctctgatgattccaccgttaacaatcataatcttgaacatcgtagcgatacttttcgcggtttgtaggacggttttcagtgcgaatccacagtggagcaatcttcttggagggacattctttgccagttgggttttgcttcatatgtatccgtttgccaaaggtttaatgggaagaggaggaaaaacaccgacagttgtgtatgtttggtcgggacttattgctatttgcttgtctcttctctacattaccattaagaattcggagattgatggaggatcgtttatgttggtttagaagcatcccatagataggagaatgtaaatatatgttgtagtgctggtgggaactgaaacagagtggcgatataagaaacatagcatacattttagaattatcattactgttaaggtccattaatatttctttttatgtggattttggttttatcaatcaagttttggttttggatgattttatttgttaggattgtaggttcttgttttgtgcgattgttagtttatattctattcttccggtgccgacaaaatctataagaaagacaaagattaacacacaaaacaaaactgaacagaagaggaaaagaaaacagaaccaaatcttctcctcaagttgttaagctaaggcaagaggagaagaagaagaaactattcaaatctggaagatgacttgagaagatctcatgatactcatcgtacaaagcttttcttggctgccctaaaacttttctctttaaaagcataatttgaaatctcaccatttataggcagagagctctgtttttggggtccattatgtacaaaaataggactatttaacaacggccaagattttatcagtgtaaggatttcatttacattttgcaactcctcaatctttcttatatgcgatcagaagactcctccgatatatactatagacagccgcccttctggcttcttttggggagctcgttcacttaaatagcgttcaacgatttggtttctttgtcaaccaatctttcttttttctgttctgaacaagagagattcatgagctttatttctctctctctttaatttgacttttcaaaatattttttatataaaatttccctaatttatattggaaatatataattgtatgtaaaaaaaatgaaaactaaataaacaaagtttgtatatttactaattaaatggataaaaaaaaatagagcaagcagatgataatttgctactaattaaaagaagggttcatcttcaactctagtttttaagaacaaattgaacctattatctccaaagtttttaatgggattctaactaaatatctccaaagcgggaaacacaattttgaaaataataccgttcgagcatatacgcataagggcataatcgtaaatctacgtgttctttgtgtcgaagaatcacataaatagctgattttcgcaacgtaaactcttcttccacaaataaaccgtcaacgaatattcaaatttcaaaattcatttctaatttcttcaaaacgagtttgaatttgagtggagaagcgattttgttcgtctatcttcatctgattcttttctccgatcaattgattcatgttcaatgtcgtctgattcgttgggttagttcaaatcgggatccaagggtttcgattttgggtcggtgataatccaacgatggatacgcagattggatttggatcgtgtgatagtactaccaaatcgaagaagatgcgcaagatttcgatcagtgtgtatgttgatttggaatttagggttttagttttgaaattgtttgcttgatttctgttggaatttagttgtttttgatggttatgagatctaccaattaggataatcgcgtacatggatttataaagagtgatcataagagtttaatgttatggaattgtttcatcaaacttctctgttatttgttcaagtagatgagtttaaattgtttcatcatcagtcgatcactgtttcaatttatgtttgttgcctagatgatgcattggagtctctttttatcatcttaatgtgttctctgccgttttgttcctcatgcgtgagattgtttctgatagttatgtttttcagcttggatctttgtcatacacatcaagattgaaagtaataaagttagcaagcggtcagattttggctatataaacacctcttaccaagtttttcttcttcttggcattgattttgtggtttcattttatggtttatgtgttgtatttcaggtgaaattttggcttagtagtaagtccaagtaagggtcgtgtttcttgcctcatgctgatatctttgagcatatgacaggtcagatatctctcactctattctcatgtttgttgtgtcatctcgacaggttatttgtatttgaagaactgagtcttggcttgttttggttactcacactatcggaaaacacacgttatctagaaacagacacgaaaatcactcaaacacaatgcactcaaactcaaaacacaaacataaacactcaaaactcaaacactaccaaaaacaaatcatatctcacgcaaaaaaacctccaaacacactcaaaggtaacaaaaaagcagaacataacaaaagaaacaaaatacagcacaacacaaaactagacacaagaaagaaaaaaaaaatcaataacgtcacggttaatatctttttttcttattggtaagaactttgagatcctgttgccaagtcaatttcaggtaagtatctttatcttcctatttttcttccgtttttttatctcttacaacttacaagttacaactattaatctttttgttaacaattttgtactttgtatactattccaaaagagaaattcaagccactacaagcgaaaatggtgtcttacatacaaaagtaaagaggtaaccaatgtatttacttgatgtaatctttttgttaacaactagatatgtttcgtcatgtgattttaagtgaaggggtatcggtgatgattcaaaatccaagaaaaacactaaagttttagggtaaagcttcttgatttcttctcatttaaatacttttgcttcatattttcttatgaatacatacttgagaaaaggaaaaaaccaatcgtaaaagctggtttttgtcatacttaatgaacatgttcgatatttcagctttggacactgtttcattgtcaaaattaatagaaacaacaagagcaaatcagtcaaatcccggaatggatcagacttcgtaagatttccttctccattagcattatttttgtggttttattttaggtatagtcttgtattaagtataccactaatagaatggttttgtttcaagatggtggactcttaggctgaaaataatttaacaagaaagtgattcagtcgactaagaaaaaggaagtgtcaggtagatgaactatctttgtctcttttcatatttgttttttacggtcttgtgtatttagtatactgctaatagaatggttttataacaaggtagacggatcttaagcggaaaagaacctaatttaagaaagccattcagtctccccgaaagaagaagggtcaggtagataaacacactttttctggaaacgtctgacgtgttcaagtgatctataacttgtaagaactaattaaatatcatatatcttgattcgcaaggtacaattttaacaatatcagggatgagttttcgttattggagaatcctttgccaatgagacaaccaaatatttcctcagtcctaaggtgacttggatcatacttagtaagattttctctacatcagcattatttttgtggttttattatatagtcttttgtatttagtgtattgcttatagaatgtattttttttaatcaatacaagatagaagattctgaagttgaaaataactaaacataagaaattgattcagtctactcggaaaaagggtcaggtaggtaaacatcttctcatttctgaggttgtattttttatgttcttgctatctagtagactgttaacataatagttttgtactaagatacatgatacttgagcggaaaatggtcaaatttaaacatacattgataaaatctttttatggatatgtctgatgtgttaaagtgatttataacttgcaggaactaattaaagcacaagatatttctctatcacatcttgatttcccaggtaaatactaacgatgtcatggatcggatttcagttgttggagagtcctttacacatgaggcaaccaaatgtttcctgaccagtactaaggtgactaatgtttttcatctcctcttacaccacaaattttggttgcagaatgatttttgcaggaattatatgttgctttcttttctaactttatttgtatgtccgttttttttatccattgcatcattttgttgtggcttggacttgaacgaaaccatcatatttacatgatccggtttaatgggatttggactaatgactgtggtgtcactttcgttgtatctgtgaagaagaaagtcatgcaagaagaatctatacttatacataccactttgtttatttcgctatctttatatctttatatgtttattgtctccatttccgagctctaacataatcaatctgattggtaaatgattcagcaatcaggtgacaactcatatctcaattccgtgtcaggagcaaatgtgagtgttgaagcactgtttgaatcaaattttctgcctagatgatttgggttatcttaatgccgtctcaaaacgtttcgcagtttatactcatattgagtgagattgttttcctaacttgatgatttctgtttttcagtcgggttcttcattacacagcataacctgtcaagattaaataacaaaaaattaacaaccagtcaggctctgtaagattcttaccatgttttgttcttttcctttggggataattttgtagttttattttcttgtttgtatgttatactagtctgtgcccattataattgcttacaaaatgttttggatactagagagtggatctgcaaagaacaaaagttcaagaaagcgaatcagtagccaagatcaaatgagaggtcatgtatctttgagctgtacataacccaatttccggaggcgaatcagtagacaagagcatatagaggtcaggtaaagtaaatctttccctctaatctcatgcattctttcgtacaagttatttgcatttgacgagcccatgtggctgggcttgttcgggttactaaatgatctcacgaacacaaagacactgaaacacaatcaacccaagctcaaaacacacccatagaaaacaaaattcaaacataaacacacaaaactcaaacacgatacaaaatagaaatcatatcacatgcaaataaactccaaacaccaacagaaaaaataaaattcaacacataacttcacgaacacagacacacgaagacaattcacccaaactcaaaacacacccaaagacaacagaattcaaacacgatacaaaaaaaagaaaaaatcacatacatgcaaagaaactcaaaatactctcaaacgcaacacaaaaatagacacaagaaagaaaaaataataatttcatgattaatatttttctttattggtaagaagaactttgcgattctattgccaagtcaattttaggtgaagtattccccttcccatttctgtttcttgtatttaatctctttgttgattccgaaaatcacacaatgaatttgtttaaaaagggtgaaacaaattcacttaactctcttgctattttgtaatcaaagacgcaatgaaaaagatgaataaaactgcttagagataaagttagggtctttgctctagaacaagttagaaaattaggttttttcgtatgattcctagaatatgctaaacactatgattcctagggacaaacccctctatttatacactattaagacggtttaaagatatgctaaacttccacttcttcgaggcttgaatcatctaattttctttatctctgaagacttgctatttccaaagaggaaaacatctttttcttcaaagtaggaagtcggctgggcgatctccctacttcgggttaaggtcgtcgggcgacctccttattttggcccattaacaggctaaactgactaaaatctcagtttaattcgtaattcttctagtttaagtcggtattgtcgggggtgctaattccttcacaaacaataagccccctcccctagttcgggaatttcgaatgtttatttcgagttttccaaattaaaagaagtgaatattcggcttatactttatgaagatgcgaattaaattttgaaccgttgaacctccaagatacgacaatctagcttggcatgcgtcgaaaatataaaacaaggctaagctcgtgagttaggtagtctgatgagcctaacgagcatgagccgttgagctgcgatgaatgtgttacgagccatgagttgaagagctttcaaacatgagctgcaaggcatgaatttcgttgagttgtgaaggatgaactgaagaacatgggctaaagaactgcgatgtgctgctagatgatttgactaacgagctgcaagatgatctgctagatgatctgtctggcgagttgcaagatgaactgccaggtgagcggctggatgatctggctgatgagctgctagataatatgtctggcgagttgcaagatgaactgccatatgagcagctggatgatctgtctggtgagttgcaaaaaggactgccagatgagcggctagaagatctggctgacgcgctgcgagatattctgccatatgagcagctggatcatctgtctagcgatctgcgagatagccgggcagttgaactgcaaaacataagttgcgatgagctgcaaacatgccagtatcatttggtttagtaagatacgtgagcttttcagcttattttaaggtgcgaggaactctcggcttatcctgttttaaagatttaatgcaagacgaggtctcagtttttacaaaacatttattcacataaaagcaagcgttgaactcggctcaatttataggtgtaattgcgagcgttgagctcggcttaactgcgagaattattctcatcttttgaatgtagctcgatgctaggtaaactaggctttttgaatctggactcaatttagagtttaacttcaacaatcaacaaatgtgaagattaaatgataaagtgtaaagcatgaatacttatcttgatgggagcagaaatggtgagaggctgagctcagagttgttgttctgatgctagtgttgcattgttcgtctatgaagggtcgttcctaccgactagtgattactttacagcggacacagagatcttgtgataactctttgatgagttagacattaaggtgtaggttggtctttctagaaagataggcctcggggcttcaaactgatatgctgatcgccatgtaaattatgttgaattgctcacgaagttggatgttttcaagtggtgtcaatctgaatcgtcttggaaaaaaaatcataactttcaaatcataacctcaaatcgtgatccgctttcttttttgctttgtgtgactattgctgattattccagcaaatatcgtaactttttgagttgttttgatgctccattggtgatcgaaatcatgatgacgaaagtaaaagtcattttgtgctgcttcaaaacttttagcgaaggaaggggagacgcgatgatgctcaagttgagatctggaattttggagtcttggtaaccttctttggagctccccatgttattgacttgacttgttggagaaggaatagtagaaaagatgatttttccttggtgctacgagatattgctcgtgttgggtgttgttatcccgactttgaaatgttagctgataacgagctgttagctctgttaacgagctgcgacctaggaaagttgctaatgggctattagctaagaaagttgtagatgagcggctagctatgaagaccgttgatgagctaggaagactgttgatgagtttccacctaggcgatttattgatgaactcctagctgttgacgagctgttaggcgagcaaactgcgaggtatgaaagttgtagacgagccgtttgctaaacaaacttcgagctgggaaaactgtagacgagctgttagctaggcgaattgcgagccacaaaagctgcagacaagccgtttactagacgaactgcgagctaggaaaactacagacaaactggagctaggaacactgcagacgatctgttaggtaggcgaacgacaactgttgacttatgtcgaccactcttatctttcggacttttatccatattaagcacttttatatcttatttttcagacttttatccatattaaacacttttatatcttaaaaggtttttgtctttaagaacaagtttatgttttatgttaacctttgtcggttgattatgtattaacctgatcggattcctaatcttgaaattaggtttttagatcgactaaattataagtcatctgcaagcttcgagctcagctttcgggcggactggtttttacctgacgtcacaaccgatttgttctgtttaagttcgggttagatgttaagtgcgagtctgagctcgaattttataaataaatatttcggttcaatactaatttagtttcggttcattcggttatagaattttagtatccatttggttaggtttatttacccaggcctaaagcaatcgatggtctgagcctacccattattaaagaagtctaacttgggctcgtggttgtatatctctaattctctattgacttattattagcatgatgttttctttttttgtttaccatgttcatgtcctaattgtgttatagacttacaggtaatgaatgagcttaaatcattcacaattcatgaaagcccaaaggcctatcaaatttatcctctatttctttctttctttttcaaatctttactctttattttattatactcacaaacgaattttaagtaaaaagaatggcacaaacaaatcttataaaagttttctgtcgtcaggatcactctcaatctcaatctcaggccgacgttgctgccggcgatttctccgccgttcacgcgcctccgtaccaccaaacttcaaccttcccgtttccttaaacctatctttctcagccggaacaatcacacattccggtagaggctcaggatacctaagtgtatcgtaacagtaagaatagtacatgaaacgttgtcgaaatcttcgcatggcggcgcgttgatgggaattaatggaagagtaatcttgagactcaaggaaatcgactgagtcggaacaatccatggggacttcttgaataggatcaacggagcaaccgtctagagagaaagatttgaattcagctacgaaaggggcaaatttgtaattagctttgtatttgccgccggaagtagcccaatcagaagcgtcccaaatggtggcgtaaagagccattggctttgccggataatctgctcccattgcatcgtttctgatcacttctcttattggcacatcatctacccaaaatctggaatgattgttacacaagttacgttaatgacaaaactaattacacaaaaaattcaaaagatatatagtagttcgcaattgttaatgaaatgtaacaattataacaaacaagaaataacgagagagaaaaaggaatattaaaaaattatttgaagttatgattaaaattgttttcactaatttttttaataaagagagatttatagtttaattacgcgcaatgtaattaatcttcagtactcaataaagtagcctttaattgccactcgaggcctacgttgatctcattgattaaagtctaactcatatactatttttctatttttcaaagatatatgattaacgtttctccatctttaatttaaaaaacgaaggtcaatagaaaatcaaaattttcaacagttaattttggctttaaattaagacgcgtgacaactgaggcttattaatacgtgattacgcgtcaaaaaaagataactctaagctggtgtttaacaataatgacgaattaattgttttgaaaaagctgaccccttatcgatttttttaaaaaattaaatcaaatttaaaaaaaataatgaaaaaaagtgattagaaaactgtattttagaaaccaaaaatcgaatatttattaactatcttaggaaaaaccgaaaaagtgaagaagaacgttcggtgaaagacaaacattctttcatcgtcccaccaaatttaatatattgacaaaccgggtttggtcaacgctattgaaaaagctaaaccggaaaaagtaaaaaagaaatgatggtattgaaaaaagcttacatgatcttgtgaggagtccagagaatgctataacgatgaaactccttagaaggatcaaaccagagacgatatctctcttcacgacctctatgtgtacttccatttccgtatagatttgtctgaaacctccacggctttccttttatgttccctagaaactctatgtctaactcgtcgtgtgttttctcgaacacgtctccgtttgatgtctacaacaaaatcaaaatataaattcagctttagtaaccatttaacataaaattagaatttaaagattggtgctctttttcttgggaaacatagaactattttcttgggaaaattaatgactattttctaggcagccaaacaggaaaaaatgtgacatgggttcttcgacaaaaagtgtggtattgacgattttctcggccacaaaaaaaaaagagattttaaattagatcaaattagttagttcatgatcttttgaaaacaaataatgaaaactatctgcaaataattaaataactaaaagaaaacaaaaaacattcatgcagatggatgaaagaaacgaaaaaaaaaacattttagtggtaatgaaacagaaaaaaaaaaaaaaaaaacaaatggccggagacttacataaaaggcgacgacgacgccggcagtataatcagcgggaagcttaatcatggagctgtaaaatccatgttgatacatattcgatgatatgaaaccagaacctgtatatataaatcatcatcgatcatcatcatgacatcatcaccatatcatttaaaaagatataaaacccatgtgatgatcatatgtgtatataccggtatagcgatcgaggagaagacgaacggagagatcatcaggtgaacggacgagattggcatctccaaagagaggagaaagtgattcttcaaagcttaaggtgttgagattcgtgaaggctgatgatgatctcaaacataaacacaagatcaagatgaagatgtgattatacgatgatttagacattctttctcggaagaagaaaaagatttatgatttgtgtttgttaataaatctgtcttttgacataagatagatagagagagagaggtttatcttttggtgtgggggagaaaattgctctttggcttccacgctcgtggtgtttatataagggagagtaaattattcaatagtcttttctgatttgtcctctttgtcaatattttccagctttaccctttcttttttttaattagtctgccacggttttgcagctgtttattgtatattagtgatgttaaagatgatcgatcaagaaaaatcaaaccaatgtggatttaaaaaaaaaagaatgatcagagaactcgactaaaaatttcattatgattacttttagcagttcatgatttgaatttcatgcaatatttatagtatgatttgcaatttttaggaaacaaacctttaacataatgcaaagacattaaataaatttttgattaacaactggaccaaatatcttccaaaaatatataaattaactaaggtaaagaaatattgagttaaagcaactgtatattagaatagctagactatttctttatctaacaaaatctaatccaaatcgtataaatagcgatataaaaatatcaaaattaccacgtcatttactatgattactagtaaatttgaaaatacattttaagatatgtaaaaactgacatagtaaaggtatataaatttaataactaaattgcctatttaacactataaaaaaaattagataacctgtctaatttcccgacgacatcaatttgctcaaatatgggaaagatcccttaccaaaaaaaaaaaaaaaaattctcttgtgacatttagtcgatctagaaagtttgaaacaataaaacatctaggctttcgatcgtccttcatttgatgtagccgaccacgtgaagttagagagtttagtatggtttgaggcacaaggttcaaaaattgtatatttgggagccctttcaccggatgccctaacttagtatcaaagtgttcaatttcaaaaattgtatgtttaacgaattcttctccggtttaaaatcatttagtttgaaagaaaatgagatgttttcttattgatgtcagccaataatggagaggcttttctcccttgcactcaaagattgaagcgttaagctagctagtcataaatttcatatatgatcataagatacatacactgcaaagttttacaaacggactgcacgagattgatgatggtgacaaacaattgggaagcctaaccaacattttacccccgtcatttataatgtcaaaagagaaggtatttaagtgttcctaagaaaattaccttaattttatgtaatttgaaaattttaaactcgtgtttagtagattacgtgtataggcatttggaaaaataagtctttaactggttttatttctttttagctgttcatttccaattatagtggaattagcatgtgataaaaaaacaaggacagagagtaatattagcttataaaaaaaaatagttggtatactactcttatgtttaggtacgtgtatatcaaagggtagatttgtcattttgagtggatgaaagccaaatgaataaaaatgacaactaagcatgaaatggacaccaaagggtctttatctgtatacccatgcagagtgtctataatccaccagtcatcctcatcactaaatataattaatcatataaatacatattttacgtgtaggtgttcaaattaggtggttacactaatcaacactttatattaataaaaaggttttcgacaaaaaaatttaataaaaaggcatagattccaaaacgatggacagccaaacgtaaacatttcgaaagactcctttgttctttatgttagttatatgtcttctttatatatatcttttgttcacttcctctttatatattcataatatttttatgttactcttcattaaatcaagagcagattcgttagtgtcatcgatataagatacagtattagtttgtagtgaaacattatgttttagtagattatatatttaagcatttaataaacttttagtcaaactgtccctttcttttagttggcagcagataccaaatcgccgtaacatccaattaatcataatataagtagttgtttcaatatttatatattcaagagctcacttttgaataattcagaaaccgtaaaccaaagatcgaattaacctaaacccctactttgacagaaataaaataagatcgaataacctaaaatgaactaccgaatcttgaccaaaataagttaacttaatcatataagaaacaaaagtgttacgatcaaacttcatttcaattgcgctaattaactaacccttctgtatttaccaactcttcaacacaactaatagtttatgtaatcttttctcagttggtcgacagcaatatttaacagatatgatattttctcagttggtcgacagaaatatttaacagatttgatattttgcgaagagggccgctatatgtaaaagtgtagttgccgtcataaagagaataatatgtaaaactgtatttagttgatttggtttaccaacctcttacctctctaacctctatgcatgcatcttgtcatcaacttatatgcaaaagtaattaaaaggaccaaactatttaatcactgatttgttattctaactgtataatgattatttcagtataaaactgatagttttgtgatataatatatgatacatatatcaatcatatatgatacgtaaattgttttagtagaataaccatatatcaatcatttgagttgaaaatcgtttttgtcttaccatctaattttagaaaagtgggtttagcaggtgaatggtaagatggttctttgttacgtactactattctaatattttttgctttgtgaagaatagttaaattgaattatcatatttactaatatttttacattagttgtattgaacaacgactaatatatttactaatagttgaattatttgcatgaacaatgaatttatccgatcattttcagtctaaaaatatatacatatcgaaggcacatatattcttactaataaatggaattttgttttgtcaactaataaaatataaaatttggaggctgaatctatagtactattacgaaggaagcaatctttctttttctttttgccttttcacttttctttgagagacagagagtgattccattaccatctgtacacacaatcactaatggcccgcagtgttcaattgtctgcaagcttatgcactcagctaacaaataaagataaacgttacatatgctcctttgtttattttgacattatccattagaatattcttatagataattgtattataaacttgatgcatttttcttttctttttataaattaaaacatgaatcaattttttaactaattcatcggacattaaggtataatgtgtttttcgtaatatttctagtaaaggcattattagtccaagagaattgaaaccttagttaatttaccttgcttcagcttataaattaattaacttacttttcgaaaacatgtcaataattagtttgtgtacgattatatcaatttaaaaatctagagaatactcattttacattcaatcggttcatatgaattcttaaaatggttcgaaactctttccaaactagttttcttttgtttgacgttctttttccaatttaatttaacaatatataaaaataaacttataccaaaagttattctgtcgaccgaacttaaatggaaaaagaaagacatcaaagtgatgacaagaatcgccacaacgaagaatttatgaagtggaaagatagagacggaaaaagacttacaaaacggaatatttattatataaaaaaaaactctttcgtaagctgaatttttctttctaaaattcattaagacaaactaaaaaatgatttatcattttaaattatagagatgctaaatttatagagaacaccataattgtattccaaaacattcaccggctaatagcaaacaaaaacaatgtatatgtatacacaaacgggtcaaatagggaaactaaaaacaaggtccaaattcagcaatcatcaatcaattagagaagaatgagaaagtctttgaggtattgaataaggtagaaaaactcaactgcatcatcttctagagagggttgaccttatacaagagcatttgcatgtggatttcatcattactagtgagagagtaaactaatccgtatttaaactccactattacacttattgttatttttaaactgaaaactaataattgaataatctatgtttcaggttttaactatttgaagtcttaaagaaaacaatgagaatttaggggaaaagagtgtcttggaagacatataaataggctaaattagataattgttattttggattgctaatatattagtatctagaagtgctaatgattatctactcaatatcatcgattttagagatgccttaaaaatgaagctaggaacattatctattcgaagaagcttattataatatgtaactcactagggtcttgatccatattatatagtacaaacataatccacataacaataattgaggatgttcttctctaacaaaaattattagaaaatgatatttaaccaataataataatgtggttacaaccttacaacacacaagatatgactcaattagttaggacttaggagaagtgcatatggtggggtatgtcatgtaatcatctccatacttatttgtgggaaaatatttatacacaaatggataatgataatgttttttagattaattattaagcaagttttgtgcgcttgtggtaccgtgttcaagttgatgtactaatgatattcattacaaaaagttcaattttacttaagtcgtaaaaacgtatactagtgggatttgaaaccagttgaattaaccagtccacagcataaaaaatgggaaacgatttacgctcctttgaatataaacagaataatacgtaaagaattgagttttcagttttgagctaatatgcttgatttaagtctaaagttttgaagtgaagtttattacattttacgaataggagttgctaccaatttcacatgagagatttaacatttacattcactactctcaaaaaggtacaaatgtcaaggaggactaaactcaagccttgaggaaatggtatttggattcaacgtaactctctgaatcccataagaaagacccaaaagccacagcttccaaaaccaacatcgcaagtccagagacactcagagacagaacctcgtcgttagaagtatcgagctttccatcctcgagtatccttatatccggtcgtccaaagagcgcctgagtctgcttctcaatcagagtcatggcttctttagaacgtatcgtggcatatctctgaagcgtatccgagtccaaatacgtaacatatgatctcaatccataagacgatgactcatcttcatttctttgtatcgcgtattcatcgggatcatattcctctggttgaatcctgatcaaggaatccgggtcccataacgggtaaggaggcgaaggttcttcgaaccgttctctggttttctcagggcgtttcggaagtgtgttcatggttctctcaagttggtatctttggtctactcttctgagaaaatatccatacatagcagaagcagcatagagttttcctagcttgattttgcctatctgaactatagagcttaacggaccaactgctggtccgtctccaagaactgaagacaagtgactctgtatcatctcgaacgcatccgcagagtgaatgacttcgagcttctcttcttgattcggccataagtctatccgtcctgctgggtctgaagttggtttaatccgaggaatcatagagattcctttttccacaaatctgtgtaccactaaacagtaaatgatctctgctaaagttttacgtctttccttatctctaacttcagatatcctcctgcaaatcaaccacacaacaacatcttcaagtagacctcgaccaatacagtatctaaggctaaggctatgtacttaagcattgcaagattctcccacagtctcactcaaaaacttgaagcaaaaagacttacttttggagaatgtcttgtgtggaagacgaatcagctttacgagactcgctttccgcggcgaatttctcgagctgctcatcgacagtaacgggtaaaagatgaggatgagttctaagaatctgctccaaaagctgtcctacaggagattcaagctcaacaggagcaagaggagcaaagttctcattagaatcttcatctcctgaagctctcactgttacacttcttcctctgccattctcattggtactactacttccaagcttggggatacagaacgaatggcatctctgtaatttaacaaacgaaagcaacaagaaaactggaattaagattacacatcaaacccaagagattcagagatttggttcatcaacagttacacagacaatttcgataattcaaaactctacacttaaacctaacctagtagagatagtttccacagatttcgcagcggaaacgagagagtgttacctgagggagaagggaaggagaagaagaaggagagaggaatttggagaaggaatcggagagatagtggttgaagcagagcctcctgccatggctgctaccgatggcttgcatttttgttccttcttttgatatttcgaaaaagtattcaaagattgagaagaagactccgaaatttgtggctcacaaacaaaacgcaatcgcgtttgcgttttaaagagtaaagattagcgtttgcgtttctctactcgagctaaacgcaatcgctaaactcaatgtgtctagagttccgagttcattttattgagagacaaaaaagtccaaaatctgaagaaaagatatacacagtttgttaaagaagagactatttttttttttcatgcttcctcctatttaaacactaaagaaatcacaccaaatctggttcctaaaattacatatatctgttagctgctgttcttgagtcaagctgagttgtggaaggaaccacgagccgtctacgcaacatcctgacgtgtacttctctgtggttcttgctcgttcttgtccaagtctccaccttccagtgacggggctgacgagaacttattctgcaacaacgggtaccagagaaaacagcaactttcaatttatgttcaagcagattatggatgttgtagaagaagattttattgtaatcttttaccttgagagagctattttcagcaagaagctcttcatattggcttttaagcttgttaatttctgctctaagacttgagttctctccattcaaaacctctgctcgttgtgctagctcatcacactccgcctgaacacagaagagaaaaggaaaagcttttgatcattcatacttgataggcatgatgatgctagatcagcttgaagaaacatgtttatgttacctgtttacgcaacctggatctacgagcagattccctattggattgcttccgtctctgtcgcttaatctctctctcatcctgatttcacaaaacaatcaaacacgctgcttggataaacgtaaaggagaagtaagattaggagatacttacagaaacctgtaaccatggctgtgattgggaaccatctactacaactccaggaactgctccagaaacattcccatgaccgctccaataatccattccgatatttagatttgttggtgggcctggaacacctgtagccgacactggcatgatagcgacggtctggttcactggtagattacttccattacggggtggtccatgagcagaaccaccactctctgaagctgtttcaccttgaattacgaaacaagaaagagaaacctcaaaataagcagattctaacatgtacgtcattattacatgttaagagatgagaactaaaaagctatattagctaaccatccttcccgttgtgtctagagccagagtcctacaaaaatcaataccatattcataaacgctccttaattttcatatgaaatccaacgcaacgatttaatgaaatgctagaaacttacgttttgtgaatttgcatcacttccgtcacttgatccatcagaaccgctctcagcactgttaaaccgagaacaaatcagacaatttcaacaaaattatccaataacattatcatagctagagctagcaatcataagtattcatgccaatatgatgttcatacaaatatgaagtcacatgccttttagaacaagctccattagctgatgctcctgagttttttccagcttcattgttctttcctataatcatattcaaacttcccaagcttccttttgatcttttgattggcaatttttccttcccatcagatggtttaccatcaccctcaataacacttccagtattaccctgaatccaaaacattcttcaagcaagatcccatctgacccatactctaataaaaacagtgataacagagaaaactcacagaagcttcagccattccattaggagaaggcattgcatagggactatatggataagacccctgttgcagcacggaacatgttaacagaaactacaaaaacattcacttttttgagtaacataactgaacatccaaactgtaacagtaccggaggtaatgaaggatgagcatacatgccacctggaggatacatcgtaacatacggatgaggcggtgttccataaggcggcatcatatgctacaaaaaggaaataacaatgtcttaagttgtcgttacattcattcattaacctaacgtactatatatggtagaaaatattaatctcgattaaatctacacaagtgaccaagggaatttatcccaagtatgcaaatatctatagtaaaagttttgggactcgtcaactaatcccctgaagctccaaagaatgcttaaaatcatctaaaaaaattcgatttacctgaacgccccacatataaggatgaggttgaggacttgatgctacataaccatgaggcggcataggagaataagcctgttcaacaagaaaaacatgaaccccataacaccaaaatgcaacaaagaaacaaagaataatctcgtattagacctggaagccagaccaatcttgagtaacagccactccagcactcacagcagaagaaggttcctaaaaacacaaaacattaaacatcaaagcatgacactaacaaaaaacactttgctagaccaaatttacaccaaaagcaaacctgtgaaacaacagtagcaggagcagatgaagaagtcgaaggcggtgtagtcttaggttctttctctttacctgatttttccatctcactgctacccattaatcacattcaccaatttccaaaaccagtgaaagcttcacacaagaacagaacaagttctgcttataaatagaaaacctaccaaaatccaacaatcagatttctccaacttaacattgatcaatacagttcctaagcatatgaactgataaaaccaaggaagctaaaaaggtcacatttttatctcagggtacaaataaaaaacgtaactttttagttaataaatgccacgataacaaaaaatctaaagaactacaccgattccagaatctatgcaatgtaagaaactaaactgttactgaattattgttcaaacgtaattaaaactatagatcaggggaaaaattacctgaagatctgtaatgtttgaggaatctgaggaaaaacagagatgtgaaatgaatataaaaaaaaggtttgatttttgcagaaattggagtgagattgattagaatcaaaagaggtagaaattttttggtgattggttcgtgtcgtgtttctgacggggaagaggaggaggaagctgcgtgggcttgacagggaatatatcatttaaaattaagcccaaatctttcttttatttatgcaattaaccccataaaacctatcaattgcattgctgttcccacattttatcaattacatataaagatctttatttcttacaaatttagaagaaatagtgaaccagatttaaaccggattattgttgacgtgaggcttacgggattcgatagagaaaaagtagaaatagtgtgaattctagggtttaataaaggattattagactcacgaagaagaagaagatagtagtattcctatcatattaaaaacaaatacgtatatgtgtaagatccaccatagtcgatacaaactaataactccgatgatagcaattagcaagaatgctttctcataaaaggaaattaccattttactaacttagtgagaaagttttttacttttaacaattaatatcgattataatttataaaccacataaatattattatttttgttgcaaaataaaccacatatttatttatcttatgaaagtaagaatttttttttgtatagaaaaagtaaaaccctagtgaggaaggtgtgtcttctttctgatgcacatataatcctcgtaaaaaagagtggtgggcgtgaaagttaaccctaattttctatttgcaaacaatgacgatgatgtccgacctttcacttgatttagtcgaagagatattgtgtagggttccgataacttctcttaaagcagtgagatctagttgcaaactatggaacgttctttccaagaaccggattttatgtaaaacagaagctagaaatcagtttttagggttcacgataatgaatcataggctttattccatgagattcaatctccatggaatcggcctcaatgaaaacagtgaagagttcattgatccatctataaagccaataggtaatttacttaatcaagtcgagatatctaaagtgttttattgcgaaggtttattgttatgcgtcacaaggaaccactcaagcaagctcgtagtttggaacccgtatttgggagaaattcgttggatcaaaactaggaatgattaccacataggcgttacatatgctctcgggtacgacaacaacaagaaccacatgatcttgaggtttttttctgaacaaggctactacgagatttacgacatgaactcttctgactcatgggattgtttttatggcattcccaacaaggggttaaaatgttatcagcccggcgcgtcgttaaatggaaatgcttattttttgactgagggaagagaagtaatggaagggtatgattgcttactcggttttgattttacaacaaagaaatttggaccacttctttctttgtcgttttcgcatgattttatagagactgggagactatcttgtgttaaaggagagaaacttgcggtcttatatcagcgctgctatacctatgagatggaggtatgggtgacaactaagatagagccgaatgcggtgtcatggagcaaattcttagcagttgaaatggaaccactcactagtctaaagtttaacgatgattctggcagtttcttcattgacgaagagaagaaaatcgtcgtggtttttgatatagacgaatctgaacgcaacaatacggcttacatcattggagattatggatgcttgaaagaagttgatcttgatgaagttgtgaacccacaagaatctgtggaggtcggagaccgcatttattctttttcaccatttgtgtgctcttgctcttatgttccaagtttagtgaaatttaaagaagatgcagaacatgaaaggaaagataagaagaggaagagtaagaggaagcgaaccaacaaggtgtatctctactagttgaaggaaagaagaagactaattgatgatttcattttcatgcgttttttttttttttggttttgtaatgtcctttgaacaagattagtcgattattattttgtttctgagtcagaaccatgtgataaaaaactactcgtacgagaaagttcttctccacttgaactaacttcttctatcccctcccccaccaaagataaatgtctcaaaaacgcatcgttacaggcgcttggatatgttaagagttcttgtagataaaaaaacaatagttactctttcccatggtgataaaaatttataggatggatatgattttatactgtgttttgattttacaaccgagagatttggacagattcttcctctgccgtttaaacattcttttagggatacttggactctatcttctgttaaagaagagaaacttgcagtcgcagtgttatactggaaaaatacatgtgtgatgatagagatatggatgacaattaagattgatcctaatgtcgagtcgtggagcaaattcttaagagttgataggaaaccatgcattgatcttcgctttgatgatcgtaatgacagttttttcattgacgaagagaagaaagttgtcgtgttttttagttcagacaaagttaaaacctctacggcttacgtcattggagataatagatatttgagaacagtggatcttgaaaaagctgcaaactcccaagaatctgtggaggtcggagaacgcgtgtattgtttttcgccgcttgtgtgctcttgctcttattatgttccaagtttggtgaaaatcaaccacaatgcaggacgcaaaaggaaagagaagaagacgaagcgcaaaagtaaagacaagcagatgaaactaagcaacaaggtgtaacactagcaatgcttatatctttcttgcatttcattttgatttttttttcttcttttcttttgcaatgttctctaaacaaaactagtcaatattcgatctttattttgtttctgtttagttctcttaatataggaacctggattttgctttccacaatgctatgtattaattagttccaacacttggtatagagacaacgaccatgactgtttctcgaataggggcttaaaccgttcaagataattatatgacggaaggttcctagatatgttagaatcatgacgagtacgaggactttgaacacttgtataatgtagatgaatgagtcaatagagagacaaaatatgcgggattcaaaatgtttttttttttataaatcctcggtccatgtatacagagcaacatcctcaaatatatgttgtaatgcaccaatttaagacgttaagctaatgcaatcaagattcatacttgaattcaaattcgttaacatcaatcttaggcaccaagccctcttatgctttagaaagcatatatgccattcaaagtttgatatcgatttaaccatttttgatgtatagattataaacatccccaaaccatcaatatttatttgtagtcggttcaaacgacaagtaaaagttagtcacaactcacaactcctctcacaagtaattgatctaatgttttgtctcttttgactagagacagttgactttgttaacacgaagtcaatagtcaatactaattaattgctgttactcagagaattgatgacgtggcgagatctaaactgttaaaataattcttcaatcgtgaccgtcgaatattccatagtagcccgatcccaaattcttccttcccttcccttccctcctcttcgcctctcacaacaactcgaagatcaaagaattcgtaaattatctctttcgaatcattttctggaagctgagaagaaatgggtttcgaggatgatccgtaaattctaatcctttctcttcgatttcatatttttagcttcgttgtgcagataaaaatcccacctttgattgaatctagggttaccaaaatcgatctcttttcaatttcccaaatttcgatttcgtttttgtgaaaagagagtgttttgattcatgggcagattcaatctcctattgatttgaatcctttgtgtttcagattcataagattttgtattttttttttccaggtaccgtgatgtagatggagagccaatagtggactttgatgattttgggaatgatcgcgagccatctacagagccacttcaggattttgatgaagatctggctgatgatattggagattgggatggtgaaggatcacaaacgcctgtttatgataatgataaagtagctaaaccaaggaagagattggtgaagaaatcttctagtgaacgtgtgactattgatgttccggaattgattgatgaggatgtggatgatgctgagtttgatgagtttatgggaggaagaggtggtggtagtactgattatgatgataaggttggtaggaagaggaagaaggagaaagagagaagtagtagtggtagtgggaaggagaagaggcataagtttccgaatcgtggcgaaaggaagtcagaagagattgatgagatgtggaaatctattgctcataacccagaggtgcagtagattgactatagttataagattgcctgagagagaattttgttttttcgacttataaaagtgtttcgtttctgttgtagaatgatgaagaaggtgttaggactatggatgatgataatttcattgacgatactggtttggatccttctgagaggtatggaggtgacgctggagaccgttctccaactcattatcctcaggtatgagtagtgtatcttcaattttgatctttgagtctagcttttgtttgttgatacaaaatgcttttgttatgaataaacaggcagaagagggtgaggatgaagatgaggtaaataaccttttcaaaatggggaagaaaaagaaaaagactgaaagaaatcctgcggaaattgcgcttttggttgagaatgtgatggctgagcttgaggttactgctgaggaagatgcagaacttaatagacaggggaagcctgctatcaacaagcttaagaaactttcgcttcttaccgatgtacttggaaagtaagttgctaacttactgttatcttatactgtttctttctaacaatctgttttgtaatacgtttatttttcgttatccaggaagcagcttcaaacagaattcctggaccatggagttttaaccctgttgaagaattggcttgagcctcttccagatggaagcttgccaaatataaacatccgtgcagctattctaagagttcttactgatgtatgctcttgttttcctgttgagggtttttccgtgattttgagcctttttagctgctttaccaattactgagtctgtcttgcagtttccgattgacttggaccagtatgatagaagggagcaattgaaaaagagtgggcttggaaaggttaggatacattacctgattcaaattgacaagaatcggtatgtaggatttatactcaggaacttaaatttgttctggctttggcaggtcattatgttcttatcaaagtccgacgaggaaactaattccaacagacgacttgctaaggatttggttgataaatgggtaatcatctttttcaagagctccaatccctcgaatcaaattccagccagttacttactgtatacttgatgatgcagtctcgtccaattttcaacaagagtactaggtttgaggacatgagaaatctcgatgaagatagggttccctatagaagaccaccagtgaagaagtatttcccgaaacctttattttttttattttactcgctttcacatttcatatactgattcatagcttctcttcttgttctactggggatagacctagcaacaaagcgacaatggagtccagagatggtgactttgacttggaaattcggtatggaaaaaatcttccaaatttgtagatatatgaacttctaaaagttatgttttaacattactcattgtttgttgaaaaatatgcagggaacgtaaaactggtctgacttcgggtcagagttcaaggggagacaggcaaatgacgatgaggccggaagcaaccccattggactttttgatccgtcctcaatccaagattgatccagatgagatcatagcccgtgcaaaacaggtttctcaggaccagcgtcgggtcaaggtaaaaagacttctaccgtttatctttttttcactgacaaacaaaacaccatctaagtactgatttggtatggtaaatacaagtgaaatccttttcaagaaagccttgtactggctcaaaatctgagacctttttgtgacagtatataaacaaaaaccctttgttgctctttcttttctctaatagtccttgagctggttcttttgtgttataactgcagatgaacaagaaacttcagcagctaaaaggaacaaagaagaagcggctacaagctacgaaagtgagcgttgaaggtcggggtatgatcaagtacctctagagaggttacaaccagaccataccatccatccacattgaaattggttccttctatcgtgttaatcttccaactttgcttggatcagtgtttaaaggtctttcaggtgaagtcgaagacttaaaggcattggggttatacgtatatgtactcttctatatatgctttgctttgagcctctaatgtaatgggaagtgaaaacactttgttcgtcacttctttcttcagagcataaaatattatgataatcaattttcagtgagttttcaataaacactttgtcctctttctttgagattcatctttctgctatattgtttgttagaaaataaagcaatgacactaaataactcaaaattggctcgttatttgcagacacaaagactacttttatgtgtgtttcacaagttttggttgcttgaaacggaaacgcctccaaatgcagatgaagaaaaaaagactattactttatttctttctgaaattcagaaacaaagaagaagaggaaaacaaaatcctaatttctacttactaaatctctcatctacttactccaaatcttgaagctgcaaaaacatatgaacccacaacgcaaacaagaacagcaagaaccaatgaaaagagctgaaaattagccagaaactctcctgagacttctgaatcaactgatctgcaaactacagagttttgttttaaactgcagccttgaggcatcatagggccatacagagtgaaagctgtctgataaaaccagaggccttgaagagtcattgcaatgccattgcatagatctactgggaagcttgtagggcagattgctccagcgattgaggagatgacgcagagaccgatgagaaagacgaggaggagatggtaataaccttcaagacctttgtggcttgtggagtggaagaagaagagaagacactctgccgtaaaagctgttgcagcgattagacacagagcttcttgtggcagaggaagtaacctaagacaaaaaataaagcatcatgatgaataaattgattcatatatattcgtctacatcaatttctatggttgttttattaacaatcaagtcaagaatcactagtaaaccacttttgagttcaataccaccaaagatccgacctaacttcagagctaaataccaaagttgatgtatctatctatagtcaaatcatatattatcaacgatctagatctaacaaccatagtctagaataatgaatatttaggatcaaaattcacccaagatccaacctaactttaaagttatataccaatcttgacgattgatttattgataatcttattatcaatgatcaagatccatttctaggatagttttcattgaaaaccaagtcaagaatcattagttaattatttttgagttctcaaaatcaccaaggatccaacctaacttcaaagaaaaataccaatcttgatgaatctatcaataactgaatcatattatcaacgatctagatccatttctaggatagttttcatcaaaaaccaagtcaagaatcactttaaacaacttttgatttctcaactcaccaaagatccaacccataactatcattgccataaatggtatcattaaacagaacatttttaataccttgttttctcggagagcaaagcgataaatccgaggatgaagaacatgagaagcatcccagagtgctcaaagtcattcatatgggaaggattcaaaacaccattaacaaagaacttgagatgagttgaatacaagaactcaatgcacaagtcaatgaacgagccaatagtaacaacgtaaagctccaagtacttgatcctatcattgaaaccaggaacaggatgccaaactctaacccgaaatgaactaggattcgatatgtatctaacaactgagctccaaatgtgccatactccaactaccaagaacaatgtaccaggcaaagcatgacccttgaaagaacccatctttcttacaattcctgatcaagatagaacattcactatcaagagaaagctacagattccaaacccataatccaaagagaggagtatatatatataccctgtaaggaaattgcagatcagattcttcttttgtcgatttcgatcaaaagataaacccaacttctcagaaaagtcaagagtcgtcgatgaaaacgagagagaacaaacaaatttggtcaacgtttgaaagctatagaggagtagctagaaacttcactcaaaaacaaaattggttttttcaaggggaaaacgtgacgaaactgagaacagaacaaaacccagataacaaaaatagaaactttggatcagaagaacataaaaatctagactttaccccagaaagaaataatttggatcaacctcaacaaaacaaaattcttaaagagggttaaaaatgaaacctttaaggagaaaaggagagcaataataggtcaatgatacaaggaagattaataaattcatcatctccacacatgtcacatgggagagcatttgagagaatctgatcttctcatcaagaattttttattatttgtcattagctcattattatgtaaactaatcactctctatttctttctatcataaaacaaaatctgaaattataaatgccacgtgtttaatacaatataactctgaactctctcaagtctcttcaccttcacacattttgacgaagaacactgttttatctttctgatagctaacgctttggatccttgtgtggatctactccacctttgattcaaccattttggtttctttgtcttgattttggagatttttgaggttaattgcttgaggagtggccaccaaattcgtaagaacaataggagattgttgtaaaaaggtgacacaaacaagccaacctggttactcatcattacagtaagtctctgtgacatgttttgatgcagtgtgcagcttgttatgcgtaaatgtagccgttttcgagcagtaaagctccagactttagttgacaggattgtagtttcaaaagaatggttctttacaggctttaagctagtaagaactcaaacattgtcttagtttttgcactgtttagattatactgtgtctacccttttgtgtagcttttggatcccacttcaaagtatttatattgaatgagttggaacaaaaaaagatgaagattttaaaggtctagtagtcagattctaagagatcaagaactaagcatcatcattatcttgtatgttcaatgcgaatttaatagattgtagatcatgtagaacattatggacccctttgcttagatcttcaaattgttgctttggtatctgatatgtcacttcaccatcttcgccaacttgttcccgtagagtcaccacctcttccagtaacttattagccttactgatatcgagctgagtttttattggtgattcttgtttggaaactatgatgcttgtgtcagtatttctcttgacaacagaattgcctccggatgatgaattaccacatgagttgacattttctgaggatcttggtgatttattccttgttgcagaaggagaaccagaaatagatggtgtcttgttcaattcttttgaaactcgcgggcttgggggatgattgtaaccacgtgaactggaagcttcatgagatcttggtggcttcttcctcgttgaagaagaaccagataaagaagatgacttgtacggttcttttgaagctcgcaggcttggggtatggttgtaaccacgtgaattggcagcttcatgagatcttggaggcttcttcctcgttgaagaagaagagacagacaaagaagatgacatgtacggttcttttgaaactcgtgggcttgggggatttttctgaccacgcgagttaatagcttcaggagatctttgtgacgtcttcctctttaaaggataactagaaacagatggtgtcctgttcgattctttggaaactcgtgagcttgtggagttgtggtgctttatgtagttctcttgcttaggaggatgagcaacagacgatgtatgtcttggaacccaaggagaagagctcgattgcttggctaagtctgctacccgaggtaacatgttcggttttttgacaggagaatctgttaaagaaagttaagatgtcaatccagaaacaagagaatcaacagtgagacctgaacatgaaagcacatcattttaccactttgctttggcgaaaacgtatgtgtcttggatggagatctcccaggcgagctaggaagctgaaacgtgacatgaccctgactctttgttccccccgagcccctgagagctcccttaagatccttaacatcatccgctgctcttcccgagcttctatcagggctctttgtcgatctaggtgaggatcgctgaacccatttaagattatcagagcttctagcaggactctttgtcgatcgagctgatgatgtctcaacccattcaggctcatcagaacttctatcagggctctttttcggtctatgtgatgatctctgaacccattcaggcttcttgaaaggatgcttagttgcttgctctgaacccgtgagactccctgcatagctactactgccatggcttcgaccatctgctctactcacctcgatgcttgatccagtaacagatgtctctctttttgtctctatttccctcttctttaccacctcttgatcttttccctcagcttttgctgctgatattttctttgttacctttgtaggagtcgttgcagcagttgttgttgtagtcacaggtttctgttttgaatgtgaagccagaagcgttttgaaaattttctcagcccctaactgcaaaaccgcaacagaaagtttccaccaccgaatgtacccaaccgtaacatcagcctcgtgaagccgagcaggaaagtacaacattccatcagcaatgggacggatataatctttccaggccaattccggcgtctcaattctagctggaactacgccgggaacatcctgatcataaccaaactgcaatgccacacggtgaggataataaggttcaatgcaatccaaaccaaccagtttagcaaacctcaaacaccgaccaaaggctacaatgttctcatcaggtcttactcgaacccaacagtcatcttcaaagtaaaactttgggaatctgaagttattcacaggttttgtatatggacgatagtcgaaactctctttagccgagtccaacaccgctctgatattctcaggatagccatacacatcctgaccaccaccataatgatgccaccgcgctatccgcggttcaccagtctttaactgactcggctggccaggtggctgcaacgccatgaatctctccagagcccaaacctgcacaaactgaaacggagacttcaccaccactgtctctttctcactataaccagtaagaaactccttcaaaaccccaagatccccgtaaatcctagctaaaaccgccggagcaagagccaacctaacacccttagcaagctgaaccgcagccggaaacagcttctctctcaacacgtcacccgaattagtgaagacgaaacgcgaaagccacgaaaccataaacgcctcatgctcaatctcattccctgaattcatcatctctttcatccacatactaacacaacatttcttctccaaactcacctcaatataacgtttcgcctccttcatcttctcctccacctccttcataccatctcgtttaaccggagccaaagcattgttcccagtaacagacaatcctccaagaacaatcatatcctccaacgtcaacgtcgcttcaccccaaggaaacacaaatgtattcgtctcaatacaccatttctccaccaacgccacaatcaaatcatcatgcctcttaatctgatacctagacgccaaaatcgcatcgtaaacaccagatttcttccacaccgtggcgtgtgacttagccattacattaacccactcaatccagttcaacgacggagttccccaccctggaaacgagatcttcgccgttggatcaaacccttccggtggtctacacacaaacgcatcgagaggaaggtcaaagacatcgtcgtcgatagatgccgttgtgtagtttaagaacctcgccgttcgtaaagattcaaacttttcaccgtcgggacacattaaagcttccctgacttgaacaatttgttcatcttcttgatcagaagatcctcgagactcctccattattaggtcggagaaccaaaaacacaaattttagggttttgggtcaatttctggctaaagtttagaaatttacaatggggaaagaaaggagaagcagttgagagacaaaatcttgactccggcgcgtttgttgccggagatcccgacagaattttcccgcttaacggggaagaagaaggaaacaaaaaatgttttttaaaaagaaacaaaatttaaaatctatttagagatatgataataatctaacggtggtggagctttgcttttacgtcagaagtatacttcaattggaaaattttatcctgttcctgttttttggaactttttttggtaaatacagaaatctcattctagaaattatttttgttacagctatgagctttacataaaaagtattttccagatagtataagcagcataaccaatttttatgtagaattaacaaagtgagaagagagaggaattctaaaagttattaggaaaaaaacacgtgatttatattcttcaaactaattagatttttctttttgttcagaaattaggattttaaaaattacaaaataccttatatattatttaagcttcttaataaaaaaaaatagtcaagattttgttttcatgaaaactcggatttactaaaaaaagacgaagaaatagatttcttatttcattccaatcgatttaaacgcaagagaaagaattcataccacattcaggtatctcggttgaaatactcgtaaatggtatttgtgtttttagattattaattttagtaatctcatttatgaagtgtttattctcgttttcaagaaattctgaatccaaaatatgaaacaaacctcggaaggagtttccatgtaatctacgtttttcttttcacttaaaaataaattatagatttagttttacaaaattggcagttaacgaaacaattgcagaaactaagccgacaaacaacataataactaagagtctaaagtccaagaatatgggaagcctacaaacacaacttctaatgcataacaaatccgaattcaaggaagggcaaaacataaactaactgaaacatggaagatcaaaatctataaacagaatctagaacaagagactttgtaatctacgttttaataccaactaagaaaaagtttatcattaattaaaaatgttaatactaattaattaaatggtagataacggctactagaaagagaattaaaattctctaaagattaagtttattaaagatccacataatacagcccattaaaggcccagtcagttttggggatctagtgctttgaaatgtgagaaaaaattttacattattattgggtatagtgatgtaattcattaaattagattcattaaactaggggcacatagatgcagtcatgcagaatgttccaatacataaactattaatgttttataagttaaaaagtcataagatttggcttttgacatttgagttacattgttaattcaaaaagtgcatgctttcgagaagatcaaaaacttttttcttattttttattttatctaccactgacttggtcaaatttttagcctttgtgaaagaattttatttttgcatgaatttaaaccggttgatttaaaacaaatacattacttttgctaaagatggttcaaggcgtccaacaaatacactgacatagcaaattttgaaataatcaactaaaaaattattcaacaaattcaactgcctaatccggtggaaacatgcattaatggatatagtattaaacatctttcattacttagagaaattttcaaggtcaaaacatatacaaagatatataaaaatgttataataagattttttgttttaaagatcaaagtagagtaatatgatatttgtaaccaagggcgtttttactttttatcatgtataagggcatctccaaggctaaacaccattttggtgttcaaattacactatttttagcactaaaacttatgttctctccaaccataacaccaaaaatcacactaaaagaataatctactattatattatttatttaaaagatttcttttattatttaatagttttgattaatatttattattagtatagaaatacataacattataaaaatagtacattgaaatatatatttaaaaatacataaatttttaactattttaagtattttcatacataataatataaaaatatcataattaaatcaacaatttcaaaagatataatatattaatgtatacattcatttttatattttatatttattaatcatttgtaattttatatctgttaattgaatttttattgatataataagtgaatagtgtttagagttgtgaatagtatcacaccaaatttgatgtaacactgtagcattacactaaaatggtgtgaattttagagttccattggagagcttttagtgcaaaaattacactaaaatggtgttttagagtttcattggagttggcctaagtgatttcagttttaaaaacaaatggtgtatataaataggggttttgaaaaaaatatatagatattaattagagtctatgattttaaaaaaatataacatacataaaaatggacctataacttttttgaaaattattatatctcatagatatactttatatagatggaccaacatatagtttgagacaaccatggttttagtctcattcctaatttctccaattactccattcaagtgtaggtgtgaatcaaacatccaacaaatctctagcggtaccttgaatattggacgaaacactgaaactgtaaccaattttataaggacagaacacaaattcaactactttttaattattacaagaatgatttctttttttttaaggatagaacacaaatcttcacacgtggcatcttccacaaccaatcacggtgctctcaccaaccccataattaatttctcttatctatttgtcataattgtttttgttttctcccacaattatcttctaattctttagtccacagccccgcttcgagaaaaaggcacgtaatcctttgtttctcattcacattttcatttgattctaaaataatattggccattattatacattaactttcaccagaaattcgtatctatttttgtgttgatttaatcggaatttgtaatttagtagtctgcattcatattatgtggagaacactctctcgagcagtcaagattttgtgacgaaccttatagagttggtcaagaatatgcatttccctatcgattgaccagctttttaatatttttaagacaatttttgtctacttcgaaatctttcgtataaattttaaaatgaatattttggtatctagcatcaggtttgttgatgttgtattctaatccagtttgagaaaccaatcatccttacatattttaatttagtttgtgaggttgacacaaaaacaaaatctatagaaaactgcatgacgtagggttaatttgttcattgtcttcaatcttttttcctgttgtttatgataaaattaataacgtttgatagttgatgtttaaatgttacaaaattattacccttcaaaagatatcataatttttgtgtttttaatttcagaaaatcattatgttttatacaatttgatgttgtagttttctttttgttccactttgtatctatattattattatatttgtttgttactaatagaaagaggagaaaagtacaattaatattattaaattaataaaaaaataattaaaaaataaaataaaaagttactttacttaatttatgtgaaaagaggagtaaacgcaaacaaagagagaagctctgttttcatatggcgtttgatcatttatttttattttttaaaaaatgtcgagattaggtgaactactagtctactaataaggattattattccattgcaaagaatctaaaaagctcagatgacatttgtaagtcatcacaataaggttgaatagctcagaagagtgcggcgtgtgggtcataacgccaccacttaaacaattatttacttcggagcatttagagatttacaaaatacacctatttgtagatttttaatctatattacacatattgtaccaaattttatgtgaatatgatggccgaaaaagaaagaaaaaattgtggccgattaggggattctttgtgaccattgaaaaattgactatatacacatagaatttcaaacaaatgatgtcatgtttgtaaatgaatacatgcgtaagctttttaactggtatagaatatagattaattatatatggagataaaaatctgctcatgttacatgttttcaaactccaattgaagagttggcgaattgttttttctaaagtcaatagttatgtcagaaatagttaatttttgtcaaagtatactaaaacggccaaattaatctctattctctaattaaagtgttagcgaaagatcccaccaaaacatgtcaccacgagttagaacaataatcgctttcagaaaggtctagtggagtcatcaggtgtcgtgagacacattagtaaacgaacacgttagtcaaattattaagagactatggttccacactggtaaagacccaagaactgactaatctgttttcatatagacatctctatttttgtgttacaatccaattatgtactattttcggaattaagatattatttactaatcgtggattacctaatataaattctttaaaataatcaaagagtatattttgtcataagtattcattgaaaaaggatatggtgagaaaagtattaatagaaaatacgtattttctttcataggcatcatatcaaatgtcgatatctttacttataatgcatacaattatcggttaggtgtacacatatatatgtaaatgtatatgtttcgattcattatatatatacacaatcaagagaggctctttcaaccaaaacattgatctatagagagagagagagaacaaaaaatgggagagagcaaacgcaccgagaaaacgcgcgttttggtggttggagcgactggatacatagggaagaggatagtaagggcgtgtttggctgaaggtcacgagacttacgttttgcagaggccagagattggtctcgaaatcgagaaagtccaactctttctttctttcaagaaactcggcgcacgtatcgttgaaggttctttctccgaccatcaaagcctcgtatccgccgtgaaacttgttgacgtcgttgtctccgccatgtccggtgttcacttccgtagccataacattctagtccagctcaagctcgtcgaagctatcaaagaggctggtaacgtaaaggtataataaactataaattaaagtttaattatgattgatcggtttagaaaattgtgcggttaatctgaaaaaaatcttataagtaaagaaaccacacgaaaataaaattaaaaaagccggagagtttatttttgttttactatttacatttcatttataagaaaaaaaacgtcaacggtaaaagatccatattgcatgcatacaaagaaacttgatactcttgttgattattattactttttgtttcttgttgtaattataatgatatacgtaagattaataatttcagcggtttttaccatctgaatttggtatggatccaccacgtatgggacatgcgctaccgcccggaagagaaacctttgaccagaaaatggaagtgcgtcaggcgatagaggctgccggaattccttacacttacgttgtgggtgcttgctttgccgcctacttcgccggaaacttgtctcagatggtaactttacttcctccgaaagaaaaagttaatatttatggtgatggaaatgtaaaaggtaaaattttcaaactcttttttaactctttgtggttatataccttttaagactttaaattagatcaagcccatctaaaccaatcaatttaaaccgttttatatttgtagtggtgtttgcggatgaagatgatatcgcaaaatacaccgcgaaaacgttaaacgatccacggacattaaacaaaaccgtgaatattagacctcccgacaacgttctcacgcagttggaattagttcagatctgggaaaagctaaccggaaaagaattggagaaaacaaatattgctgcacaagacttcctcgccaacattgaacgtaagtccaagcaatagtgtaacgtaatctactttatgttcggcaacatatccttaatgggccaggctttaggtctatttgaaaaatatagcccatcaactttatttgatttcttttacatgtatgtagaaatggagattccacaccaagcagggataggacatttctatcacattttctatgaaggatgtctcactgatcacgaagtcggagaagacgaagaagcttctagtctttatcctgacgtcaagtacaaacgcatggatgattacttaagaatgttcctctgatttgaccaagtcttatctatactaaatacacatatcaaaagtttgatgttttatattcattcatgttctgctatatatgcaaatttaaaaatatattcttcatgcaagaaaaaatattatctttggtttttaacaaccaataaaaagaacaacaacaacacaaggagtaaggcgttggtaactctactgattgaaccctacctcgtaacttctagtatggaagaatacggaggtccaaagctcgagaggtttgatgaaatcttgtatctcggttcgtaactaagatcagaacaaaaaacacacacaacaacaacaacaacaaaatatccatggaattgcatcgatatgaaagaagactactaacaaatgagaaaaaaaatcagtaggaaagtagaaatatgaaagatcacaagtttttgtttcttaaagcaaaaaaaccataaaacccacttgtaagcccagtctttaatttatataccagtgctaaactatgtggttgcaagttggaattggaactttctaagtgtatgtgaatatgcataaattgaaaccaaacaattagttgagcttgtgtactaaattattgtaatcgccgccaaaagataagtaataataaactattgctctcttttgtggacaacaacgcacacgagactatacaaaatttgatggaataaaagacagcgcataagacaagataaacaaaggctgataattgcataatgtgcatatgggacttttggagtgtcatcaatgaatcacgaggacggatgttagtatattacaattgtttattacaaactcgaataattccaatttaccatcattgacacataaacattatgaaatcaaatggtttgataatgatccttgcatatataattataaaaatcatcaacccgaatttgagttcgaatgaaaacagataattttactatccactactacgtcacatatttttttttagtcgcgatttcgtacaaactaatcggtggttaattaaaacgtaaaagtcaaatatttttgttgtggatagaatgtaaacaatacttttttaagtcataagaaggcaacacaagcaatgttagcataatgtttattgccaacgagtagataaacgtggatgagcgcatcaagacatgttactaatcccaaaaccttaagcaaaagcgatattaaaatttatcaagatcatagactctgtacataatatttttattcctgaaatgactaaaaattgtatgactgatcaaacgtatagaattgtataacgtttgttgacaaaaacttgttcgtcaaaattttcttctatattttaaataaagctaaaacgagtccatattttattcccgcaaagctttttgatttcctcgaccaaaataaatgcatgtcctacctaaaaactataagtacatctcctaatacgaagaatataattttatcatgatttgtcatttggttataatttatccattatttagattaggtaaccgaaaactttgcctttatttgaaaagttaatacagaaactcataaaaggcaaatacaagatgcttctccatatatcaaaccttatttaatttctagtataccaaaagaagtcaaaagaaaacgaaatttactccatcactcgatgatttcacgcgtgctactactttgatagttggtcactacaataagcaatgagcatttctcaattctcatactctctttaggaatataatcgtaacaaaaaaacatcaaatgaattattcaaaatttatttcccaaaagaaaaagattttgatatctaaccaaatttaaatccggcccacacaacatgatactttgacaccaaatgttgagggtttctcttatctcttggctctaaacctaattccaacccaaaaaaaaacatatgaaatagtacaatacaaatatcaaggggtcttaaagatatttccaaaatataagtaagaggaaatgaaaattagctgtatacaatataatatattgtccataatttttttatatatataatatggtattaccttatgtcaattagttataattatacattacaattgataaacatgcaatgatttgtgggttttagtttaaataattttcaaacattattatgtaacttatgtttaactattatgaattttttttatcttttcggatgtcatctatcttagtattagatcaaaataatttaccataaaatctgtagaaagattttttaatttttttggtaaggtgaagaaaaaatcatttgtttatagaaatggataatatttttatataacaattggaaaaaaacctcaaaaataaaaatattagaaactcctagagtttggatactttcttcattctctttctttctcctttacgccactctccatcaaaacccatctctcttctctttctctctcgagtttatcaacaatggcgactctacaagacataggagtctcagctctcatcaacctcttcggtgctttcttatttcttatagcattcgctgtcttaagaatccaacccatcaacgacagagtttacttccccaaatggtatctcaccggagaaagaaacagtcctcggcgctccgacagaactctcgtcggaaaattcgtaaacctcaactacaagacttacttcacgttccttaattggatgcctcaagctatgaaaatgagtgaatcagagattattcgtcatgctggtcttgattctgctatcttccttaggatttacactctcgggtaagtattttatcttcttcttctcggaatttggttttgtcttacataaaaaacgaaactttttgagagtttgagttgtttgctagtaaaatctgttgagaagtcaatatctcgagaaaatgaaagaacaaaaaaatcgaaactttttcaatattgatagaaaaatgttgattattacagttgctctttatttttattgtcctacataattatttcactaagatttgattaatggttctcgagagaaaaattgttactttcgagaaaatttatgtttttttggttcttgttcttgtgggttttttgtgggattgattgtaatctccaagaacgaatttttacgagtgacaaattcccgaatttcacggttttaagaatctttactcgtgagaatgattgtactttattttaacaatataaagaatgtacagctaagtttcagatttgtctgctctgtattccacaaagacaaaagcaatagaagtttcgtttctgttcactgtttcgtgtttgtttcctgagaaaaagtcactctttagatatctttcttttttccccgggaaagttactgtaaaaatttatgtgagaatctgaataatttgttggtttgttggcagcttgaagatctttgcaccagtgatggtattagcgcttgttgttcttgttccagtaaatgtatcaagtggaacacttttcttcttgaagaaggaacttgtggtcagcaatatcgataagctctctatatccaatgttcagcccaaatcttcaaagtgagcttacttgtgaactaaaattatgctttactaatcaatgagttttactggctaaagtttaacatttctgtgtatgtgtgtgtgtgtgtttaggttcttctttcatattgcagtagagtacattttcacgttctgggcatgtttcatgctctacagagaatacaataatgtcgctattatgcgtctgcagtatttagcttcacagcgtaggcgtccagaacagttcactgtgagtgaaaaagccgcaaacttcaaacatggataattgttgcatctatgtttatatatactactgtttgtttttgcaggttgttgttagaaacgtccctgacatgcctggtcactcggttcccgataccgttgatcagttctttaagacgaatcaccctgagcattacctctgtcatcaagtaattttgtttgtccttcatcacttactttagttgtagaatgcgttagtgtgtgattgatgaattcaacattcttgtttcaggctgtttataatgcgaacacttacgcaaagctggtgaagcaaagagcgaagttgcaacgttggtttgactattatgtgctgaagcatcaacgtaatccgcataagcagcctacttgcagagttagtctctcccacgccatttgtttagctttttgaaatgaaacgatgttgattgtgatgggcggattttcttttttcagacaggttttcttggtctatggggtaagagggttgattccattgagtactacaagcaacaaatcaaggagtttgaccacaatgtaagccattcatttgctttttaagttactgctgaaacagaaacttaaacctcgtttcatctttggtgatacagatgtctttggagcgtcaaaaagttctcaaggactccaagctaatgcttcctgttgcatttgtgtcgtttgattcacgatggggtgctgctgtttgtgcacagacgcagcagagcaagaatccgacattatggttaacgagtagtgctccagagcctcgtgatatctattggcaaaaccttgctataccttttatctctttaaccatccggaaactcgtaattggtgtctcagtctttgccttggtctttttctacatgattcctatcgccttcgtgcaatctcttgccaatttagaaggtcttgacagagttgcacctttcctcagacctgttactagattgtaagtctctccatctatctcggttttttgcttcttggtatgttagaccattgatccctctccttggtatttattgcagggatttcatcaagtcattcttacagggtttcctccccggtcttgcgctgaaaattttcttgtggattctccctacggttctgctaattatgtcgaagattgagggatacatcgctttatcaacccttgagcgtagagcagcagcaaagtactattacttcatgttagttaatgtgttcttgggaagtatcattgctggaaccgcgtttgagcagctgcactctttccttcaccaatcaccatctcagtaaaccaccttttacttctattaaccgtctaaagattctaactttgaattaaaactcatatcttaaatgctcttgtttattgtgtttatgcaggattcctcgaaccattggggtctccataccgatgaaagctacattctttatcacatacataatggttgacggatgggctgggattgcaggtgagattctccggttaaagcccctcgtgattttccacttgaagaacatgtttattgtgaagactgaagaagatagagtgagagcaatggaccctggttttgtcgatttcaaggagactatcccatctctccagctctacttcctcttgggaattgtctacactgctgttactcccattcttcttcctttcattctcatattctttgcctttgcttacttggtctatcgccatcaggttcggtttcatacccaatcacccgtcgtatctaattctccgctaaattttgggttttcttgatggtgctttcttggtttacaatgcagataatcaatgtttacaaccaacaatacgagagttgtggagcgttttggccgcacgttcatggccggataatcgcaagcttgttgatatctcagcttctgctaatgggacttttggcttctaaaaaggcagctgactcaactccattgcttatcatcttacccattctcacactttctttccacaagtattgcaaacaccgcttcgaacctgcctttcgacaataccctcttgaggtaaataaagaatcttttgggctctcttcctaaaaaaaaaaggtttaaagccttcttacaaagacccgtgtttttggtcttaacaggaagcaatggcgaaagacaagttagagaaggaaacagaaccggagttgaacatgaaagcagatcttgcagatgcttacttgcacccaattttccattcattcgagaaagaagtagaattatcatcatcatcatcatcagaaaaagagactcaccaagaagagacaccagaggtaagagtggacaaacatgaaacacagtcgtctagtcctgtgacagagctcggtacttcttcccatcaccatcatgtctacaattccacttccccttcttctcactacgcttcagcttatgagcagtcatcgtctcagtatgaatatcactacaatactcatcagtacgaggagcatgagtaccgttacaattgatctctagacagaagaaaaatatgtaatctcttatgagtgtcataactaaaggtttcttttggtctaggtttaggttatttgttagctgactttggtttcggttttaaaggttaggaaattggtgttagtgtcattcacttgtatgaaaatatattcgaagatttaatttattgtcatctttcaagcctattgtaattgtaaaatttggtttattggatatgataaaagttacgttagaaaatactctaataaaaaagatgtatcaaaaactatattaatattaaattaaagtagacaaaagacctttcttaacggaaaaacctaacccggaaaaagacaaaactggatcctcttgtcgatagaactttctctcttgtccatacaaatatcgtaatccaatttcaatcacaaacatcattaacgaagatggagaagactatgatgtgccgtctcttagaatcacatccacgtcgtcgtctccatacccatggctactcttttagccactcctatcttctctcctttagcttcttctccagcaaggaaccgtctttcttgctctaagatccgtttcggttccaaaaatgggaaaattctcaattctgatggtgcccagaagttgaatctctcaaaattccgtaaacccgatggccaaagatttctacaaatgggttcttctaaagagatgaactttgagagaaaactctcagtccaagctatggatggtgcaggaacaggaaacacatcaacgatctctcgtaacgtaagcttcacgatgttgtttatttaccattttattgtaacagctttttaaagttttgaatttttcgttcaggtaattgcgataagtcacttgttggtatcacttgggatcattcttgctgcagactatttcttgaagcaggcgtttgtagcagcgtctattaagttcccaagtgctttgtttgggatgttctgtattttctctgttcttatgatatttgattcggttgttcctgctgctgcaaatggtttgatgaatttcttcgagcctgcgtttctgtttatccaaagatggcttcctttgttctatgttccttctcttgttgttcttcctctttctgttagagatattccggctgcttcaggtgtcaaaatctgctacattgtaggtatgaacttgatcttcacttggttaatgatcttgtgttctctggtagcttttatgggttttttgtctaattgctctgttttgtttattatttaatgctgatctgatgtcaatgttgatttgaatgtttgtttgtatagccggtggatggttggcgtcactttgtgtagcagggtacacagctattgcagtgagaaaaatggtgaaaaccgaaatgacggaagccgagcctatggcaaaaccatcaccattttcaacacttgagctatggagttggagtggaatctttgttgtgtcgtttgttggtgctctgttttaccctaattcattggggacaagtgcaagaacttctctccctttccttctttcttcaactgtgctaggttacattgtaggttctgggtaatattcaaaaacccttctttgttctccatctttaagcctctctatctcgcggttattctcagtgtcttatctttctttcttccaggttgccatcttctattaagaaagttttccatccgataatctgctgcgcgctatctgcagtacttgctgctctagcttttgggtatgcttcaggatctggacttgatcctgttttaggtaaagttaccttcactatgaaagaaactatagagaaacccttttttgacctaaaacagaaagtaaaagcattttgttaactgctctttaatggtgacaggaaactaccttaccaaagtagcatcagatcctggtgctggtgacatcttaatgggttttcttggctctgtcattctctctttcgctttctccatgttcaaacaaagaaaggtaaaacaaacaacaaacttgttctgttttgctttagaaaactggtaacaatcgctttggtttgcctctgtcttcttcagctcgtgaagaggcacgcagctgagatcttcacatctgtgatagtttcaacggtattctcgctctactccactgctcttgttggacgtttagtcggtttagaaccttctttaacggtttcaatcctacctcgctgcatcacggttgcattggcccttagcattgtatcactctttgaaggtatatatgtttcttcttcttctcaacacattaaagaacatccctaacgaatttgttggacattttcagggaccaattcgtctcttacagcagctgtagtcgttgtgactggtctgattggagctaactttgtacaagttgttcttgacaaactgcgtttacgtgatccaattgctcggggaattgcaactgcttcaaggtgactccattacaaaagatctttcacattttgaattaaaattatgcattaatgccattaggatcaaaagacatgacctttctattttttatggacagtgctcatggacttggaacagcagctttgtcggctaaggagccagaggctcttcccttttgtgcaatagcttatgctcttaccggaatcttcggatcgttactgtgttctgttcctgccgtccgacagagtttgctagcggtcgtcggctgaggattgatgatgtggcgaaacacgattgatggtctcaaagctggcgagttacttaaaatatgagagcagtttgctttggatgtcaaataagcttgtattaatgaaaaagatgatggaaaatgtttatttattttattttatatatgtaaatgttgtgagatttgtacaacatacataaattttatataggagtaggatgtcccagctttccaaaaatttgtcacaaaggtatattgtctccatttgaggaagatgagatttgtcgatgaaaacttcgtcctctagttgagtttgttacgttgactagacaataattgctcatatagtaatagcaggttgaagattcatttgatggagttaatgttgaaggccaaatgaggagaaacaatagattcagcaacatatcctcgaaggccgttagtcgtggacttggcgaaggcgctagcaattggctgagactgagacgctagttgttaatgaagaaagtttcacattggaagttggggttagtatcaagtagtatataaagagttagagtcactctacttattgccaattgattttaggttggaatgtcatgttaagcccaaatctatcactggaagtacctcatagcaccaatgatcagttttgatagcagcttcatacttgcaatcccaaccaatagtgatctatgaagtatattaagaaatgttagaaacaaatattctaaagcttccacggctctttatttgctttgaatgattattttaataatttgattattagaaccaaagtatgttaaaaatttaagattttatgaaaatggataaatttaagattattttgaatagtcatttatatatatatatatatatatatatatataaattgctaaccgatccaggaaaaacaaaaccgaaacaaaactggttgcgaaaatcttataaaatgataatagattttgatatgctggtaaatttacatttcacttttcttaaaatgtgaatataaatattttaatttagaaatttatgtattctttatttttcttttctgtcaaacagaaaaatctgtcttcaatttcatcttgtatgtgataaaaaaaaattataagaagtccccagtaacaatcctttacaaacaaattgatgaattcaacaaaaataagggagagggcaaaagcgtaaataacaaaagtcgatgacgagggccaaagccccaatggaaggtgttaagctaaactctcttcttgtctgatatttcttctactctcaagtctcaaccacataaccaataaaaaatgctactaatcccaatttcttcttcttcgtcttcgtctatgtaagtttcctcctttttaacattcaaattctcatctcttaaccatattactaacatcgtctttgttgtagtagccctcctcctaattcatatccatcgaatcatcactctctgtttttctccaatctcacattcccaattcaacatggtacttatccttcatcaatctgttgactttttttttcaatttcacaattcaaattcgaagatttgggtcttcgt
